United States Patent Application Publication US 2018/0126003 A1 - sequence listing, part 71

SEQ ID NO: 128743 - DNA, 1317 bp, Artificial Sequence
  derived and/or modified sequence
atgccacttaatgtgtcctttactaaccggaactatgacctggattacgacagcgtgcagccatatttctactgtgacgaggaggagaacttctaccagcaacaacagcagtcggaactgcagccgccagccccaagcgaagatatctggaagaaattcgagctgctgccaaccccgccgcttagcccgtccaggcgcagcgggctgtgttcaccgtcgtacgtcgcagtcaccccgttctccttgcgcggagacaacgacggcggaggcgggtccttcagcaccgcggaccaattggaaatggtgactgaactgctcggcggagacatggtgaaccaatcgtttatctgtgatccagatgacgagacttttatcaagaacatcatcattcaagattgcatgtggtcaggattctccgcagcagccaaactggtatcggagaagctcgcgtcttaccaggctgctagaaaggattccggttccccaaacccggcccgcggccacagcgtgtgcagcacttcaagcctgtacctccaagacctgtcggcggctgcttccgagtgcatcgatccatcggtggtgttcccttacccgctgaacgattcgtcctcacctaagtcgtgcgccagccaggactcgtcagcgttctcgccatcgagcgacagcctgctgtcatcaaccgagtcatctccgcagggaagcccggagccgctggtgttgcacgaagagactccaccgaccacttcgtcagactcagaagaagagcaggaagatgaagaggaaatcgacgtggtgtccgtcgagaagaggcaggcgccaggaaagcggtccgagagcggatcaccgagcgctggtggacacagcaagccacctcattccccactcgtgctcaagcggtgccatgtctcgacccaccagcacaattacgctgctccgccatcgactcgtaaggactaccccgccgcgaagcgggtcaagctcgactccgtgcgcgtccttagacaaatctcaaacaaccggaagtgcacgtctccccggtcatccgacactgaagaaaatgtgaaacgccggacccacaacgtgttggaaagacaacgccgcaacgagttgaagagatcatttttcgcgctgagggaccaaatcccagaactggaaaacaacgaaaaggctcccaaggtggtgatcctcaagaaggccaccgcgtacatcctttctgtgcaggccgagactcagaaacttatttcggaaatcgatctgctgcgcaagcagaacgaacagctgaaacacaagttggagcaactgcgtaattcgtgcgcc

SEQ ID NO: 128744 - DNA, 1317 bp, Artificial Sequence
  derived and/or modified sequence
atgcctctgaacgtgtcctttacgaatagaaattacgacctcgactacgactccgtgcaaccatacttctattgtgatgaagaagagaatttctaccagcaacagcaacaatcggaacttcagccccccgcgccctccgaggatatctggaaaaagtttgaattgttgcctacccctccgctctctccaagcagacgctcaggtctgtgttccccttcatacgtcgctgtgaccccattttcacttcggggcgataatgatggcggcggaggatcgttctcgactgcagatcagctggaaatggtcaccgagctccttggaggagatatggtcaaccaatctttcatttgtgaccctgacgacgaaaccttcattaagaacatcattattcaggactgcatgtggtcaggtttctcggcagcagcaaagctggtcagcgaaaaacttgcgtcataccaggccgcaaggaaggattcaggttcccctaaccctgcacgaggccattccgtgtgttccaccagctcactgtaccttcaagatctttcggcagccgcaagcgaatgtattgatccatccgttgtgtttccctacccgctcaacgactcctcctcgccaaagtcatgcgcctcgcaagactcctccgcatttagcccaagcagcgattctcttcttagctccaccgaaagttcgccccaagggtcgccagagccactggtgctgcatgaagaaacccctcctactacttcctccgattctgaagaggaacaggaagatgaagaggaaatagatgtggtgagcgtggagaagcgacaagcacctggcaagcggtccgagtcgggatcaccttcagcaggtggacattccaagccccctcactcgccactcgtcctcaagaggtgtcatgtgtctacgcatcaacacaactatgcagcgcccccaagcacccgaaaggactacccagcagcaaagagggtgaagctggattctgtcagggtgcttaggcagatttctaacaatagaaaatgcacgtccccgcgctcatccgataccgaggagaacgtgaaacgccgtacccataacgtgctggaaaggcagagacgaaacgaactcaagcgatcgttctttgctcttcgggaccagattcctgagcttgagaacaatgaaaaggcccctaaagtggtgatccttaagaaggcaaccgcatacattctgtccgtgcaagcggaaacccagaaacttatctcggaaatcgaccttcttaggaagcaaaatgagcagctgaagcataaactcgaacagcttcgtaacagctgcgca

SEQ ID NO: 128745 - DNA, 1317 bp, Artificial Sequence
  derived and/or modified sequence
atgccgctgaatgtttcttttaccaaccgcaattacgacctggattacgattcggtccaaccgtacttttactgcgacgaggaagaaaacttctaccaacagcagcaacagtcggagctgcagccgccggccccatcggaagatatctggaagaagttcgagctgctgccgactccgccattgtcaccttcccgccggtcaggattgtgctcaccgtcctatgttgcagtcacgcctttctccctccgcggagataatgatggcggaggcgggtcgtttagtactgcagaccaattggaaatggtgactgagctgctcggcggtgatatggtgaaccagagcttcatctgtgatccggatgacgaaaccttcatcaaaaacattatcatccaggattgcatgtggtcgggattctcagcagctgctaagctcgtctctgaaaaactcgcgagctaccaagctgcccgcaaggattcgggctcgccgaatccggcccgcgggcattccgtctgttcaacgtcctccctttacctccaggacctctcggcggctgcttcggagtgtattgatccatcggtggtgtttccgtacccactgaacgactcctccagcccaaaatcgtgcgcatcgcaagactcctccgcgttttcgccttccagcgacagcctcttgtcctccaccgagagctcgcctcaaggtagccctgaaccgttggttttgcacgaggagactccgccgaccaccagctcggattcggaagaagaacaggaagatgaggaagaaatagatgtggtgtctgtggagaagagacaggccccgggaaaacggagcgagtccggatcaccttccgcggggggacattccaagccacctcacagcccacttgtgctgaaacgctgtcacgtctctactcaccaacacaactacgcggccccgccaagcaccagaaaggactacccagccgccaagagggtgaagctggatagcgtgcgggtgctgcgccagatctcgaataaccgcaagtgtacttcgccgcgatcgtcagacactgaggaaaatgtgaaacgtcgcacccataacgtcctcgagcgccaacggcgcaacgaactgaagcggtcgttctttgcgctgagggaccagatcccggaactggagaataatgaaaaagcgccaaaagtggtgattctgaagaaagccactgcgtacatcttgtccgtgcaagcggaaacccagaaattgatcagtgaaattgacctcctgaggaagcagaatgagcagctgaagcacaagctggaacagctgaggaacagctgcgct

SEQ ID NO: 128746 - DNA, 1317 bp, Artificial Sequence
  derived and/or modified sequence
atgccactgaacgtgagcttcacaaaccggaactatgatcttgactacgattctgtgcagccatacttttactgcgacgaggaagagaacttctaccagcaacagcaacagtccgaacttcagcctcccgccccatcggaggacatctggaagaagttcgaactgttgcccactcctcctttgtctccaagccgcagatcaggtctctgctcaccaagttacgttgcagtgactccctttagcctacgaggtgataatgacgggggtggcgggagctttagcaccgcagaccagctcgagatggtcacagagttgctgggcggggacatggtgaatcagagcttcatttgcgaccctgacgatgaaaccttcatcaagaacattataatccaggactgtatgtggtccggtttttccgctgcagccaaacttgtgtcagagaagctggcgtcctaccaggcggctcggaaagacagcggttctcctaatcctgctagaggacactccgtttgctccaccagcagtctgtatctccaggatttatccgctgccgcctccgaatgcatagaccccagtgtggtgtttccatacccactgaatgactcttcatcaccgaaatcctgtgcctcacaagatagttctgctttctctccctcctcagacagcttgctgtcctcaaccgagagtagccctcagggatcccctgaaccacttgtcttacacgaagagacaccaccaacgacctcttctgactcggaggaggaacaggaagatgaggaagagatcgatgttgtttctgtagaaaagcggcaggcaccgggaaaacggtctgagagcggctcaccttccgctggcggtcactctaagccaccccatagcccactggttcttaagcgctgtcacgtgtccacccatcagcataactacgcagcacccccctctacgcggaaggactaccccgccgctaagcgcgtgaaactcgatagtgttcgcgtacttcgtcaaatctctaacaacaggaaatgcacaagtccccgtagctcagacaccgaggagaatgttaaacggaggacccacaacgtgctggaacggcaacgccgaaacgaactaaagcggtcttttttcgccttacgagatcaaattcccgagcttgagaataacgagaaggcccctaaggtcgtgatcctgaaaaaggcaactgcctacatcctgagtgtgcaggccgaaacacagaagctcattagtgaaatcgatctgctccggaagcaaaacgagcagcttaagcataagctggagcagctacggaacagctgcgcc

SEQ ID NO: 128747 - DNA, 1317 bp, Artificial Sequence
  derived and/or modified sequence
atgccactgaacgtgtcgttcactaacagaaactacgacctcgattacgattctgtgcaaccgtacttctactgcgacgaagaagagaacttctaccaacagcagcagcaaagcgagctccagcctccggccccatcagaagatatttggaaaaagttcgaactcctcccgaccccaccgttgtcgccgtcacggcgcagcggactgtgctcaccctcctacgtggcagtcaccccattctccctgcggggagataacgatggcggtggaggttccttcagcacggccgaccaactggaaatggtcaccgagctgcttggcggagatatggtcaaccaaagttttatctgcgacccggacgatgaaacgtttatcaagaatatcatcatccaggattgcatgtggtccggcttctcggctgccgccaagctcgtgtcagaaaagctcgcctcctaccaggcagcccgcaaggactcgggaagcccaaatccggcacggggacattccgtgtgctcaacctcgtcactctacctccaggatctctccgccgcagcttcagagtgtattgacccatcggtggtgttcccctacccgctcaacgattcgagctcaccgaaatcttgtgcctcgcaggattcatctgcgttttcgccaagctccgactcccttctgtccagcaccgaatcatcgccacagggctccccagaaccgctggtcctccacgaggagactccaccaaccacttcatccgactcagaggaagaacaggaggatgaggaagaaatcgatgtggtgtcagtcgagaagcgacaggctcccggtaaacgctcggagtccgggtcgccctcggcgggaggtcactccaagccaccgcactcaccgcttgtgctgaagagatgccatgtgtcgactcaccaacataactacgccgccccaccttccacccgcaaggattacccagcggctaagcgggtgaaactcgactcggtccgcgtcctgcgacagatctccaacaatagaaaatgcaccagccctcgatcatcggacactgaagagaatgtgaaacgcagaacccacaacgtcctggaacggcaacggcgcaatgagttgaagcggtcattctttgcgctgcgggaccagatcccagagcttgagaataatgagaaggcaccaaaagttgtgatcttgaagaaggctactgcatacatcctgtcggtgcaagccgaaactcaaaagctgatctccgagatcgacctccttcgcaaacagaacgaacaactcaaacacaaactggagcagctgagaaactcatgcgcg

SEQ ID NO: 128748 - DNA, 1317 bp, Artificial Sequence
  derived and/or modified sequence
atgcccttaaatgtttcttttaccaatagaaactatgatttggactacgattctgtgcagccctacttttactgtgatgaagaggagaatttctaccaacagcagcagcagtcagagctgcagccacccgccccttctgaagatatctggaaaaagtttgagctcttaccaacgccgcccctgagtccttctcgaaggagcgggctttgtagcccatcgtatgtggcggttacccccttcagcctgagaggagataacgatggcggcgggggcagtttttccactgcagaccagctagaaatggtaactgaacttctcggcggcgacatggtcaaccagtcttttatttgcgacccagatgatgaaacattcatcaagaacatcataatacaggattgtatgtggtcaggttttagcgcagccgccaaactcgtgagcgaaaaacttgctagctatcaggccgcaagaaaggatagtggaagcccgaacccagcaagaggacactcagtttgttccactagctcactttatttgcaggacctctctgctgcagccagtgaatgcattgaccctagcgtggtttttccctaccctttaaatgactcctctagccccaagtcatgtgcttctcaggattcttcagcgttcagcccaagttctgattcccttctgtctagcaccgaaagttcaccccagggatcccccgaacctctcgtcctccacgaagaaacacctcccactacctccagcgactcggaggaggagcaggaggacgaggaggagatagatgtagtgtcggttgagaagaggcaggctccgggcaagagatccgaatcgggcagcccttccgccggcggacattccaagccgcctcacagccctcttgtgctgaaacggtgccacgtgagcacacatcagcacaattacgccgccccacctagcacgcgtaaggactaccccgcggccaaacgtgtgaagttggatagcgtgcgtgtcctaagacaaatctctaataatagaaaatgtacctccccaagatcaagtgataccgaagagaacgtaaaacggagaactcacaatgtgctggagagacaaaggcgaaatgagctcaagagatccttttttgccctccgtgatcagattcctgagctcgagaataacgagaaggcaccaaaggttgtgattctcaaaaaagctaccgcttacatcctctctgtacaggctgagactcagaaactcatcagtgaaattgatttgctccgaaaacagaacgagcagctaaagcacaagctcgaacagctgcgaaattcgtgtgcc

SEQ ID NO: 128749 - DNA, 1317 bp, Artificial Sequence
  derived and/or modified sequence
atgccactcaacgtgagctttacgaaccgtaattatgacctggactacgactctgtccagccatacttctattgtgatgaggaggagaacttttaccagcagcagcagcaatcagaactccagccacctgccccttccgaagacatttggaaaaagtttgaactactgccgacccctccattgtcacctagtaggaggtctggcctctgcagcccgagctatgtggcggttacaccgttcagtctgcggggtgacaacgacggggggggcggcagctttagcacagcagatcaactggaaatggtcactgaactgttgggcggcgatatggtaaaccagtcctttatttgcgaccctgacgacgagaccttcattaagaacataataatccaggactgtatgtggagtgggttctctgccgctgccaagctggtatcggagaaacttgcttcttaccaggcagctaggaaagatagtggatcaccgaacccagccagagggcattctgtgtgtagcaccagttccctctatttgcaggatttaagcgccgctgcctccgagtgcatcgacccgagcgtggtcttcccttacccactgaatgactcaagctcccccaaaagttgtgcttctcaggactcctccgccttcagcccgtccagcgactccctgctttcttccaccgagtctagcccacaaggaagccctgagcccctggtgctacatgaggaaactcccccaactacctcgagtgacagcgaagaggagcaagaggatgaggaagaaatcgacgtggtgtctgtggagaagcgacaagctcccggcaaacggtccgagtccggatcacctagtgccgggggacacagtaagcctccgcacagtccacttgtgctcaagaggtgtcatgtcagcacccaccaacacaactacgccgctcccccctccactagaaaggattatcccgctgcaaagcgggtgaaactggactcagttagggtattgcggcagatcagcaataatagaaagtgcacatcccctcgatcatctgacaccgaggaaaatgtgaagcgaaggactcataatgttttggaaaggcagaggaggaatgagctgaaacgctccttcttcgctcttagggaccagatcccagaactggaaaataatgagaaagctccgaaagtggtgatcctgaagaaagcaacagcctacatactatcagtgcaggccgagacccaaaagctcattagcgaaattgatctgctgcgcaagcagaacgaacagctgaagcacaaattggagcagctccggaactcctgcgct

SEQ ID NO: 128750 - DNA, 1317 bp, Artificial Sequence
  derived and/or modified sequence
atgccattgaatgtatcattcacgaatagaaattatgacctggactacgatagtgttcagccttacttctattgcgatgaagaagagaatttttatcagcagcaacagcagagcgaattacagcctcctgcgcccagtgaagatatttggaaaaagttcgaactgctccctactccaccactcagtccttcaaggcgatccgggctttgctcaccatcctatgtcgctgttacaccttttagtctcaggggtgacaatgatggtgggggtgggtcttttagcaccgcggatcagcttgaaatggttactgagcttttaggtggggatatggttaatcagtcattcatatgcgatcccgacgacgagacgttcatcaaaaacattattatccaggattgcatgtggtcaggcttttctgctgctgctaagctcgtgagcgaaaagctagcctcatatcaagctgctcgcaaggattcaggtagtcctaatccagcacgtgggcattctgtatgttcaacatcgtctttatatctacaagaccttagtgctgctgcgtccgagtgtattgatccatcagttgtgttcccatatcctttgaatgattcttcctctccgaagtcctgcgcaagtcaggactcttccgctttttcgccttcttccgacagccttcttagcagcactgagagttcaccccaaggctcgcctgaaccgctagtgcttcacgaagagactcctccaaccaccagctctgacagcgaggaagaacaggaggatgaggaagagattgatgtggtgtcagttgagaagagacaagcgcctggcaagcgctctgagagtgggtctccttctgcgggcggtcacagtaaaccccctcattcaccgctggtgcttaagcgttgtcatgtttctacacatcagcacaactacgccgccccacctagtacacggaaagattatccggccgcaaagcgagttaagctcgacagtgtgagggtcctcaggcaaattagcaacaacaggaaatgcacctctcccagatcatcagacaccgaagagaatgttaaaaggcggacccataatgttctagaacgtcaaaggaggaatgagcttaaacgaagcttttttgctctgcgtgatcagattcctgagcttgaaaacaacgaaaaggctcctaaggttgttattcttaagaaagctacggcatatattctttcggtgcaggcagaaacgcagaagcttatatctgaaatcgaccttcttcggaagcaaaatgaacagcttaagcataaattagaacagttacgtaattcctgtgct

SEQ ID NO: 128751 - DNA, 1317 bp, Artificial Sequence
  derived and/or modified sequence
atgcctctgaacgtatcatttactaaccggaattacgaccttgattacgacagcgtgcagccgtacttctattgtgatgaagaagaaaacttctatcaacagcagcagcaatcagagctgcaacctccggccccttcagaagatatttggaagaagtttgagctcctccctacccctcctctgagcccgtcaaggagatcgggactgtgctcgccatcatacgtggctgtgacgcctttcagcctgcggggtgataacgatggagggggagggagcttttcaaccgcagaccaactcgaaatggtcaccgagctcctcggcggagatatggtgaaccagtcctttatctgcgacccagatgatgagacttttatcaagaatatcataatccaagattgtatgtggtccggattttccgcagctgcaaagctggtgagtgagaaattggcatcttaccaagcagcacgtaaagactctgggtcccctaatccggcacgtggacacagcgtttgttctacgtcgtccctttaccttcaagacctttccgccgctgcgtcggaatgtattgacccatccgtcgtgtttccgtacccactgaatgattcatcatctccaaagagctgtgcctcccaagattcgagtgcattcagcccgtcgtcggatagtctgctgtcctcaacggaatcaagcccccagggatccccagaaccactcgtgctgcatgaagaaactcccccaaccacctcttctgactcggaagaggagcaggaggatgaggaagaaattgacgtcgtatccgtcgaaaagaggcaagcacctggcaagagatcagaatccggttccccatcagccggtggtcacagcaagccaccacattctcccctggtgctcaagcgctgtcacgtcagcactcatcaacacaattacgccgcacctcccagcaccagaaaggattacccagcagccaaacgggtcaagctggattcagtgcgggtcctccgacagatttcgaataaccgcaagtgcacctcccccagatcgtcagatacggaggaaaacgtgaaaaggagaacccataatgtgcttgaacgccagcgtagaaacgaattgaagagatctttcttcgcactgcgggatcaaattccagagcttgaaaacaacgagaaagcgcctaaagtggtgattttgaagaaagcgactgcatacattctctcggtgcaagctgaaactcagaaactcatatccgaaatcgaccttcttcgcaagcagaacgagcaactgaagcataaactcgaacagctgaggaactcgtgcgca

SEQ ID NO: 128752 - DNA, 1317 bp, Artificial Sequence
  derived and/or modified sequence
atgccccttaatgtgagctttaccaatcgcaattacgatctggactatgacagcgtccagccgtacttctactgcgatgaagaggagaacttctaccagcagcaacagcagtcagagttacaaccccctgccccttcagaggacatctggaagaagttcgagctgctgcctacccctcccttgtcacctagccgccgcagtggactttgctccccttcatacgtggcagtcacccccttttctttgagaggcgacaatgatggcggtggaggcagcttctctaccgcggatcaactggagatggtaactgagctgttgggcggtgacatggttaaccagagctttatctgcgacccggacgacgagaccttcattaagaacatcattatccaggactgtatgtggtccgggttctccgcggccgcaaagttggtctccgagaagctggcttcttaccaagccgctcggaaggactcgggttctcctaaccctgctcgtggccacagtgtctgctccacgtcctcactttatttgcaggaccttagcgccgcagctagcgagtgcattgatcccagcgtggtctttccatacccactgaacgactcgagctcacctaagtcgtgtgctagtcaagattcgtcggcattctcgccctcgtccgattctttactgagcagcactgaatcttcgccgcaaggatcaccagagccacttgtgctccatgaagagactccgcctaccaccagtagcgacagcgaggaagaacaggaggacgaggaagagatagatgtggtatcggttgagaaaagacaagcaccgggtaaacggtccgaatccggctcgccctcagccgggggtcactccaaacctccgcattcgccgctcgtcttgaagcgttgtcacgtctccactcatcagcataactatgcagctcctccctccacccgcaaagactatccagctgccaagcgtgttaagctagactctgtaagggtgctacgccagatctcgaacaaccgcaaatgcacctccccccgcagcagtgacaccgaagagaacgtcaagcgtcgcacgcataacgtcctcgagcgccagcgtcgcaacgagcttaagcgttcgttcttcgcgctccgcgaccaaattcccgagttggagaataacgagaaggccccaaaggtcgtcattctgaagaaggccaccgcatacatcctgtcagttcaggcggagacccagaagctgataagcgagatcgacctgctcagaaagcagaacgaacaacttaagcataagcttgaacaactccgtaatagctgcgca

SEQ ID NO: 128753 - DNA, 1317 bp, Artificial Sequence
  derived and/or modified sequence
atgccgctcaacgttagctttaccaatcgaaactacgatttagattacgatagcgtccagccttatttttactgcgacgaagaagagaacttttatcagcagcagcagcagtctgagctgcaacccccagccccctctgaagatatatggaaaaagttcgaactgttaccaacacctcccctaagccccagccgccggtccgggctgtgttccccttcatacgtcgccgtaacaccattctcattgaggggcgacaatgatgggggtggtgggtcttttagtacagcggatcagctggaaatggtcacggagctgctagggggcgacatggttaatcaatctttcatttgtgacccagacgacgaaacgttcattaagaacatcatcattcaagattgcatgtggagcggattcagtgcggccgcaaaactagttagtgagaagcttgcttcttaccaggccgcaagaaaagattccggctccccaaatcccgcccggggccatagtgtctgctccacctctagtctgtatcttcaggaccttagcgccgcagcatctgagtgcattgatccatccgtggtgttcccttatcccctgaacgacagtagctcacccaaatcgtgcgcatcccaggattccagtgccttctcccctagctctgactccttgcttagttcaacagaatctagcccccaaggcagtcccgaacctctagtacttcacgaggaaaccccgccaaccacatcatcggattcggaggaagagcaggaagacgaggaggagatagacgtggtgtctgtagagaaaagacaggctccaggaaagcgtagtgagagcgggtctccttccgcaggcggacacagcaagcccccccacagtccactggtgttaaaacgctgccacgtgtccacccatcagcacaactatgccgcacctccctccacccggaaagactaccctgccgccaagcgtgtcaagctggacagcgtgagagtgctgaggcagattagcaataatagaaagtgtaccagccccaggtcttccgatacggaggagaacgtcaagcgccggactcataatgtgttggagcgccagagacgcaatgaactaaaaaggtccttttttgccctcagggatcagatcccagagctggaaaataacgaaaaagcacctaaagtggtgatattgaagaaagcgacagcttacattctttctgttcaggctgagacgcagaaattaatttctgaaattgacctgctgcggaaacagaatgagcagttgaagcacaagctcgaacagctgagaaattcgtgcgcg

SEQ ID NO: 128754 - DNA, 1317 bp, Artificial Sequence
  derived and/or modified sequence
atgcctctcaatgttagcttcaccaaccgcaattacgaccttgactatgacagcgtgcagccctacttctattgtgatgaagaggagaatttttatcagcagcagcagcagtctgagcttcagccaccggccccatccgaggacatctggaaaaagtttgaactgctgcccacccccccactgtccccgagtaggcgctcaggactctgcagcccctcctacgtcgctgtgacacccttcagcctgagaggtgataatgatggaggaggcggatctttcagtaccgctgaccagcttgagatggtcacggaactgctgggaggtgacatggtcaatcagagcttcatctgtgaccctgatgacgaaacttttatcaagaacatcatcatccaggattgcatgtggtctggattctccgcagccgccaagttggtctcagagaagctggctagctaccaagcagcacgcaaggactccggcagtcctaacccagctaggggacattcagtatgctccacttcctccctgtacctgcaggacctgtcagctgctgcaagtgagtgcatcgatccatctgtagtatttccatatcccttgaacgactcttcctcacccaagagttgtgcatcacaagacagcagtgccttctctccctctagcgactccttgttgtcctccactgaaagctctccgcagggctcaccggaacctctcgtactccacgaagagaccccaccgactacatctagcgactccgaggaagagcaagaagacgaagaagaaatcgacgtggtgtctgtagagaaaagacaagcgccaggaaagaggtccgagtccggatcccctagtgcgggaggacactcaaagcctccacatagtccgctcgttctgaaaagatgccacgttagcactcaccagcacaactacgcagcccccccttctacaagaaaggactacccggcggcgaagcgcgtaaagctggactccgtgcgcgtcttgcgccagatttccaacaacaggaagtgcacgagtccaaggagctcagacaccgaagagaatgtcaagagaagaactcataacgttctcgagagacagcgccgcaatgagctcaagaggagtttttttgcgctgagggaccagatcccggagttggagaacaacgaaaaagcgcccaaagtggttattctgaagaaggccaccgcttatatcctgtctgtccaggcggaaacccagaagttgatctccgaaatcgacctgcttaggaagcaaaacgaacagctgaagcacaagcttgagcagctgcgcaactcctgcgct

SEQ ID NO: 128755 - DNA, 1317 bp, Artificial Sequence
  derived and/or modified sequence
atgcctcttaacgtatcctttacgaacaggaattatgatctcgattacgattcagtccaaccatatttttactgcgatgaagaagaaaatttctatcagcagcagcagcaatcagaactccagcccccagctccctccgaagatatctggaaaaaattcgaactgctccccactccaccactttccccatcaaggagatctgggctctgttccccatcttacgtagctgtaactccattctctctcaggggagataacgacggagggggaggatctttttctactgccgatcagctagagatggtcacagaactgctgggaggagacatggttaatcagagtttcatttgcgatccggatgatgaaacattcattaaaaacataatcatccaggattgtatgtggagtgggttctccgcagctgccaagcttgtcagtgaaaaactggcatcttatcaggcggcccggaaagactccgggtcgcctaacccagccagagggcatagtgtatgttcaacatcttctctgtatctccaagatctgtccgccgctgcctccgagtgtattgatccctcagtggtgttcccctatccgctaaacgactcctcctccccgaaatcttgtgcatctcaggattcttcggcgttctccccgtccagtgattccttgctctcttccacagagagttccccccagggatcccctgaacctttggttctgcacgaagaaacgccaccaacaacatcttccgattccgaagaggagcaggaagatgaagaagaaattgatgttgtgagtgtggaaaaaaggcaggcccccggaaaacggtccgaatctgggtccccttccgcaggggggcattctaagcccccccattcgccccttgtgctgaaaagatgccacgtttccactcaccaacacaattatgcagctcctccaagtacgaggaaagattatccagctgctaagcgagtcaaactggattctgttagggtactgcgacagatcagtaataatcgcaaatgtactagtccacgttcctctgatacagaagagaacgtcaagcgccggacacacaatgtcctcgaacgacagcggcgcaacgagctcaaacgaagtttcttcgctctcagggatcagatccctgaacttgaaaacaacgagaaagcgcccaaagtcgtcatactcaaaaaagcaacagcttatatactgtcagttcaagccgagactcagaaattaattagtgaaatagacctcttgaggaagcagaacgaacagctaaagcacaaactagaacagctgcggaatagttgtgcc

SEQ ID NO: 128756 - DNA, 273 bp, Artificial Sequence
  derived and/or modified sequence
atgactgaggaaaacgtgaagaggcggacccacaacgtcctcgaacgccaaagaagaaacgaactgaagcgctcattctttgctctccgcgaccaaatcccggaactggagaataacgaaaaagccccaaaagtcgtgatccttaagaaagcgaccgcatacattttgtccgtgcaagcggaaactcagaagctcatcagcgagatcgatctgctgcggaagcagaatgagcagctgaagcataagctcgagcagctgcggaattcgtgcgcc

SEQ ID NO: 128757 - DNA, 273 bp, Artificial Sequence
  derived and/or modified sequence
atgaccgaggaaaacgtcaagcggaggactcacaatgtgctggaaagacaacgtcgaaacgaactcaaacgctcctttttcgctcttagagatcaaatccctgaacttgaaaacaatgagaaagcaccaaaggtcgtgatacttaagaaggcgaccgcatacattctgtcggtgcaagccgaaactcagaagctgattagcgaaatcgacctgcttcgcaaacaaaacgagcagttgaagcataagctggagcagctccggaattcatgtgca

SEQ ID NO: 128758 - DNA, 273 bp, Artificial Sequence
  derived and/or modified sequence
atgaccgaagaaaatgtcaagagacgcacccacaacgtgctcgaacggcaaaggagaaacgagctgaaacggagcttctttgctctgcgcgaccagatcccggaacttgagaataacgaaaaggcgccaaaggtggtcattctcaagaaagccactgcatacatcctgtccgtgcaggccgagactcagaagttgatctcagagatcgatctgctccgcaagcagaacgaacaactgaaacataagctggagcaactccggaattcgtgcgcg

SEQ ID NO: 128759 - DNA, 273 bp, Artificial Sequence
  derived and/or modified sequence
atgaccgaagagaatgtgaagaggagaacccacaatgtgctggagcgacaaagacgtaatgagctgaagcgctcattctttgcattgcgcgaccagatcccagaactggaaaacaacgaaaaagctcctaaggtggtcattcttaagaaggcaactgcatacatactgagcgtccaggcggagactcaaaagctgatctcggaaattgatcttcttcggaaacaaaacgaacagctcaaacataagctcgaacaacttcggaactcctgtgcc

SEQ ID NO: 128760 - DNA, 270 bp, Artificial Sequence
  derived and/or modified sequence
atgaccgaggaaaatgtgaagcggaggacgcacaatgtgcttgaaagacagaggaggaatgagctcaaaaggagtttttttgctctcagagaccagattccggagctggagaacaacgagaaggcgccgaaggtggtgattctgaagaaggctaccgcatacatcttatctgtgcaagcagaaacgcagaagttgatttccgaaatcgacctgttaagaaagcaaaacgaacagctgaagcacaagttagaacagctacggaactcatgc

SEQ ID NO: 128761 - DNA, 270 bp, Artificial Sequence
  derived and/or modified sequence
atgacagaggaaaacgtgaaaaggcgcacacataacgttctggaacggcagcgacgcaatgagcttaaacgtagcttcttcgcactccgcgaccaaattccagagctagaaaacaacgaaaaggccccaaaggtggtaattttgaaaaaggctaccgcatatattttaagcgtacaagccgagacgcagaagttgatctctgaaatagatctgctgcgcaaacagaatgagcagctgaaacacaagctggagcagcttcgaaactcgtgc

SEQ ID NO: 128762 - DNA, 270 bp, Artificial Sequence
  derived and/or modified sequence
atgaccgaagaaaacgtgaagagaagaacccataatgtgctggagaggcaacgacggaacgaattgaaaagatccttttttgcgctcagggatcagattcctgagcttgagaataatgagaaggcccctaaggtggtgattcttaagaaagccactgcctacatcctgtccgtgcaagcagagactcaaaagctcatttcggaaatcgatcttctgcggaaacaaaacgaacaacttaagcacaaactcgagcagctgcgaaattcctgt

SEQ ID NO: 128763 - DNA, 270 bp, Artificial Sequence
  derived and/or modified sequence
atgactgaggaaaatgtcaagcggagaactcacaacgtcctcgagcgccagcgccggaacgagctcaagagatcctttttcgccctgcgcgatcaaatcccagaactggagaacaatgaaaaagcgccaaaagtggtgatcctgaagaaggccactgcctacatcctgtcggtgcaggccgaaacccagaaactgatcagcgaaatcgatctgcttcgcaagcagaacgaacaactgaagcataagttggaacaattgcggaactcgtgc

SEQ ID NO: 128764 - DNA, 270 bp, Artificial Sequence
  derived and/or modified sequence
atgactgaggagaatgtcaagaggcgcactcacaatgttttggaacgccagagaaggaacgagctcaagagaagttttttcgctctgagggaccagattcctgaattggagaataacgaaaaggctcctaaggtggtgattctgaagaaggctactgcatatattcttagcgtacaggctgaaactcaaaagcttattagcgagattgacctcctgcgcaagcaaaatgaacagcttaagcacaagttggagcagttgcgcaattcatgt

SEQ ID NO: 128765 - DNA, 270 bp, Artificial Sequence
  derived and/or modified sequence
atgacggaggaaaacgtcaaacgcaggactcacaacgtgctcgaaagacagaggcgcaatgagttgaagaggtcattcttcgcgttgagggaccaaattccggaactggagaacaacgagaaggctccaaaggtcgtgatccttaagaaggccactgcctacatcctctccgtacaagcagagacgcagaagcttatctcagaaatcgacctcctgagaaaacaaaatgaacaactgaagcataaattggagcagctgaggaacagttgc

SEQ ID NO: 128766 - DNA, 270 bp, Artificial Sequence
  derived and/or modified sequence
atgactgaagagaacgttaaaagacgtactcacaatgtgctggagcggcaaaggcgcaacgaactgaagcggtctttctttgctcttcgcgaccaaattcccgaactggagaataacgaaaaggccccgaaagtggtgatccttaagaaggccaccgcatacatcttgtcggtccaggcggaaacccagaagctgatctccgaaatcgatttgcttagaaaacagaatgagcagctcaaacataagctcgagcaactccgcaacagctgt

SEQ ID NO: 128767 - DNA, 270 bp, Artificial Sequence
  derived and/or modified sequence
atgactgaggaaaatgtgaaacgccggacgcacaacgtcctggagcgtcagagaagaaacgagctgaaaaggtcttttttcgcactgcgagaccagatccctgagctggagaacaacgagaaggcacctaaggtcgtcatactgaaaaaggccacagcttacattctgtcggtacaagcagagacccagaagctaattagcgaaatcgacctcctgaggaaacagaacgaacagctaaagcataagttagagcagttacggaattcatgc

SEQ ID NO: 128768 - DNA, 270 bp, Artificial Sequence
  derived and/or modified sequence
atgaccgaagagaacgtcaaaaggaggacacacaacgtgctggaacggcagcgcagaaacgagttgaagcgcagtttctttgcccttagagaccagatacccgagctggagaataatgaaaaggcccctaaagtcgtcattctcaagaaagcaaccgcctacatcttgagtgtacaggcggaaacccagaaactcatcagtgagattgatctgctgaggaagcaaaatgaacagcttaagcacaagttggagcagctgagaaactcatgc

SEQ ID NO: 128769 - DNA, 270 bp, Artificial Sequence
  derived and/or modified sequence
atgacagaagaaaacgttaagagaaggacacataatgtgctcgagcgccagaggcgcaatgagctgaagcggagcttcttcgccctgagagaccagatccccgagttggagaacaatgaaaaggcgccaaaggttgttatactgaagaaagcaacggcatatattctcagcgtgcaagccgagacacagaagctgatctccgagatcgatctgctcagaaagcagaacgaacagcttaaacacaaactcgaacaattgagaaattcttgc

SEQ ID NO: 128770 - DNA, 270 bp, Artificial Sequence
  derived and/or modified sequence
atgaccgaggagaacgttaaacgccggacgcataacgtgctcgagcgtcagcgtagaaacgagctaaagcgcagcttcttcgcactgcgcgatcaaatccccgaactagagaacaacgagaaggcccctaaggtggtaatattaaaaaaggcaactgcctatatactttccgttcaggccgagacgcagaagcttatcagcgaaatagatctccttcgcaagcagaacgagcagctcaaacacaagctagaacaattacggaatagttgt

SEQ ID NO: 128771 - DNA, 270 bp, Artificial Sequence
  derived and/or modified sequence
atgacggaagagaatgtgaaacgaagaactcacaacgtcctcgaaagacaaaggcgcaacgagctgaaaagatccttctttgcacttagagatcaaatccccgagttggagaacaatgagaaggcacctaaggtcgtcattctgaaaaaggcgactgcatacattctctcggtgcaggcggaaacccaaaagctcattagcgaaattgatcttctcagaaaacaaaacgaacagctgaagcataagctcgaacaacttcgtaactcgtgt

SEQ ID NO: 128772 - DNA, 270 bp, Artificial Sequence
  derived and/or modified sequence
atgaccgaagaaaacgtgaaaaggcggacgcataacgtgctggagcgacaacgcagaaatgagcttaagcggagcttttttgcgctcagagatcagatcccggaactggagaataacgaaaaggcgccaaaggtggtgatccttaagaaagccacggcttacattcttagcgtgcaagccgagactcaaaagctgatctccgaaatcgacctgcttcgtaagcagaatgaacagcttaaacataagctggaacaactgcgaaactcatgt

SEQ ID NO: 128773 - DNA, 270 bp, Artificial Sequence
  derived and/or modified sequence
atgacggaggaaaacgtcaagagacgaacccataacgtgctcgagcgacagaggcgaaatgaactcaagcgatcatttttcgccttgagggaccagatccccgagctggaaaacaacgagaaggccccgaaggtggtcatcctcaagaaggcaactgcttatatcctgagtgtccaggcggaaactcagaagctgattagcgagatagatctcctgcgcaaacaaaacgaacagctgaaacacaaactggagcagctgagaaattcttgc

SEQ ID NO: 128774 - DNA, 270 bp, Artificial Sequence
  derived and/or modified sequence
atgactgaagaaaacgtaaagagacgcacccataatgtcctggagcggcaacgccgaaacgagctgaagagatctttctttgccctccgcgatcagatcccggagcttgaaaacaacgaaaaggcacccaaggttgtgatccttaagaaagcgaccgcttacattttgagcgtgcaggccgagactcaaaaactcatctccgaaatcgaccttctgaggaagcagaacgaacagctgaaacacaaactggaacaactgcggaattcctgc

SEQ ID NO: 128775 - DNA, 270 bp, Artificial Sequence
  derived and/or modified sequence
atgacggaggaaaatgtgaaacgccgaacccacaatgtgctggagcggcagaggcgtaacgaactgaagcgatcctttttcgccttgagagatcaaattccggagctcgagaacaacgaaaaggccccaaaggtcgtcatcctgaagaaggctaccgcatacatcttgtcggttcaggcggaaacgcagaaacttatcagtgagatcgacctgcttcgcaaacaaaacgaacaactcaagcataagctcgaacagctgagaaatagctgc

SEQ ID NO: 128776 - DNA, 270 bp, Artificial Sequence
  derived and/or modified sequence
atgacagaagagaatgttaaaaggaggacacataacgtgctggaaagacagagacgaaacgagctaaaaagatctttctttgctctgcgcgatcagatccctgaactggagaataacgagaaggccccgaaggttgtcattctcaagaaggccacggcttacattctctccgtacaggccgaaactcagaagctgatctccgagatcgacctgctccgtaaacagaacgagcagctcaaacacaaattagagcagctccgcaactcctgt

SEQ ID NO: 128777 - DNA, 270 bp, Artificial Sequence
  derived and/or modified sequence
atgaccgaggagaacgtaaagcgaaggacacacaatgttctggagcgacagcgcagaaacgaacttaagagatcctttttcgctctacgagatcagatccctgagcttgagaataacgagaaggcaccaaaagtcgttatcctgaaaaaggctaccgcgtacattcttagtgtacaagcagagacccagaaactcattagcgaaatagatctgcttcgaaaacagaacgaacaactgaagcataagctggaacagctcagaaatagctgt

SEQ ID NO: 128778 - DNA, 270 bp, Artificial Sequence
  derived and/or modified sequence
atgactgaagagaacgtgaagagacggactcataatgtcctcgagcggcagcgcagaaacgaacttaagcgtagcttctttgcacttagagatcaaattccggagctcgaaaacaatgaaaaggcaccaaaggtggtcatacttaagaaggctactgcatacatactcagcgtccaagcggagacgcagaagctgatttccgagatcgatttgcttaggaaacagaacgaacaactgaaacacaaactggaacagctgcgcaattcttgt

SEQ ID NO: 128779 - DNA, 270 bp, Artificial Sequence
  derived and/or modified sequence
atgaccgaagagaatgttaagaggcggacccataacgtcctggagagacagagaaggaatgagctcaaacgatcttttttcgctttgcgagatcagatcccggagctggaaaacaatgagaaggctcccaaggtggtcatcttgaagaaggccaccgcctatatcctgagtgtgcaggcggaaacccagaagttaatcagtgaaattgacctgctgcggaagcagaatgaacaactgaaacacaaactggaacagttgaggaacagctgc

SEQ ID NO: 128780 - DNA, 270 bp, Artificial Sequence
  derived and/or modified sequence
atgacagaagagaatgtgaagaggcgcacccacaacgttctagaaaggcaacggcgcaacgagctgaagcggtcttttttcgccctacgggatcagatcccggagctcgagaacaatgagaaggctccgaaggtggttattctgaaaaaggccacagcgtatattctctctgtgcaggcggagacacagaaactgatatcagagattgacctgcttcggaaacagaacgagcaactgaagcacaaactcgagcaactgagaaattcatgt

SEQ ID NO: 128781 - DNA, 270 bp, Artificial Sequence
  derived and/or modified sequence
atgaccgaggagaacgtgaagagaagaacgcacaacgtgctggagcggcaacggaggaacgagctgaagagatctttcttcgccctccgcgatcaaatccctgagctggaaaataacgagaaagcccctaaagttgtgattctgaagaaagcgaccgcctatattctgtctgtccaggcagaaactcaaaagctcatttccgagatcgacttgctgcggaagcagaacgaacaactgaagcacaagctggagcagctgcgcaacagctgc

SEQ ID NO: 128782 - DNA, 270 bp, Artificial Sequence
  derived and/or modified sequence
atgaccgaggagaatgtgaaacgccgtacccataacgtgcttgaacgacagcgcagaaacgaactgaagcgctcatttttcgcactcagggatcaaatacccgagctcgagaataatgaaaaggcgccgaaagtcgtgattctcaagaaggcaaccgcctatatcctctccgtgcaagcagaaacgcagaagttgatttccgaaattgatctccttagaaagcagaacgaacagcttaagcataagctggagcaactgcgtaattcgtgt

SEQ ID NO: 128783 - DNA, 270 bp, Artificial Sequence
  derived and/or modified sequence
atgacggaagagaatgtcaagaggcggacccataacgttctcgaaagacagcgccggaatgagctgaaacgctcattctttgccctccgagatcagatccctgagctggagaacaacgagaaagccccgaaggtggtgatcctcaaaaaggccactgcttacatcctgtcggttcaagcagaaacccagaagctcatttccgagatcgatctgttgcgcaagcaaaacgaacagttgaagcacaaactggaacagctgagaaactcatgt

SEQ ID NO: 128784 - DNA, 270 bp, Artificial Sequence
  derived and/or modified sequence
atgactgaagaaaacgtgaaacgccgaactcataacgtgctggaaaggcaaaggaggaacgaactcaagcgctcatttttcgcactcagagatcaaataccggaacttgagaataacgagaaggcaccaaaggtggtgatccttaagaaggcaaccgcgtacattctgagcgtccaggcagagacgcagaagctgatctcggagatagatttgttgcgaaaacagaacgaacaacttaaacacaaactcgaacagcttagaaactcatgc

SEQ ID NO: 128785 - DNA, 270 bp, Artificial Sequence
  derived and/or modified sequence
atgactgaagagaatgtaaagcgcaggacacacaacgtgcttgagcggcagcgtcgtaatgaacttaagagaagcttctttgcccttcgggatcaaattccagagctggagaacaacgaaaaagcaccaaaggtagtgatcctcaagaaggctacggcttacattctttcagttcaggccgaaacgcagaagctgataagcgaaattgacttactcagaaagcagaatgagcagcttaaacataagctggagcagctgaggaatagctgc

SEQ ID NO: 128786 - DNA, 270 bp, Artificial Sequence
  derived and/or modified sequence
atgacggaagagaacgtgaaacggcgaacccacaatgtcctggaaaggcaaaggcgaaatgagctgaaacgctccttcttcgcacttcgggatcaaataccagagctggaaaacaacgagaaagctccgaaggtggtgattctgaaaaaggccacggcgtacatcctctcggtgcaggcggagactcagaaactcatctcagagatcgacctccttcgcaagcagaatgagcagttgaagcataagctggaacagttgcggaattcatgt

SEQ ID NO: 128787 - DNA, 270 bp, Artificial Sequence
  derived and/or modified sequence
atgacggaggagaacgtaaagcggcgcactcataacgtactcgagcgccagcggaggaacgagctcaagcgaagcttcttcgcactgcgcgaccaaattcccgagcttgagaacaatgagaaggcaccaaaggtagtgatactaaagaaggccactgcctatatcctgagtgttcaagccgagacgcaaaaactgatatcggagattgacttactgcgaaagcagaacgaacaactaaagcataaactggagcaattgcggaactcgtgc

SEQ ID NO: 128788 - DNA, 270 bp, Artificial Sequence
  derived and/or modified sequence
atgactgaagaaaacgtgaagcgtcgcacccacaatgttctggaacgacagagaaggaacgaactgaaaagatccttttttgctctgagagatcaaattccggaactggagaataacgagaaggcgcctaaggtggtgatccttaagaaggccactgcatacatcctttcggtccaggctgaaacccagaagctgattagcgaaatcgacctcctgcggaagcagaatgagcaactgaagcataaactggagcaattgaggaatagctgt

SEQ ID NO: 128789 - DNA, 270 bp, Artificial Sequence
  derived and/or modified sequence
atgaccgaagaaaacgtgaagcgaaggacgcacaacgtcctggagagacaaagacgcaatgagctcaagcgttctttcttcgctcttcgtgaccagatcccggagctggagaacaatgaaaaagcaccgaaggtggtcatccttaaaaaggccaccgcctacatcctgagcgtgcaggcagagacacagaagctcatatctgaaatcgacctactgagaaaacagaacgagcagctgaagcataaacttgagcagctgaggaactcttgt

SEQ ID NO: 128790 - DNA, 270 bp, Artificial Sequence
  derived and/or modified sequence
atgacagaagaaaatgtcaaaagaagaacacataatgttcttgaaagacaaagaaggaatgaattaaaaagaagtttttttgctcttagagaccagattccagaattagaaaataatgaaaaagctccaaaggttgttattttaaagaaagccactgcttatattttgtcagttcaagctgaaacacaaaaacttatctcagaaatagatttacttagaaaacaaaatgaacaattaaaacataagttagaacaattaagaaattcttgt

SEQ ID NO: 128791 - DNA, 270 bp, Artificial Sequence
  derived and/or modified sequence
atgactgaggagaatgtcaagcgccgcactcataatgtgttggaacgccaaagacggaacgaactcaagcggtcgtttttcgccctgagggatcagatcccagagctcgagaacaacgaaaaggcaccgaaggtggtgattctgaagaaagcgaccgcttacatcctgtcagtccaagccgaaacccaaaaacttatctccgaaatcgacctgctgcggaagcagaacgagcagctgaagcacaaactcgaacagctcagaaatagctgt

SEQ ID NO: 128792 - DNA, 270 bp, Artificial Sequence
  derived and/or modified sequence
atgacagaagaaaacgtcaaaaggaggacacacaatgtgctggaacggcagaggcgcaatgaactcaaaagaagtttctttgccttacgggatcagatacctgaactcgaaaacaatgaaaaggctcccaaagtagtaatcctcaagaaagccactgcttatatactatcagttcaggccgaaacacagaaactcatttcagaaatagatctgcttcgcaaacagaatgagcagttaaaacataaactcgaacagcttcgcaacagttgc

SEQ ID NO: 128793 - DNA, 270 bp, Artificial Sequence
  derived and/or modified sequence
atgaccgaggaaaatgtgaaacgtcgtacgcataacgtcctggagcgccaacggcgtaacgaacttaagaggtcatttttcgcgctccgggaccagatccccgagctcgagaacaacgaaaaggctccgaaggtagtcatcctgaagaaagcaaccgcctatatcttgtccgttcaggctgagactcagaagcttatcagcgagatcgacctgctccgcaagcaaaatgagcagctcaagcacaagctcgagcagctccgcaactcttgc

SEQ ID NO: 128794 - DNA, 270 bp, Artificial Sequence
  derived and/or modified sequence
atgaccgaagaaaacgtgaaaaggagaacacataacgtgctcgagagacagagacggaatgaactgaaacgaagctttttcgctttgcgggaccaaattcccgagctggaaaacaatgagaaagcccccaaggtggtgatcctcaagaaggctactgcctatatcctctcagttcaggctgagacgcagaagctgatctccgagatcgacctactcaggaagcagaacgaacaattgaagcataagcttgagcagctccgtaattcatgt

SEQ ID NO: 128795 - DNA, 270 bp, Artificial Sequence
  derived and/or modified sequence
atgaccgaagagaatgtcaaacgccggacccataatgtgttagagcgacaaagaagaaatgaattgaaaaggtcttttttcgctctgagagatcagattcctgagttggagaacaatgaaaaagcccccaaggttgtgattctcaagaaagctactgcgtatattctgtccgtgcaagccgaaacccaaaagctgatttccgagatcgatctgctgcgaaaacaaaacgaacagctgaaacacaaactcgaacaactccggaacagctgt

SEQ ID NO: 128796 - DNA, 270 bp, Artificial Sequence
  derived and/or modified sequence
atgacagaggagaacgtgaaaagaaggacccacaatgtccttgaacgacagcgaaggaacgaactaaaacgcagtttctttgcactaagagaccaaatccctgaactagaaaacaatgagaaggcccccaaagtagtaattcttaagaaggcaactgcctatatcctgagtgtgcaggctgaaactcagaaacttatctctgagatcgacctacttaggaaacagaacgaacaactgaaacataaattagagcagctcagaaatagttgt

SEQ ID NO: 128797 - DNA, 270 bp, Artificial Sequence
  derived and/or modified sequence
atgaccgaggaaaacgtgaaaaggcgcactcataacgtcctggagagacagcgccggaatgagcttaagagatccttctttgccctgcgcgaccagatccctgaactggagaataacgaaaaagcacctaaggtggtgattctgaagaaggccactgcctacatcctctctgtgcaggctgagactcaaaagctgatttcggaaatcgacctgttgcggaagcagaacgagcaacttaagcacaaactcgagcaattgaggaatagctgc

SEQ ID NO: 128798 - DNA, 270 bp, Artificial Sequence
  derived and/or modified sequence
atgacggaagaaaatgtgaagagacgtactcataatgtgcttgagagacaacgtagaaatgaacttaaacgcagtttcttcgccttgagagaccagattccagagcttgaaaataatgaaaaggcccctaaggttgtgatcttgaaaaaggctactgcatatattttgtcagttcaggccgaaactcagaaactgatttcagagattgatctcctgcgaaagcagaacgagcagctcaaacataaacttgagcaattacgtaacagctgt

SEQ ID NO: 128799 - DNA, 270 bp, Artificial Sequence
  derived and/or modified sequence
atgactgaggagaatgtcaaaagaagaactcataatgtcctcgagagacagcgccgaaatgagctgaagcgctcgttcttcgcgctcagagatcaaatcccggagttggagaataatgaaaaagcaccgaaggtggtgatcctcaagaaggccaccgcctacattctgtccgttcaggctgaaacccaaaaactgatcagcgaaattgacctcttgcgcaagcagaacgaacaattgaaacataagctggagcaactgcggaactcctgt

SEQ ID NO: 128800 - DNA, 270 bp, Artificial Sequence
  derived and/or modified sequence
atgactgaggaaaatgtgaagcggaggactcacaatgtgctggaaaggcaaagacggaacgagcttaagcgaagcttctttgccctgagagaccaaattccggaactggagaataatgagaaagctcctaaagtggtgattttaaagaaggctactgcctatatcctgtcagtacaggcagagactcagaaattgatatctgagatcgacctgttgaggaagcagaatgagcagctcaagcacaaactggaacaattgcgaaattcatgt

SEQ ID NO: 128801 - DNA, 270 bp, Artificial Sequence
  derived and/or modified sequence
atgactgaagaaaatgtgaaacggcggacccataacgtgctcgaacgccagaggcggaacgaactgaagaggagcttcttcgccctgcgcgaccagataccggaactggagaacaacgagaaagctccaaaagtggtcatcctgaagaaggctaccgcttacatcctgtcagtccaagcagaaactcagaagttgatctcagaaattgatctgttgcgaaaacaaaacgaacaactcaaacacaagctggaacagctcaggaactcctgc

SEQ ID NO: 128802 - DNA, 270 bp, Artificial Sequence
  derived and/or modified sequence
atgaccgaggagaatgtgaagcgccggactcataacgtcttggaacggcaacgccgcaacgagctgaagaggtcgtttttcgcgctcagggaccaaatccccgaactggaaaacaatgaaaaagccccgaaggtggtgattcttaagaaagccactgcgtacatcctttcagtgcaggccgagactcagaagctcatcagcgagatagatctcctgagaaagcaaaacgagcagcttaaacacaaattggaacaactccgcaattcctgc

SEQ ID NO: 128803 - DNA, 270 bp, Artificial Sequence
  derived and/or modified sequence
atgacggaagagaacgtgaaaagacgcactcataatgtcctggaaagacagagacgaaacgagctcaagaggtcattctttgcgcttagagatcagatacctgagctcgaaaacaacgagaaggcgccgaaagtggtgatacttaagaaggccaccgcttacattctttcggtccaggctgagactcaaaagctgatttcagaaatcgatctgctccgaaagcagaatgaacagctcaagcacaaactcgaacaacttcggaactcctgc

SEQ ID NO: 128804 - DNA, 270 bp, Artificial Sequence
  derived and/or modified sequence
atgaccgaagaaaacgtgaaacgccgtacgcacaacgtgctggagaggcagcggaggaatgaactcaagaggagcttcttcgctctgagggaccagatccctgagctggaaaacaacgagaaagcacccaaggtagttatcttgaaaaaggcgacagcgtatattttgtcggtgcaggctgagacacagaaactgatctcagagatcgatctgttgcgcaaacagaatgagcaactgaaacataagcttgaacagctacggaattcctgt

SEQ ID NO: 128805 - DNA, 270 bp, Artificial Sequence
  derived and/or modified sequence
atgacggaggagaacgttaagagacgtacccataacgtgctggaaagacaacggcgcaacgagctcaaacgcagcttttttgcgctgcgcgaccagatccctgagctcgagaataatgaaaaagccccaaaggtcgttatcttgaagaaggcgactgcctatatcctgagcgtccaggccgaaacccagaagctgatttccgagatcgacctgttgcgcaaacagaacgagcagttgaagcacaagctggagcagctgcgaaactcatgt

SEQ ID NO: 128806 - DNA, 270 bp, Artificial Sequence
  derived and/or modified sequence
atgactgaggaaaacgtcaagcgccgtacccacaacgtgctggaacgacagcgtcgcaatgaactgaaacgttcgttcttcgcacttagagatcaaatccctgaactggaaaacaacgagaaggccccgaaggtggtgatccttaagaaggcgactgcctacatcctttcggtgcaagccgaaactcagaaacttattagcgaaatcgatctcctccggaaacaaaatgaacagctgaagcataagttggaacagctgaggaactcatgt

SEQ ID NO: 128807 - DNA, 270 bp, Artificial Sequence
  derived and/or modified sequence
atgaccgaagagaatgtcaagcgccggactcataacgtgctcgagaggcaacgtcggaatgagttgaaacggtccttcttcgcactgagggaccaaattcccgagctggagaataacgagaaagcaccgaaggtcgtcatcctcaagaaggcaaccgcgtacatcctcagcgttcaggccgaaacgcagaaattgatttcggaaatcgacctgctgcgcaaacaaaacgagcaacttaaacacaagctggaacagcttagaaactcatgt

SEQ ID NO: 128808 - DNA, 270 bp, Artificial Sequence
  derived and/or modified sequence
atgactgaggagaatgttaagcggaggacccacaacgtgcttgaaagacagcgtcgaaacgaactgaagagatcattctttgccttgcgtgatcaaatccctgaactggaaaacaatgaaaaagcaccgaaggtggtcatactcaagaaagcgactgcttacattctgtcggttcaggcagaaacccagaagctcatcagtgagattgacctgctgagaaaacagaacgaacagcttaaacataaacttgagcaactgcgcaactcctgc

SEQ ID NO: 128809 - DNA, 270 bp, Artificial Sequence
  derived and/or modified sequence
atgaccgaggagaacgtgaaaagaagaacgcataacgtcctggaacggcaaaggcgaaacgagctcaagagatcgttcttcgcacttcgcgaccagatccccgagctggagaataacgaaaaagcgccaaaggtggtcattttgaagaaggctactgcctacattttgagcgtccaagccgaaactcagaagttgatctcagaaattgatctgctccggaaacagaacgaacaattgaaacacaaacttgagcagctgaggaattcatgc

SEQ ID NO: 128810 - DNA, 270 bp, Artificial Sequence
  derived and/or modified sequence
atgactgaggaaaacgtcaaacggcgaactcataacgtgctcgaacgccaacggcgcaatgagcttaagcgctccttcttcgcgctgcgtgatcagattccggaactggaaaacaatgagaaggcaccaaaggtggtcattctcaagaaggcaacggcttacatcctcagcgtccaagccgaaacccagaaactgatttcagaaatcgaccttctgagaaagcaaaacgagcagctcaagcacaaattggaacaactgcgtaattcgtgt

SEQ ID NO: 128811 - DNA, 270 bp, Artificial Sequence
  derived and/or modified sequence
atgaccgaggaaaacgtgaaaaggagaacccataatgtcttggaacggcaaagaagaaacgaattgaagcgctccttttttgctctgagagatcaaattcctgagcttgaaaacaacgaaaaggcacccaaggtggttattctgaagaaggcgaccgcatacattctgtccgttcaggcagaaactcagaaactgatttcggaaatcgatctgctgaggaagcaaaatgaacaacttaagcacaaactggagcagcttcgaaacagctgc

SEQ ID NO: 128812 - DNA, 270 bp, Artificial Sequence
  derived and/or modified sequence
atgaccgaggaaaatgtgaaaaggcgcacgcataatgtgctagaacggcaaaggcggaacgagctgaagcgcagtttttttgccctcagagaccagatccccgagcttgagaacaacgagaaagctcctaaagtggtcatccttaaaaaggccactgcatatatcctctccgtgcaggccgagactcagaaactcatctccgaaatcgacctgctacggaaacaaaacgaacagttgaagcataaactggagcagttgaggaatagttgc

SEQ ID NO: 128813 - DNA, 270 bp, Artificial Sequence
  derived and/or modified sequence
atgaccgaagaaaatgttaaacgcaggacgcacaatgtgctggagaggcagagacgcaacgagctgaaacgcagtttcttcgcgctccgtgatcagatccctgagctggagaacaacgaaaaggccccaaaggtggtgatcctcaaaaaggcaacagcctatatactctccgtgcaggccgaaacacagaagcttatttccgaaatcgatctgctaaggaagcagaatgagcagcttaagcacaagctggaacagctgcgtaacagttgc

SEQ ID NO: 128814 - DNA, 270 bp, Artificial Sequence
  derived and/or modified sequence
atgacggaggaaaatgtgaaaagacgaacacacaacgtgcttgagcgccagcgaaggaacgagctgaagcgttcttttttcgcacttcgcgatcagatccccgagttagaaaataacgaaaaggctccaaaagtagtgatacttaagaaggccacagcttacatcctgagtgtgcaggctgagactcagaaactgatcagtgagattgatcttttgaggaaacaaaatgagcagctgaaacataagctggagcagctcagaaattcctgc

SEQ ID NO: 128815 - DNA, 270 bp, Artificial Sequence
  derived and/or modified sequence
atgactgaagagaatgtcaagagacgaacccataacgtgttggaaagacagagacgcaacgagcttaagaggtccttctttgcactcagagatcaaataccagagcttgagaataatgaaaaggcgccaaaggtggtgatcctgaagaaagccaccgcctacattctgtcagtgcaagcagagactcagaaactgatatccgagatcgacctcctccggaaacagaatgaacaactgaagcataagctggaacaactgcggaattcatgt

SEQ ID NO: 128816 - DNA, 270 bp, Artificial Sequence
  derived and/or modified sequence
atgactgaggagaacgttaagagaagaactcacaatgtcctggaaaggcagcgccgtaacgaactgaagaggtccttttttgcactgagggaccagatccccgagctggaaaacaacgaaaaggccccgaaggtggtgatcctgaaaaaagctacagcatacatcctatctgtgcaggccgagacccagaagttaatatcggagatcgacttgctgcggaagcagaacgagcagctcaagcacaagctggagcagctcaggaactcctgt

SEQ ID NO: 128817 - DNA, 270 bp, Artificial Sequence
  derived and/or modified sequence
atgaccgaggagaacgtcaaaaggaggactcataatgttttggagcgacagcggagaaacgagttgaagcgcagtttcttcgccctgagagatcagatccctgagctggagaataacgagaaggccccgaaggttgtgatcttgaaaaaagcaaccgcatacattctttcagtacaggcagaaactcagaagctgatctcagagatcgatctgttgcgcaagcagaacgaacagctcaaacataaactcgagcaactgaggaattcctgt

SEQ ID NO: 128818 - DNA, 270 bp, Artificial Sequence
  derived and/or modified sequence
atgacagaagaaaatgtcaaaagaagaacgcataatgttctggagcgccaaagacggaacgagctcaagcggtcgttcttcgccctgagagaccagattcccgagctggagaataatgaaaaggcgccaaaggtggtcattctgaaaaaggcgaccgcgtatattctgtctgtgcaagcggagacccagaagctcatcagcgagatcgatctcttacgaaagcagaacgaacagttgaagcataagctggagcagctcagaaatagttgc

SEQ ID NO: 128819 - DNA, 270 bp, Artificial Sequence
  derived and/or modified sequence
atgacagaggagaacgttaaacgtcgaacccataacgtactggagagacagcgccgaaatgaattaaaacgttcattcttcgctctgagagatcagattccagaactagaaaataacgaaaaagcgccgaaagttgtcatcttaaaaaaagcgacggcgtatatccttagtgtccaagccgaaacacaaaaattgatatctgagatcgatctgttgagaaaacaaaatgaacaattaaaacacaagcttgaacagctccgcaattcgtgt

SEQ ID NO: 128820 - DNA, 270 bp, Artificial Sequence
  derived and/or modified sequence
atgaccgaagagaacgtcaaacgtaggactcacaatgtgttagaacggcagcgacgcaatgagctgaagcggagttttttcgctcttcgagatcaaatccccgagctggagaataacgaaaaggcccctaaggtagtgattttgaagaaagcaaccgcttacatcctgagtgtgcaagctgagacccagaagctcatcagcgagattgatttgctccggaaacagaacgagcagctgaagcataagctggagcagttacgcaattcatgc

SEQ ID NO: 128821 - DNA, 270 bp, Artificial Sequence
  derived and/or modified sequence
atgactgaagagaacgtcaaacgcaggacccataatgtgttggagcggcagcggagaaatgaactgaagagatcgtttttcgccctgagagatcagattcctgaactggaaaacaacgagaaggcacctaaggtcgttatacttaagaaggccacggcgtacatactctccgtgcaagcagagactcagaagttgatctccgaaattgaccttctccgaaagcaaaacgagcaactgaagcacaaactggaacagctgaggaattcgtgc

SEQ ID NO: 128822 - DNA, 270 bp, Artificial Sequence
  derived and/or modified sequence
atgacagaggaaaacgtgaaaagacggacacataatgtgcttgagcgacagcggaggaatgagctgaagcgaagtttctttgcattgcgagatcagatccctgaactcgagaacaatgaaaaggccccgaaggtggtcatcttaaagaaagcaaccgcttacatcctctctgtgcaagcggaaacccagaaactcattagtgaaattgacctgctgcgtaagcagaatgaacagctcaagcataagctcgagcagcttaggaatagctgc

SEQ ID NO: 128823 - DNA, 270 bp, Artificial Sequence
  derived and/or modified sequence
atgacggaagagaacgtcaaacgccgcactcacaatgtcctcgagcggcagcgccgcaatgagctcaagaggtccttttttgccctgcgagatcaaattccagaacttgagaataatgagaaggcacctaaggtggtgatcctgaaaaaagcgaccgcctacatcctttccgtgcaggccgaaacccagaagttgatcagcgaaattgaccttctgcggaaacagaacgagcagctgaaacacaagctggagcaactgcggaactcctgt

SEQ ID NO: 128824 - DNA, 270 bp, Artificial Sequence
  derived and/or modified sequence
atgactgaagagaatgtgaaacggagaacccataatgtcctggagagacaaagaaggaatgagttgaaacggagcttcttcgccctgcgagaccagattcccgagttagagaacaatgaaaaagccccaaaagtggtgatcctgaagaaggccaccgcctatatcctcagcgtgcaggccgaaacgcagaagttgatctcagagatcgacctgcttcgcaaacagaacgagcagctcaagcacaaattggaacagctccggaatagttgt

SEQ ID NO: 128825 - DNA, 270 bp, Artificial Sequence
  derived and/or modified sequence
atgactgaggagaatgtgaagcgcagaactcacaatgtcctcgaaaggcagcggcgcaatgaactcaagcggtcattcttcgcgctgcgcgaccaaatcccagaattggagaacaatgagaaagccccgaaagtcgtcatcctcaagaaagcgactgcctacattctttcggtgcaggccgaaacccagaagctcatctcggaaatcgacctgctcagaaaacagaatgagcagctgaagcacaagctggagcaattgcggaattcctgc

SEQ ID NO: 128826 - DNA, 270 bp, Artificial Sequence
  derived and/or modified sequence
atgacagaagaaaacgtgaaacgccggacacacaacgtactggaaaggcagcgccggaacgaactgaaaaggtcttttttcgctttgagggatcagatccccgagcttgaaaacaatgaaaaagcccctaaagttgtgatactgaaaaaagctacggcttatatccttagtgtgcaggcagagactcagaagcttataagtgagatcgatcttctacgaaaacagaacgaacagcttaaacacaagctagagcagttaaggaatagttgc

SEQ ID NO: 128827 - DNA, 270 bp, Artificial Sequence
  derived and/or modified sequence
atgactgaggaaaatgtgaagcgccgcacgcataatgttctggagcggcaacggcgcaacgaactgaaacggagttttttcgcccttagagatcagatcccggaactggagaataatgaaaaggctccaaaggtggtcatactgaaaaaggccaccgcgtacatcctgtccgtgcaggcagagactcagaagttgatctcagaaattgatcttttgcgaaaacagaacgaacaactgaagcacaaactcgagcagctgagaaacagctgt

SEQ ID NO: 128828 - DNA, 270 bp, Artificial Sequence
  derived and/or modified sequence
atgacagaagaaaatgtgaagaggcgaacacataacgtcctcgaacggcagaggcgcaacgagctcaaacggtctttcttcgcgctgcgcgaccagatccccgagctcgaaaataatgagaaggcccccaaagtggtgatcctaaagaaagctacggcttatatcttgtccgtccaagcagagacacagaagctgataagtgagatcgatctccttcgtaaacagaacgagcagctgaaacacaagttggaacaactgagaaactcttgc

SEQ ID NO: 128829 - DNA, 270 bp, Artificial Sequence
  derived and/or modified sequence
atgaccgaggagaatgtgaagcgtcggacccataatgtcctggaacggcaacgtagaaatgaacttaagcggagcttttttgctctcagagatcagatcccagaactggaaaacaatgagaaggcacccaaagtcgtgattctgaaaaaggccactgcatacattctttccgtgcaggccgagactcagaagctcatatcagaaatcgatctgcttcgaaagcagaacgagcaattgaaacacaaactcgaacaacttcgaaattcatgc

SEQ ID NO: 128830 - DNA, 270 bp, Artificial Sequence
  derived and/or modified sequence
atgactgaggagaacgtgaaacgcagaacccacaatgtgctggaaaggcagcggcgcaacgaattgaaaagatccttcttcgccctgcgtgaccagataccggaactggagaacaacgagaaggcccctaaagttgtcatactcaagaaagctactgcatatatactgagtgtgcaggctgagacccaaaaacttatcagcgaaatcgatttgttgcgaaagcagaatgaacagcttaaacacaagcttgagcagttgcgcaacagctgc

SEQ ID NO: 128831 - DNA, 270 bp, Artificial Sequence
  derived and/or modified sequence
atgacggaagagaacgtgaaaagaagaacccataacgtgcttgaacggcaacgtaggaatgaactgaagcggagcttcttcgccctccgcgaccaaatccctgagctggagaacaatgaaaaagccccaaaggttgtgatcctgaaaaaagctaccgcgtacatcctcagcgtgcaagctgaaacccagaaactgatcagcgaaatcgatctgcttcgcaagcagaacgagcaactgaagcacaagctggaacagctcagaaactcgtgc

SEQ ID NO: 128832 - DNA, 270 bp, Artificial Sequence
  derived and/or modified sequence
atgacggaagaaaatgtgaagcgccgaacccacaacgtgttagagcggcagcggcgcaacgagctcaaacggagcttcttcgctctccgggaccagatccctgaactcgaaaacaacgagaaggcacccaaagtggtcatcctgaagaaagcaaccgcctatatcttgagcgtccaggcagagacccagaagttgatatctgagatcgatctgcttaggaagcagaatgagcaacttaagcacaagctagagcaactgagaaactcctgc

SEQ ID NO: 128833 - DNA, 270 bp, Artificial Sequence
  derived and/or modified sequence
atgacggaagaaaatgtaaaacgtcgtacgcataatgttttagaacgacaacgacgtaatgaattaaaacgttcgttttttgcgttacgagatcaaataccggaattagaaaataatgaaaaagcgccgaaagttgttatactaaaaaaagcgacggcgtatatactatcggtacaagcggaaacgcaaaaactaatatcggaaatagatctattacgtaaacaaaatgaacaactaaaacataaattagaacaattacgtaattcgtgt

SEQ ID NO: 128834 - DNA, 270 bp, Artificial Sequence
  derived and/or modified sequence
atgactgaggagaacgtgaagcggcggacccacaatgtgcttgagcggcagcgcaggaacgagctgaagcggagctttttcgcgcttagagatcaaattcccgagcttgagaataacgaaaaggcacccaaggtggtgattctcaaaaaggccaccgcatacatcttgagcgtgcaggcagaaacccaaaaacttatttcggaaatagatctcttgcgtaagcagaacgaacaactgaaacataagctggaacaactccgcaacagctgt

SEQ ID NO: 128835 - DNA, 270 bp, Artificial Sequence
  derived and/or modified sequence
atgaccgaggagaatgtcaaaagaagaactcataacgtgctagagagacagcggagaaatgaacttaagcggagcttcttcgccctgcgggaccagattccggagcttgagaacaacgaaaaagctccaaaagtggtcattctaaaaaaggcgactgcttacatcctgtctgtccaggctgagacccagaaactcattagcgagattgacctcctaagaaagcaaaatgagcagcttaaacataagctagagcagttgcggaatagctgt

SEQ ID NO: 128836 - DNA, 270 bp, Artificial Sequence
  derived and/or modified sequence
atgaccgaagaaaatgtcaagaggcggacccataacgtgctggaacgccaaaggagaaacgagctcaaacgttcctttttcgcactgagggatcagatccctgaattggagaacaacgagaaggcaccaaaggtcgtgattcttaagaaggccactgcgtacattttgagcgttcaagctgagacgcaaaagctgatcagcgaaatcgacctgctgcgtaaacagaacgagcaacttaagcacaaacttgagcagcttcgcaactcatgt

SEQ ID NO: 128837 - DNA, 270 bp, Artificial Sequence
  derived and/or modified sequence
atgacggaagaaaacgtgaagcgcagaactcacaacgtactcgaaagacagcgtcgtaacgagcttaaaagatcttttttcgcgttgcgggaccaaattccagagcttgaaaataatgagaaagcaccgaaagttgtgattctgaagaaagccacagcttatatcctgagcgttcaagccgaaacacaaaagcttatttcagaaatcgacttactaaggaaacaaaacgagcaattaaaacataaacttgaacagttacggaattcttgt

SEQ ID NO: 128838 - DNA, 270 bp, Artificial Sequence
  derived and/or modified sequence
atgacggaggagaacgtgaaaaggaggacacataatgtgcttgagagacagcggcgaaatgaattaaagaggtctttctttgctctgcgcgaccagatccctgagctggaaaataacgaaaaggctccaaaggtggtcatactcaagaaggcaaccgcatatatattgagcgttcaagcagagacacagaagttgattagtgaaattgacttacttcgcaaacaaaatgagcaactgaagcacaaactcgaacagctgcggaactcatgt

SEQ ID NO: 128839 - DNA, 270 bp, Artificial Sequence
  derived and/or modified sequence
atgaccgaagaaaatgtgaagaggcgcactcataacgtcctcgagcgccagcggagaaacgagctcaagaggagcttcttcgccctgagggaccagattccagagcttgagaataacgaaaaggctcccaaagttgtgatcctgaaaaaagccactgcatacattcttagcgtccaggctgaaacccagaagctgatctcggaaatcgacttgctgaggaagcaaaatgagcagctcaagcataagctggagcagctccgcaactcctgc

SEQ ID NO: 128840 - DNA, 270 bp, Artificial Sequence
  derived and/or modified sequence
atgaccgaggagaatgtcaagcggcgcactcataacgtcctagagaggcagaggcggaatgaactgaagcggtccttcttcgcgctgcgggaccaaatccctgagctggaaaacaatgagaaggcccccaaagtagtgatattgaaaaaagcaacagcctacattctgtctgttcaggccgaaacccagaagctgattagcgagattgacttgctgcgcaagcaaaatgagcagttgaagcacaaactggagcaactgagaaacagctgt

SEQ ID NO: 128841 - DNA, 270 bp, Artificial Sequence
  derived and/or modified sequence
atgacagaagaaaatgtcaaacggcggacacataatgtgctggagagacaacggagaaacgagctcaaacggtcattttttgcactaagagaccagattccggagctggagaacaacgagaaggcccctaaagtcgtcattctcaaaaaggccacagcctacattttgagtgttcaggccgagacccagaaactgatcagcgagatagatttgcttagaaagcaaaacgagcagctaaaacacaagctggaacagctgcgaaattcctgc

SEQ ID NO: 128842 - DNA, 270 bp, Artificial Sequence
  derived and/or modified sequence
atgaccgaggaaaacgtcaagcgaaggacacataacgtgctggaaagacagcgtaggaatgaactgaaaaggtctttttttgccttaagggaccagataccggagcttgagaacaacgaaaaggctcctaaagtcgtcatcctaaagaaagctactgcttacatcctgagcgtccaggccgagacccaaaaacttatctctgaaatagatttgcttcgcaagcagaacgagcagttgaaacacaaactcgagcagttaaggaacagctgc

SEQ ID NO: 128843 - DNA, 270 bp, Artificial Sequence
  derived and/or modified sequence
atgaccgaggaaaatgtcaaacgtcggactcataacgtgctcgaaaggcagcggagaaacgaactaaagagaagtttctttgccctgcgcgaccagatcccagagttggagaacaacgaaaaggcccccaaggttgttattctcaagaaagctaccgcttacatactctcagtgcaggccgagacacagaagctcatttctgaaatagatctgctgcgtaaacagaatgaacagttgaagcacaaactggaacaattacgcaacagctgt

SEQ ID NO: 128844 - DNA, 270 bp, Artificial Sequence
  derived and/or modified sequence
atgaccgaggagaacgttaaacgaaggacgcataacgtgctggagcgacagaggaggaacgagctgaagcgcagcttctttgctcttcgggatcagatacctgaattggaaaataatgagaaggcacccaaagtcgttatactgaagaaagcgacagcatacatactgtcagtccaggctgagacacagaaattgatctctgaaatcgacctgctgagaaagcagaacgagcagcttaagcacaagctggaacagcttcgtaattcctgt

SEQ ID NO: 128845 - DNA, 270 bp, Artificial Sequence
  derived and/or modified sequence
atgaccgaggaaaatgtcaaaagacgcacccacaacgtgctcgagcggcagcgcaggaacgaactgaagcgctccttctttgcgcttcgggaccaaataccagaattggaaaacaatgaaaaggcaccgaaggtggtgatcctgaagaaggctacggcatacatcctgtcagtgcaggccgagactcagaagctgatctcagaaatcgacttgctccggaaacaaaacgagcagcttaagcataaactcgaacaattgagaaactcgtgt

SEQ ID NO: 128846 - DNA, 273 bp, Artificial Sequence
  derived and/or modified sequence
atgactgaagagaacgttaagcgccgcacccacaacgtgttggaacgccagcgtcgcaatgaattgaaacgaagcttctttgcgctgagggaccagatcccagaactggaaaacaatgaaaaggctccaaaggttgtgatcctcaaaaaggcaaccgcctatatcctgtccgtgcaagcggagacccagaagttgataagcgagatcgatttattgagaaaacaaaatgaacagctgaaacacaaactggagcagctgcgaaattcctgcgcc

SEQ ID NO: 128847 - DNA, 273 bp, Artificial Sequence
  derived and/or modified sequence
atgacagaagaaaatgtaaaacggcgtacacataatgtgcttgaacgacaaagacgcaatgagttgaaacgatcattcttcgctctaagggatcagatacccgaactcgaaaataacgaaaaagcacccaaagtagtcattcttaagaaagccacagcctatatactctctgtgcaagccgaaacacaaaaattaatatctgagatagatcttctgcgaaaacagaatgagcagcttaaacataagctggaacagctccggaattcctgtgcg

SEQ ID NO: 128848 - DNA, 273 bp, Artificial Sequence
  derived and/or modified sequence
atgacagaggaaaacgtgaaacgacgcacacataacgtgctggaaaggcagcggaggaatgaactcaaacggtctttttttgctctcagagaccagatacccgaattggagaacaacgagaaagcacccaaagtagtcatactcaaaaaggccactgcttatatcctgtctgttcaggctgaaactcagaaactcataagtgaaatagatctcctcaggaagcagaacgaacagctgaagcataaacttgaacagctgcgaaattcttgcgca

SEQ ID NO: 128849 - DNA, 273 bp, Artificial Sequence
  derived and/or modified sequence
atgactgaagagaacgtcaagcggaggactcacaacgtgctcgagaggcagcggcgcaatgaactgaaaaggtccttctttgcactacgcgatcagatccctgaattggaaaacaacgaaaaagccccaaaagtcgtcatacttaaaaaagccacagcttacattctaagtgttcaggctgagacacagaaactgatcagtgaaatagatttattgcggaaacagaatgaacagctcaaacacaaacttgaacagttaaggaattcttgcgca

SEQ ID NO: 128850 - DNA, 273 bp, Artificial Sequence
  derived and/or modified sequence
atgaccgaagaaaacgtcaagcgacggactcataatgttctggagcgccaacgacgtaatgagcttaagagatcgttcttcgcacttagggatcagattcccgaactcgaaaataacgaaaaggctcctaaagtggtcatcctgaagaaggcgaccgcttacatcctgtcagttcaggcagaaacacagaagctgatatcggaaatcgatcttttgagaaaacaaaatgaacagcttaaacataaactcgaacagctcagaaacagttgtgca

SEQ ID NO: 128851 - DNA, 273 bp, Artificial Sequence
  derived and/or modified sequence
atgaccgaggagaatgtgaaaaggaggacacacaacgtgttggagagacaacgacgaaatgaacttaagcgctctttctttgccctcagggatcagattcctgagttggagaataatgagaaagccccaaaagtggtgattttgaagaaggctacggcttacatccttagcgtacaggcagagacccagaagctcataagtgaaatagacctgttgagaaaacagaatgagcagttgaaacataagcttgagcagctgaggaatagctgtgcc

SEQ ID NO: 128852 - DNA, 273 bp, Artificial Sequence
  derived and/or modified sequence
atgacagaggagaatgtgaaacgccgtacccataacgtgctggagagacagagaagaaacgaattgaagaggtccttcttcgctcttcgcgatcagatcccagagctggagaataatgagaaagcccccaaggtggtgatactgaagaaggcaactgcttacatactgagtgtccaggctgaaactcagaaactgatttccgaaatagatcttctgcggaagcaaaatgagcagctgaaacacaagctggagcagctacgcaactcttgcgct

SEQ ID NO: 128853 - DNA, 273 bp, Artificial Sequence
  derived and/or modified sequence
atgaccgaggagaacgtgaagcgccgtacacacaatgttttggaaagacaaagacggaatgagcttaagcgcagcttcttcgcgcttcgcgatcagatcccagaactggaaaacaatgagaaggcaccaaaggtcgtgatcttgaaaaaggccaccgcatacatcctgagcgtccaggctgaaactcagaaattgattagcgagattgacctccttaggaagcaaaacgaacaactgaagcacaagttagagcagctgcgcaactcatgcgca

SEQ ID NO: 128854 - DNA, 273 bp, Artificial Sequence
  derived and/or modified sequence
atgaccgaggagaacgttaagcgacgcacgcacaacgtgttggaaagacaaaggcgcaacgaactcaaaagatcgttcttcgcactgagagaccaaatccctgaacttgaaaataacgaaaaggcccctaaggttgtgatcttgaaaaaggcaaccgcctatattctttcggtgcaggccgaaacacagaagcttatcagcgagattgacctcttgcggaaacagaatgagcagcttaagcataaacttgaacaattgcggaacagctgtgca

SEQ ID NO: 128855 - DNA, 273 bp, Artificial Sequence
  derived and/or modified sequence
atgaccgaggagaacgtcaaacgacgaacacataatgtcctggagcggcagcgccggaatgagctgaaacgcagcttctttgccctgcgggaccagatccctgagttggagaataacgagaaggctcctaaggtggtgatcctcaaaaaggctaccgcatatattctgtctgtacaggctgaaacccagaagctgataagcgagatcgatctcctgcgaaaacagaacgagcagctgaagcacaagctcgagcagctcaggaacagttgcgcc

SEQ ID NO: 128856 - DNA, 273 bp, Artificial Sequence
  derived and/or modified sequence
atgaccgaagagaacgtcaagcgccggacccacaacgtcctggagaggcaacggaggaatgaattgaagaggagcttcttcgccctgagggatcaaatcccagagttagagaataacgagaaagcccccaaggtcgtgatcttgaagaaagctaccgcgtatatactgtccgtgcaagctgaaactcagaaactcatatctgagatcgatttgctcaggaaacagaacgaacaactgaagcacaagcttgagcaacttagaaactcctgtgcg

SEQ ID NO: 128857 - DNA, 273 bp, Artificial Sequence
  derived and/or modified sequence
atgacagaggaaaacgtcaagcggcggactcacaatgtgttggagcggcagagaaggaacgaacttaagcgaagcttcttcgcactgcgggatcagatccccgaactggagaataatgaaaaggcacccaaggtcgtaattctcaaaaaagctactgcatacattctcagcgtccaggcagaaacacagaagctgattagtgaaatcgatttgctgcgaaagcaaaatgaacagttgaagcataagctcgagcagctcagaaacagctgcgca

SEQ ID NO: 128858 - DNA, 273 bp, Artificial Sequence
  derived and/or modified sequence
atgactgaagaaaacgttaagagaagaactcacaacgtgctggagcgacagaggagaaatgaactgaaacggagtttcttcgcccttagggaccagatacctgaacttgaaaacaatgaaaaagctcctaaagttgtgattcttaaaaaagccacagcctatatcctctctgtgcaggctgagacacagaaattaatctcagaaatagatttgctccggaagcaaaatgaacagctcaaacacaagttggaacaactcaggaatagttgcgct

SEQ ID NO: 128859 - DNA, 273 bp, Artificial Sequence
  derived and/or modified sequence
atgaccgaagagaacgtcaagcgccgaacacataacgtcctcgaaaggcagcggcggaatgaactcaagaggtctttttttgccttgagggatcagatacctgaactggaaaacaacgagaaagccccaaaggtcgtcatcctgaagaaagctacagcgtacatcctgagcgtgcaggcagaaacacagaaactcatctctgagatcgacctgctcagaaaacaaaatgagcaactgaagcataaactcgaacagctcaggaattcatgcgct

SEQ ID NO: 128860 - DNA, 273 bp, Artificial Sequence
  derived and/or modified sequence
atgaccgaagaaaatgtcaagagaaggacacataatgtgttggagcgacagcgtcggaacgaattaaagagatccttctttgccctcagagatcaaataccggagctcgagaacaacgagaaggcccccaaggttgtgattttgaaaaaggctactgcctacatccttagcgtccaggccgaaacccagaaattgataagcgaaattgacctgctgagaaagcagaacgagcaattgaagcataaacttgaacagctccgaaattcatgcgca

SEQ ID NO: 128861 - DNA, 273 bp, Artificial Sequence
  derived and/or modified sequence
atgacagaagagaatgttaaacggcgcacacataacgtgttggagcggcagcggcgaaatgagctgaagcggagcttttttgcgcttcgcgaccaaataccagagctggagaacaacgagaaggcccccaaagtggttatcctcaaaaaggcgacagcctacatacttagcgtgcaagcagaaacacagaaactgatctcagagattgatctgctccgcaagcaaaatgaacagctgaagcataaactggagcagttgagaaattcttgtgcc

SEQ ID NO: 128862 - DNA, 273 bp, Artificial Sequence
  derived and/or modified sequence
atgactgaggagaatgtgaaaagacgaacccacaacgtgttagagagacaacgccgaaacgaattgaaaaggagtttcttcgcacttcgagatcagattccggaactcgagaacaatgaaaaagcccccaaagtggtaatcctgaaaaaagcaaccgcctacatattatctgtccaggcagagacacagaagttaattagcgaaatagatctgctgcgcaagcagaatgaacagcttaaacataagctggagcagctgagaaactcttgcgct

SEQ ID NO: 128863 - DNA, 273 bp, Artificial Sequence
  derived and/or modified sequence
atgaccgaggagaacgtgaagcgccgtacacacaatgtattggagaggcagcgtcgcaatgagcttaagagaagcttcttcgcgctgagagaccagatacccgagctggagaacaacgagaaagcacccaaagttgtaattttgaaaaaggccactgcgtatattctgtcagtgcaggcagaaacccagaaactcatatctgagatcgacctactccgcaaacagaacgagcagctcaagcacaagctcgagcagctgaggaactcctgcgca

SEQ ID NO: 128864 - DNA, 273 bp, Artificial Sequence
  derived and/or modified sequence
atgactgaagagaacgtgaaacgaaggacccacaacgtgcttgaaagacagagaagaaatgaattaaaacggagcttcttcgcactgcgggaccagataccagaattggagaataacgagaaggcccctaaggtggtgatcctgaaaaaagctacagcatatatcctctccgtgcaggctgagacacagaagcttatttctgaaattgacctactcagaaagcagaatgagcagctcaagcacaaacttgagcagcttaggaacagttgtgct

SEQ ID NO: 128865 - DNA, 273 bp, Artificial Sequence
  derived and/or modified sequence
atgactgaggaaaacgtaaagaggcgcactcataacgtgctggagagacagaggagaaatgagctgaagcgctctttcttcgccctgcgagatcaaatcccagaactggaaaataacgagaaagctccaaaggtggttattctcaagaaggcgacggcctatattctctctgtgcaagccgaaactcagaaactcatttccgagatcgatctgctgagaaagcagaacgagcaactgaaacacaagctggagcaactgagaaactcctgcgct

SEQ ID NO: 128866 - DNA, 273 bp, Artificial Sequence
  derived and/or modified sequence
atgaccgaggagaacgtaaaaagacggacccacaacgtactggagaggcaacgcaggaacgagctgaagcgtagctttttcgcattgcgagaccaaatccccgagctggagaacaatgagaaggccccaaaggtagtcatcctgaagaaagctaccgcatatattctgagtgtgcaagcagaaacccagaagttgatttcggaaattgatcttttgcgcaagcagaacgagcagcttaagcataaattagaacagctcagaaactcttgcgcg

SEQ ID NO: 128867 - DNA, 273 bp, Artificial Sequence
  derived and/or modified sequence
atgactgaggaaaatgtcaaaagaagaacacacaacgtgttggagaggcagcgccgaaatgagctcaagcggagcttttttgcactgcgcgaccagatccccgagctggagaataacgaaaaggcacctaaagtggtaatcctgaaaaaggccacggcttatatcctctctgtgcaggccgaaactcagaagttgatctctgaaatagatctcctcaggaagcaaaacgaacagcttaaacataagctggaacagctgaggaacagctgcgcc

SEQ ID NO: 128868 - DNA, 273 bp, Artificial Sequence
  derived and/or modified sequence
atgacagaagagaatgtcaagaggagaactcacaatgttctggagcgacagaggagaaacgagttgaagcggtcctttttcgcacttagagatcagatacccgaactggagaacaacgagaaggcccccaaggtggtcattttgaagaaagccactgcctacatcctgagcgtccaggccgagacccagaagctcatttcagagattgacttgctccggaagcagaacgagcaactcaaacacaaacttgaacagttgagaaactcatgtgcc

SEQ ID NO: 128869 - DNA, 273 bp, Artificial Sequence
  derived and/or modified sequence
atgacagaagaaaatgtcaaacggagaactcacaatgttctcgaaaggcagcggcggaacgaactgaaacggtcgttctttgctctacgcgatcagataccagaattggagaacaatgagaaagcccccaaagtcgtgatcctcaaaaaagcaacagcctacattctgtctgtgcaggccgagacacagaaactgatctccgaaatcgatctcctaaggaagcagaacgaacagcttaaacataagctggaacagcttaggaattcctgcgct

SEQ ID NO: 128870 - DNA, 273 bp, Artificial Sequence
  derived and/or modified sequence
atgacagaggagaacgtcaagcgtagaacccacaacgtcctagagaggcaaaggagaaatgagctgaagaggagctttttcgcccttcgggatcagatccctgaacttgaaaataatgagaaggctcctaaggtggtgatactgaaaaaagctacggcatacatcctgtctgtgcaagccgagacccagaagttgatttcagaaatcgacctgctacggaagcagaatgaacagctcaagcataaactggagcagttacgaaattcctgcgcc

SEQ ID NO: 128871 - DNA, 273 bp, Artificial Sequence
  derived and/or modified sequence
atgaccgaggagaacgtcaagcggcggactcataacgtactggagagacaaagacgaaatgaactaaagcggagcttttttgcgctgcgcgaccagatacctgagttggagaataacgaaaaggcccctaaagtggtaatcctgaaaaaagctactgcctatattctctcagtccaggccgaaacacaaaaactgatatccgagatcgacttgttgagaaaacaaaacgagcagctaaaacataagctggagcagttgcggaatagctgtgcg

SEQ ID NO: 128872 - DNA, 273 bp, Artificial Sequence
  derived and/or modified sequence
atgaccgaagagaacgttaagagacgcacccataacgtgcttgagagacagaggagaaacgaactgaagaggagcttctttgccttgagagatcaaatcccagaacttgaaaacaatgagaaagcgcccaaggtcgtgatcttaaaaaaagcgactgcatacatcctgtcagttcaggccgaaactcaaaaactgatcagtgaaatcgacctgcttcgaaaacaaaacgagcagcttaagcacaaactggagcaacttagaaactcatgcgca

SEQ ID NO: 128873 - DNA, 273 bp, Artificial Sequence
  derived and/or modified sequence
atgacagaagaaaatgtcaaaaggcggacacataacgtgctggaacggcagcgaaggaacgaactcaagcggagttttttcgcactacgggatcagataccagaactggaaaacaacgaaaaggcaccaaaagtagttatcctcaaaaaagctacagcttacattctctcagtgcaggcagaaactcagaaattaatctctgaaatagatttgttgagaaaacagaatgaacagctgaaacataaactggaacagctcaggaattcttgcgca

SEQ ID NO: 128874 - DNA, 273 bp, Artificial Sequence
  derived and/or modified sequence
atgacagaagagaatgtaaaacgtcgaacccacaatgtgctggagcgccaaaggagaaacgaactgaaaaggtccttctttgccttgcgagatcagatccccgagctggaaaacaacgagaaagcacctaaagttgtgatcctgaagaaggctaccgcctacattctgtctgtccaagccgaaacccagaagcttatctccgagatcgatctcctccgcaaacagaacgagcagctgaaacacaagttagaacagcttcggaattcatgtgca

SEQ ID NO: 128875 - DNA, 273 bp, Artificial Sequence
  derived and/or modified sequence
atgacagaggagaacgtgaaacggcggacccacaacgttttggagcggcagcgaagaaacgagctgaaaagaagtttcttcgccctcagagaccagattcccgaactggaaaataacgaaaaggctcccaaagtcgtgatcttaaaaaaagccaccgcatatatcctttctgttcaggctgagacgcagaagttgatcagtgagatcgaccttctaaggaagcagaacgagcaactaaaacacaagctggagcagctgagaaactcctgtgcc

SEQ ID NO: 128876 - DNA, 273 bp, Artificial Sequence
  derived and/or modified sequence
atgacagaagaaaatgtgaaacgcagaacacataacgtgctggagcgtcagcgtagaaatgagctcaaaaggtcgttttttgcgcttagggatcagatcccagaactcgaaaataacgagaaggcgcctaaagtggtcatcctgaagaaggccacagcatacatcctttcagtgcaagcagagacacagaaactgatcagtgagattgacctattgaggaagcagaacgagcagttgaaacataagttggaacagctgagaaatagctgtgca

SEQ ID NO: 128877 - DNA, 273 bp, Artificial Sequence
  derived and/or modified sequence
atgacagaggaaaacgttaaaaggcggactcacaatgtgctcgagcggcagcgccgcaacgaactgaagaggagctttttcgcccttcgcgatcaaattccggagctcgagaataatgagaaagcccctaaggtggttatcctcaagaaggccacagcttatatactctctgtccaagcggagacccagaagctcataagtgagatcgatctcctccggaagcagaatgagcagctgaaacacaagctagagcaactacggaatagctgcgcc

SEQ ID NO: 128878 - DNA, 273 bp, Artificial Sequence
  derived and/or modified sequence
atgacagaagagaacgtgaaacgccgaacccacaacgttctggagcgacagcgccggaacgaactcaagcgctcattttttgccctgagggaccaaatacctgagctggagaacaatgagaaagcaccaaaagtcgtaatcctgaaaaaagcgactgcttacattctgtcagtccaggctgagacccagaaactcatatccgaaattgacctgctgcggaaacagaacgagcagctgaaacacaaattggaacagctgaggaattcttgtgcc

SEQ ID NO: 128879 - DNA, 273 bp, Artificial Sequence
  derived and/or modified sequence
atgacagaagaaaatgtgaagcggcgcacacacaacgttttggagcgccaaaggagaaacgaactgaaacgaagtttttttgctctccgggatcagatccctgaactggaaaacaatgaaaaagcacccaaagtggttatactcaaaaaagccactgcctatatactcagtgtacaagccgaaacacagaaactcatcagtgagatcgacctgctacggaaacagaacgaacagcttaaacacaaactcgaacagttgcgtaatagttgtgcc

SEQ ID NO: 128880 - DNA, 273 bp, Artificial Sequence
  derived and/or modified sequence
atgacggaagagaacgttaagaggcggacacacaacgtgctggaaaggcagaggagaaacgaactgaagcgcagcttttttgcgctgagggaccagattcctgaactcgagaacaacgagaaagcccctaaagtggtgatcctcaaaaaggccactgcctacatactgtccgtgcaggcagagacacaaaaactgataagcgaaatcgatctcctgcggaagcagaacgaacaactgaaacacaagttggagcaactcagaaactcttgcgcc

SEQ ID NO: 128881 - DNA, 273 bp, Artificial Sequence
  derived and/or modified sequence
atgactgaagagaacgttaagcgcagaacccacaacgtgcttgagcggcagcggcggaacgagctaaagcgaagttttttcgccctgcgagatcagatccccgaactggagaataacgaaaaagctcccaaagtcgtcatcttgaagaaagctactgcatatatcctgtccgtgcaagcagagacacagaagctgatcagtgagatagatcttctgcgcaagcagaatgaacagctgaaacacaaactggagcagttgcgcaacagctgcgca

SEQ ID NO: 128882 - DNA, 273 bp, Artificial Sequence
  derived and/or modified sequence
atgaccgaagaaaacgtgaaaaggagaacacacaacgtgttggaaagacagaggcgtaacgagctgaaacgctctttctttgccctgcgagatcagatccctgagttggagaacaatgagaaggctcccaaggtggtgatcctgaaaaaggctaccgcttatatactatccgtgcaggcagagacacagaagttgatttcggaaatagacctgttgaggaaacaaaatgagcagctgaaacacaagctggagcagcttagaaactcttgcgca

SEQ ID NO: 128883 - DNA, 273 bp, Artificial Sequence
  derived and/or modified sequence
atgacggaggagaatgtgaagcgtcgcacacataatgtactcgaacggcagcgccggaatgagctaaaaagatctttctttgccctccgggatcagatacccgaactggagaataacgaaaaagcacccaaagtggtaattctgaagaaggctacagcatatattctctctgtgcaagcagagacccagaaactcatcagtgagatcgatcttctcagaaaacagaacgagcagcttaagcataagttagagcagctcaggaactcctgcgca

SEQ ID NO: 128884 - DNA, 273 bp, Artificial Sequence
  derived and/or modified sequence
atgactgaagaaaacgtcaaaagaagaacacataatgtgttggagcggcagagacgaaacgaactgaaacgctcctttttcgccctacgggatcagatcccagaactcgagaacaacgaaaaggcccccaaagtcgtgatattaaaaaaggccactgcctatattctctccgtgcaggcagagactcagaaacttatctccgaaattgatctgctgcggaaacagaatgaacagcttaaacataaactcgaacagctccggaattcttgcgca

SEQ ID NO: 128885 - DNA, 273 bp, Artificial Sequence
  derived and/or modified sequence
atgaccgaggaaaacgtaaagagaagaacccacaacgtgttagaaagacagaggagaaacgaacttaagagatcattttttgctctgcgggatcaaatccccgagttagagaacaacgagaaggcacctaaggtggttatactaaagaaggctacagcctacatattgtccgtacaggcggagactcagaagctcatctccgaaatcgatctgctgcgcaaacaaaacgaacagctgaagcacaagttggagcaactgcggaactcctgcgca

SEQ ID NO: 128886 - DNA, 273 bp, Artificial Sequence
  derived and/or modified sequence
atgacagaggagaatgtaaagaggaggacccataatgtgctggagcggcaaaggagaaatgagctcaagagatcatttttcgctctgcgggaccaaatccctgagctggagaacaacgagaaagcaccaaaagtggtgatcctcaagaaagccaccgcctacattttgtcagtacaagctgaaactcagaaactcatcagcgagatcgatctcctgagaaaacagaacgaacagctgaagcacaagctcgaacaacttaggaatagctgcgct

SEQ ID NO: 128887 - DNA, 273 bp, Artificial Sequence
  derived and/or modified sequence
atgaccgaagagaatgtgaaaagacgaacacataacgtgctggagcggcagcgccggaacgagttaaagaggtccttcttcgccctgagggatcagattccagagctggagaataatgaaaaggcaccaaaggtggtgatactgaagaaggccacagcttacatcttgtctgtgcaggccgagacacagaaactgatatcggagatcgacctcctccggaagcagaatgagcagcttaaacacaagctcgagcagctgcgcaatagctgtgcc

SEQ ID NO: 128888 - DNA, 273 bp, Artificial Sequence
  derived and/or modified sequence
atgaccgaggagaacgtgaaacgtagaactcacaacgttctcgagaggcagaggcgcaacgagctgaaacggagcttctttgcccttagagaccagatcccagagctggagaacaacgaaaaagcccccaaagtggtaatactgaagaaggcaacggcttacatcctgagtgtgcaggcagaaactcagaagctgattagtgagatcgatctgctacgaaaacagaacgagcagttaaaacacaaactggagcagctaagaaattcgtgtgcc

SEQ ID NO: 128889 - DNA, 273 bp, Artificial Sequence
  derived and/or modified sequence
atgactgaagaaaacgtgaaacggcgcacccataatgtgctcgagcggcagagacggaacgagctcaagcggagtttcttcgcactgcgggaccagatcccagagttggagaacaatgagaaggcgccaaaagtagttattcttaagaaggcaaccgcatacattctctctgtccaggctgagacacagaagctgatttccgagattgacctgctccgaaagcagaatgagcaactgaagcacaaactggaacagcttagaaattcctgcgct

SEQ ID NO: 128890 - DNA, 273 bp, Artificial Sequence
  derived and/or modified sequence
atgacagaggaaaacgtcaaaagaagaactcacaacgtactagaaaggcagagacggaacgaactcaagagatcctttttcgcattgcgggatcagatacccgagctcgaaaacaatgagaaagcacctaaagtcgtgatccttaaaaaagcaacagcttacatcttgagtgtgcaggcagaaacacagaaattaatctccgaaatcgatttgctcagaaaacagaatgaacaactgaaacacaaactagaacagctgaggaactcgtgtgcg

SEQ ID NO: 128891 - DNA, 273 bp, Artificial Sequence
  derived and/or modified sequence
atgacagaagagaacgtgaagcgcaggacgcacaatgttctcgagcgccagcggcgcaacgaactcaagcggagtttcttcgcactcagggaccagatccccgagctggagaacaatgaaaaggcacctaaggtcgtcatcctgaagaaggccacagcctatatactgtcagtgcaggcagagacccagaaacttatcagtgagattgatctgctaaggaaacagaatgaacagctgaagcacaagctggagcagctgaggaactcgtgcgcc

SEQ ID NO: 128892 - DNA, 273 bp, Artificial Sequence
  derived and/or modified sequence
atgaccgaagagaacgtgaagagaagaacacacaacgtcctggagcgccaaaggagaaatgagctgaagcgctctttcttcgctctccgagatcagattccagaattagagaacaacgagaaagccccgaaggtggtcatccttaagaaggctacggcatacatactttcagtgcaggctgaaactcaaaaactgatatcagaaatcgaccttcttcgcaaacagaacgaacagttgaaacacaaattggagcagcttaggaacagttgtgct

SEQ ID NO: 128893 - DNA, 273 bp, Artificial Sequence
  derived and/or modified sequence
atgacagaggaaaatgtaaaacgcagaacccacaatgttctagaaaggcagaggaggaacgagttaaagcgatccttcttcgccctgagagatcagatcccagagctggaaaacaacgaaaaggctccgaaagtagtgatcctcaagaaggccaccgcgtacatcctgtcagtgcaggcagagactcagaaactgatcagcgagatagacctgctccgtaagcagaacgagcaactgaaacacaagctcgaacagctacgaaactcctgcgct

SEQ ID NO: 128894 - DNA, 273 bp, Artificial Sequence
  derived and/or modified sequence
atgacagaagaaaatgtgaaacggcggacacataatgtgttagaaagacagaggaggaatgagcttaaacggtctttctttgctctaagggatcagatccctgagctcgaaaacaatgaaaaagcccccaaagtagtaatacttaaaaaggctacagcttatatcctctctgtgcaagcagaaactcagaaactgattagtgagatagatttgctgaggaaacagaatgaacagctcaaacataaattagagcagctacgcaattcatgcgct

SEQ ID NO: 128895 - DNA, 273 bp, Artificial Sequence
  derived and/or modified sequence
atgacagaagagaatgtgaaaaggcgcacccacaacgtcctggagcgccagagacgcaacgaattgaaacgctctttcttcgcgctccgcgatcaaatccctgagctggagaacaatgaaaaagccccaaaagtggtgatcctcaagaaggccaccgcctacatactgtctgttcaggctgagacgcagaagttgatctctgagattgaccttctgaggaagcagaatgagcagctcaaacataagctggagcagttgcgcaactcctgcgcg

SEQ ID NO: 128896 - DNA, 1317 bp, Artificial Sequence
  derived and/or modified sequence
atgccccttaacgtatccttcacaaatagaaactacgacttagactatgatagcgtccagccatatttctattgtgatgaggaagaaaacttctatcaacagcagcagcagagcgagttgcagcccccagctccaagcgaggatatttggaaaaagtttgaactgttgcctactcctcccctctccccttctaggaggagcggattgtgctcgccaagctacgtggctgttacacctttctccctcaggggagacaacgatggagggggaggaagtttcagcactgccgatcagttagagatggtgactgagctgctgggtggagacatggtgaaccagtcattcatttgcgaccctgacgacgaaacattcatcaaaaacatcatcattcaggattgtatgtggtctggattttccgccgcagccaaactggtaagcgaaaaactggctagttaccaggccgctaggaaagacagcgggtctcctaaccccgccagaggacactcagtttgctccacatcgtccctctacctacaggacctgagcgcagctgcgtccgagtgcattgatcctagtgtggtctttccatacccacttaacgacagttcatcccctaaaagctgcgcaagccaggactcctcagcattcagtccttcaagcgatagcctgctttcttccacggagagtagcccacaaggatctcctgagcccctggtccttcatgaggagacacctcctaccacatcttctgattcggaggaggaacaggaggatgaggaggaaatcgacgttgtgagcgtggagaagcgccaggccccaggaaaacgcagcgagagtggtagccctagcgcaggtggacattcaaaaccccctcacagtccactggttcttaaaaggtgtcatgtgtccacccatcaacataactatgccgctcctcccagcacccggaaagattacccagctgcaaaacgggtgaagctcgattccgtcagggtgttgcgtcaaatcagcaataacaggaagtgcactagtcctaggagcagcgacacagaagaaaacgtcaagaggcgcacacacaacgtactggagagacaaagacgtaatgaactcaagaggtccttttttgctttacgagaccagattcctgagctggaaaacaatgagaaagctcctaaagtggttattctcaagaaggccacagcttacatcttatccgtccaggcagaggagcagaaattgatctctgaggaagatctgcttaggaagcggagggaacaattaaaacacaagctcgagcaactgcggaatagctgcgct

SEQ ID NO: 128897 - DNA, 1317 bp, Artificial Sequence
  derived and/or modified sequence
atgcctctcaacgtgagtttcacaaataggaactacgatctcgattacgatagcgttcagccttatttctactgcgatgaggaggaaaatttctaccagcagcagcagcaatcagaactgcagccaccggctccgtctgaagatatctggaagaaattcgagctcctgcctacacctccactcagccctagcaggagaagtggtctatgttctccctcatacgtggctgttaccccttttagtttgcgcggcgacaacgacggaggaggtggatcattcagcaccgcagatcaacttgagatggtcactgagctgctcggcggcgatatggtgaatcagtcgtttatctgtgatcccgatgacgagacgttcatcaaaaatattattattcaggattgtatgtggagcggattctctgctgccgccaaactcgtgagcgagaaacttgcctcatatcaggccgcaaggaaggattccgggagccccaaccctgctcggggacatagtgtgtgctctacctcctcgctgtacttgcaagacctgtcagctgctgccagtgagtgtatcgacccatcagtggtgttcccataccctctgaacgactcctctagcccgaagagctgcgcctcccaagacagtagcgcattctccccaagcagtgacagccttctgagcagtacagagagcagccctcaggggtcaccagagccactcgttctccatgaggagactccccctaccacatctagcgactccgaagaagaacaggaagatgaagaagaaatcgacgtggtatcggtggagaagcgccaggcacccggtaaaaggtccgagagtggatcacccagcgctggaggacactctaagccaccacatagccccttggtcttgaaacgctgccacgtcagcacccatcagcacaattacgccgctcctccttcgacaagaaaggattaccctgctgctaaacgggtcaaactggatagcgtcagggtcctcaggcagatatccaacaacagaaaatgcaccagcccaaggagttctgatacagaagaaaacgttaagaggaggactcacaacgtcctggaacggcaacgccgaaatgaactgaagaggtcattttttgccttaagggaccagatccctgagctggagaataacgaaaaagccccaaaggtggtgattttgaagaaggctacagcctacatcctgagcgtccaagccgaggagcagaaactgatctccgaggaggatctgctcaggaaacgaagggagcagttgaaacacaaattggaacaattgagaaactcctgtgcc

SEQ ID NO: 128898 - DNA, 1317 bp, Artificial Sequence
  derived and/or modified sequence
atgccgctgaatgtgtcattcacgaaccgtaattatgacctggactacgactcggtgcaaccatacttctactgcgatgaagaggaaaacttctaccaacagcagcaacaatccgagctgcaaccgccggcaccgtcagaggatatctggaagaagttcgagctgctgccgaccccaccactcagcccatccagacggagcggcctgtgctctccgtcatacgtggccgtgacgccattctccctgcggggagacaacgatggagggggaggttcctttagtaccgcagaccagctcgaaatggtcactgagcttctcggaggagacatggtgaaccagtcctttatctgcgacccggatgacgaaaccttcatcaagaatatcatcattcaagactgtatgtggtctggtttctcagctgccgcgaagctcgtaagcgagaagctggcctcataccaggccgcccggaaggactcgggatctcccaatcctgcgagaggacattccgtctgctctacttcgtctctctaccttcaggatctctccgcggccgcatcggaatgcattgatccaagcgtggtgtttccgtaccctctgaatgactcgagctcgcctaaaagctgtgcgtcacaagactcgagtgcctttagcccttctagcgattcgctgctctcatccactgaaagctcgccccagggatcaccagagcctctggtgctgcacgaggagactccccccaccacttcgagcgactcagaggaagaacaggaagatgaggaagaaatcgacgttgtgtccgtcgagaagcgtcaggcgcccggaaagcgctccgaaagcggcagcccatccgcgggaggccacagcaagcctccgcactcaccgttggtgctgaagcgctgtcacgttagcacgcaccagcacaactacgccgcgccaccgtcgacccgaaaggattacccagccgcgaaacgcgtgaaattggacagcgtgcgggtgctgcgccagatctccaataaccgcaagtgcacttcaccacggtcatccgataccgaggaaaatgtgaagcgccggactcacaacgtcctggaaaggcagcgcagaaatgaactcaagcgcagcttcttcgcactccgcgatcagatcccagagctggagaataacgagaaagcgcctaaggtcgtcatcctgaaaaaagcaaccgcctacatcctgtccgtccaggccgaggaacaaaaactcatctcggaggaggacctcctccgcaagcggcgggagcagctgaaacataagctcgaacaactccgcaactcatgcgcg

SEQ ID NO: 128899 - DNA, 1317 bp, Artificial Sequence
  derived and/or modified sequence
atgccgcttaatgtttcgtttacgaaccgcaactatgaccttgactacgactctgtccagccgtacttctactgcgatgaggaagaaaacttctatcagcagcaacagcagtctgagctccagccacccgcccccagtgaggacatttggaaaaagtttgagctgcttccaacccctcccctaagtccctcgaggcgtagcggactgtgttctccgtcctatgtggctgtcactccattcagtctacggggcgataatgatgggggcggcggatctttctcgaccgccgaccagctggagatggtgaccgagttgctaggtggtgatatggtcaaccaatcattcatctgcgaccccgatgacgaaaccttcatcaagaacatcattatccaagactgtatgtggagcggtttctccgctgctgcaaagctcgtttccgaaaaattggcttcttaccaggctgcccgaaaggactccggctcccctaaccccgctcgtggtcattcggtgtgttctacttcctctttgtacctccaggacttgtctgccgcggcatctgagtgcatcgatcccagcgtggttttcccgtaccctctgaacgattctagcagccccaaatcctgcgcgtcgcaagactcatccgcgttctctccctcctcagacagcctgctctccagcaccgagtcgtcgccccaaggttcgcccgagcccctcgtattgcatgaagagacaccccccaccacctcctcagattccgaggaggagcaagaggacgaagaggaaattgacgtggtgagcgttgagaagcgccaggcgcctggtaagcggtctgagtcgggctcccctagcgctgggggtcattccaagcccccccactcgcccctcgtgttgaaacgctgccatgtttccacccaccagcacaactacgccgcgcctccttccaccagaaaagattacccggccgccaagcgtgtcaagctggactccgtgcgggtgctccgacagatttccaataaccgcaagtgcacttccccacgttcctctgacaccgaagaaaacgtgaagcgccgcactcacaacgtcctggagagacaacggcgtaatgagctgaagcggtcgttctttgctctgcgtgatcagattccggagcttgagaacaacgagaaggcccctaaagtcgtgatcctcaagaaggccaccgcttatattctttccgtccaggccgaggagcaaaagctgatttcagaggaagatctccttcgcaagcgccgcgagcagctaaagcacaagctggaacaactccgcaactcttgcgct

SEQ ID NO: 128900 - DNA, 1317 bp, Artificial Sequence
  derived and/or modified sequence
atgccactgaacgtctcctttactaatcgaaattatgacctggactatgattccgtccagccttatttttactgcgatgaggaagaaaacttttatcagcaacagcaacagtccgagcttcagcctcccgccccgtccgaagatatatggaagaaatttgagctgctgcccaccccaccgctctcacccagcagacgctcagggctctgcagccctagttacgtggccgtgaccccgtttagtctgcgcggcgataatgacggcgggggcggatccttctcgacagctgatcagctcgagatggttacagagctcctgggcggggacatggtgaaccagtctttcatctgtgacccagacgatgagaccttcattaaaaacatcattatccaggactgcatgtggagcggctttagcgccgctgccaagttagtcagcgagaagctggcctcctaccaggcagcacgcaaagatagtggctcccccaatcccgctagaggtcattccgtttgttctacctcctcactctatctgcaggacctaagcgcagcggcttctgagtgcattgaccccagtgtcgtgttcccttatccactgaatgactcctcttcccctaagtcatgtgcgtctcaagattcctccgctttctcaccatcttcagactctctcctctccagcaccgagagttcaccacaggggagtcccgaaccattagtgctgcacgaagaaacacctccaacgacctcctctgattctgaagaggagcaggaagatgaagaggagattgacgtagtgtctgtggaaaaacggcaggctcctggcaagaggtctgagagcggttcaccttctgcaggcggccactctaagcccccgcactcacctctcgtcttgaagcgatgccacgtgagcactcaccagcacaattatgctgccccgccttctacccggaaggactacccagccgccaaaagggttaagctggacagcgttcgggtgctgcgccagatttcaaataaccggaagtgtaccagtccccgatcttccgataccgaggaaaatgtgaagcgccgtacacataatgtcttagagcggcagcgccgcaacgagctaaagcgctccttctttgccctgcgcgaccagattcccgaactcgagaataacgagaaggcacctaaagtcgtcatcctgaaaaaggccacagcctatatattgagtgtccaggctgaggagcagaaacttatctcggaagaggatttactgagaaagaggcgggaacagctgaagcataagcttgagcagctgcgcaactcctgtgca

SEQ ID NO: 128901 - DNA, 1317 bp, Artificial Sequence
  derived and/or modified sequence
atgccacttaacgtgtcctttaccaatcggaattacgatctggattatgatagcgtgcagccctacttctattgtgacgaggaggaaaacttctatcagcaacagcaacagtccgaacttcaacctcctgctccatcagaagatatctggaaaaagtttgaactgttgcccaccccaccactttcaccatcacgtcggtcgggcctttgtagcccttcgtacgtggcggtgacccctttttcgctgagaggtgacaatgatggcggcggcgggtcgttttctaccgcagaccagcttgagatggtgaccgaacttctgggcggagatatggtcaatcagagcttcatttgcgatccagatgatgaaactttcatcaagaacatcataatacaagactgtatgtggtcagggttttccgccgccgcaaaactcgtgtccgaaaagctcgcaagctaccaggctgccaggaaggacagcggcagccctaatccggcccgagggcatagcgtctgttccacctcatccctctatcttcaggatctgtccgcggcagcgtccgaatgtattgacccttcggtggtgtttccctaccctttgaacgactcttcctcccctaagtcctgtgctagccaagacagctcggcgttctctccttcctcagattcgctgctcagcagcactgaaagctccccccaaggttccccagaaccactggtactccatgaagagactcctcctactactagctcggactcggaggaagaacaggaagatgaagaagaaattgatgtcgtgtcggtggagaaacggcaagcaccaggaaaaagatcggaatccggatcaccatcggctggaggtcactcgaagccgccacactccccacttgtcctgaagcggtgccatgtgagcacccatcagcacaactacgcagcaccccccagcactcgcaaggattacccagccgccaagcgggtgaagctggacagcgtccgagttcttcgccaaatctctaacaacagaaagtgtactagccccaggagctcagataccgaagagaacgtcaaacgaagaacccacaatgtcctggagagacagagaagaaatgagttgaaacgcagcttttttgcacttcgcgatcaaatacccgagcttgaaaacaacgaaaaggcacctaaagtggtcatattgaagaaagcgactgcgtacatcctctcggtccaagcagaggagcaaaagctcatcagcgaggaggaccttctcaggaagagacgggaacagcttaaacataaactcgaacaactcaggaacagttgtgca

SEQ ID NO: 128902 - DNA, 1317 bp, Artificial Sequence
  derived and/or modified sequence
atgcctctgaacgtgtcgttcaccaataggaattatgaccttgactacgacagtgtccagccatatttttactgcgatgaggaggaaaacttctatcagcagcagcagcagtcagaacttcaaccaccagctccaagcgaggacatttggaagaagtttgagttgctgcctacacctcctctcagtccatcaaggcggtcggggctgtgtagcccttcatacgtggcagtaacacccttcagcctcaggggggataatgatggaggaggtggttctttttctacggcggatcaactggaaatggtcaccgagctacttggcggagatatggtgaatcagtcattcatatgcgacccagatgacgagacttttattaaaaacatcatcattcaggattgcatgtggagtggtttctctgcagcggccaagctggtgtcagagaagctggctagctaccaagccgcgaggaaagacagcggttcacctaacccggcacgaggccactcagtgtgcagcacttcttcgctgtacctccaggacctttccgcagcggcgagcgagtgtatcgacccttccgtggtcttcccttaccctcttaacgactctagtagccctaaatcctgcgcctcgcaggactcttctgccttcagtccgtcttctgactccctcttgtcttctacggaaagctcaccccaagggtcccccgagcccctagtgctacacgaggagactcccccgaccaccagttctgatagcgaggaagagcaagaggacgaagaggagatcgacgtggttagcgttgagaagaggcaggctcctgggaagcgatcggaaagcgggtctcctagcgccggcggacattcaaagccaccccatagcccgctggtacttaagaggtgtcacgtttccactcatcagcataactacgcagctccacctagcacccgcaaggattatcctgctgctaaaagggtgaagctggattctgtacgggtgttgcggcagatatccaacaacagaaagtgtacaagccctagaagcagcgacaccgaagagaatgtgaagaggcgcacacacaacgtacttgaacggcagcggaggaatgaacttaaacgctcctttttcgctctgagagaccaaatccccgagctggaaaacaatgaaaaggctcctaaagttgtaattctaaaaaaggcaacagcttatatcctttctgtccaggcggaggagcagaagctgatttctgaggaggatctgttgcgcaagaggagagaacaactgaaacataaactggagcagctgcgtaattcttgtgct

SEQ ID NO: 128903 - DNA, 1317 bp, Artificial Sequence
  derived and/or modified sequence
atgccacttaacgtgtcctttaccaatagaaactacgatcttgactacgactcagtgcagccatacttctactgtgacgaggaagaaaacttctaccaacagcaacagcagtcggaactccaacctcctgcgccatccgaagatatctggaagaaattcgagctcctcccaactcctcccctttcgcctagcaggagatcgggactgtgtagcccctcatatgtggcagtcactccattttcgcttagaggggacaacgacggaggaggcggatctttctccaccgccgaccagcttgagatggtgactgaactgttgggtggggatatggtcaaccagagcttcatctgcgaccccgatgacgaaacctttatcaagaacattatcattcaagattgtatgtggtcaggttttagcgccgcagcaaagctggtgtcagagaaacttgcaagctaccaggcagcgagaaaggacagcggatcgccaaatccagctaggggtcattccgtgtgttcaacttcgagcctctaccttcaagacctttcagcagcggcatccgaatgcatcgacccttctgtggttttcccttaccccctgaacgattcctctagccctaaatcctgcgcaagccaagactcctccgctttttcgccttcgtcagactcgctgctgagctcaaccgaatcctccccccagggatctcccgagcctcttgtgctgcatgaagaaaccccacctaccactagttccgactcagaggaggagcaggaggacgaggaagagattgacgtagtgtccgtggaaaagaggcaagctcccgggaaaaggagcgagtcgggatcgccatcagcgggtggccacagtaaacctccacactcgcctctggtcttgaaaagatgtcatgtgtcgacccatcagcacaattacgcggcacctccttccacccgcaaggactacccagcagccaaacgtgttaagctggattccgttcgggtgctccgccaaatatcgaacaaccggaagtgtacttcaccaagatcctcggataccgaagaaaacgtcaagagacgcacccacaacgtcctggagaggcagcggcgaaatgaactgaagcgctccttctttgcacttcgagatcaaattcctgaactggagaacaacgaaaaggcgcctaaggtggtcatactcaagaaggccactgcatacatcctcagcgtgcaggctgaagaacagaagctcattagcgaggaggatttgttgaggaaacgacgcgaacaacttaagcataagctggaacagctgagaaacagctgtgcg

SEQ ID NO: 128904 - DNA, 1317 bp, Artificial Sequence
  derived and/or modified sequence
atgccactgaacgtctcctttactaacagaaactatgatctggactacgacagcgtgcagccatatttctattgtgacgaggaggagaacttttatcaacaacagcaacaaagcgaactgcagccccccgcccctagtgaggacatatggaaaaagtttgagctgctccctacaccacctctgtctcctagcaggagaagcggcttatgtagcccatcttacgtggctgttaccccatttagcctcagaggtgacaatgacggcggcggcggctctttctctaccgcagatcagctggagatggtcacagaactgctcggtggcgacatggtcaaccagagctttatttgtgacccagatgatgaaaccttcatcaagaacattattatccaggactgtatgtggagcgggtttagtgcagccgccaagctcgtgagcgagaagctcgcttcctaccaggccgccaggaaagatagcggcagccccaacccagcccggggacattcagtgtgtagcaccagttctctatatttacaggacctcagcgcagctgcctccgagtgcatagacccatctgtcgtttttccctacccattgaatgacagctcaagccctaagagttgcgcttctcaggattcaagcgctttcagtccctcttcagactccttgctgtcatccacagaatctagtcctcaggggagccctgaaccactggtgctccacgaggagacccctccaactaccagttccgactctgaagaagagcaggaagacgaagaagagatagatgtggttagcgtggaaaaacggcaagccccaggcaagcgtagcgaatcaggttcccccagtgctggaggtcatagcaagcccccacattcacccctggtgctaaaacgatgccatgttagcactcaccaacataattatgccgcccctcccagtacccgaaaggattatcctgcagctaagagagtcaaattagatagcgtccgggtgctcagacagatatctaacaatcggaagtgtacaagcccccggagttctgataccgaggagaacgtgaagagacgtacacataatgttctagagcgtcagcggaggaacgaactcaaaagatcatttttcgctctgcgggaccaaatccctgagcttgaaaacaatgagaaagcacccaaggtggtcattcttaagaaagccaccgcctatattctgtccgttcaggccgaggaacaaaaactgatcagtgaagaagacctattgcgcaaaagacgcgaacagctgaaacacaagctggagcagctgcgaaactcatgtgca

SEQ ID NO: 128905 - DNA, 1317 bp, Artificial Sequence
  derived and/or modified sequence
atgcctctcaacgtgtcgtttactaatcgtaactacgatctcgattacgattcggtgcagccatacttttactgtgatgaggaagagaacttttaccagcaacagcaacaaagcgaactgcagcccccagcgccatcagaagatatatggaaaaagtttgaactgcttcctacgcccccactgtccccatccagacgctccggtctttgttccccttcgtacgtggcagtgaccccattctcgctgcggggcgacaatgatggaggcggaggttccttctcgaccgccgatcagcttgagatggtgactgaacttctggggggagatatggtgaatcaatctttcatatgtgatccagatgatgaaacttttatcaagaacatcattatccaagattgtatgtggtcaggattttcggcggcagccaagctcgtgtcggagaagctggcctcataccaagcggcccggaaggattcgggatcgcccaaccctgcgcgtggtcatagcgtgtgctcaacctcatctctgtacctccaggatcttagcgccgcagcatccgaatgtattgacccttcagtcgtgtttccctaccccctgaatgattcctcctcaccaaaatcgtgtgcctcccaggattccagcgcattttcgccgtcctcagatagcctgctgtcatcgacggaatcgtcacctcagggctcccctgagccactcgtccttcacgaagaaacccctccaactacttcgtcggattcggaagaggagcaagaggacgaggaggaaatcgatgtcgtgagcgtggaaaagaggcaggcaccaggaaagcgttcggaatctggatcgccgtccgcagggggccactccaagccgccacactcaccactcgtgttgaagagatgtcatgtgtcgacccatcagcacaactacgctgcacccccctcgaccagaaaggattacccggcagcaaagagagtcaaacttgacagcgtccgcgtgcttcgccaaatatccaataacagaaagtgtacctcacctcggtcctcagacaccgaagagaatgtcaagagaagaactcacaacgtgcttgagagacagcggagaaacgaacttaaacggtccttttttgctctgcgcgaccagataccggaacttgaaaacaatgagaaggcgcctaaagtcgtgatacttaagaaggcgactgcatacattctgtccgtccaggcagaagagcaaaagctgatttccgaggaagatctcctgagaaagcgaagggaacaactgaagcataaacttgaacaactcagaaacagctgtgca

SEQ ID NO: 128906 - DNA, 1317 bp, Artificial Sequence
  derived and/or modified sequence
atgcctcttaatgtctcattcaccaaccgtaactacgaccttgattacgatagcgtgcagccttacttttactgcgatgaggaagaaaacttttaccagcaacaacagcaatcggaactgcagccaccagcaccttcagaggacatctggaagaagtttgaacttctgccaactcctcctctcagcccctcaagaagatcaggattgtgttcgccttcgtacgtggcggtcaccccattttcccttcgaggagataatgacggtggcggaggatccttttcaaccgcggaccaacttgaaatggtcactgagctgttgggtggagatatggtgaaccaatccttcatttgcgaccccgacgatgagacgttcatcaaaaacattatcatccaagattgtatgtggtcaggattttctgcagccgctaaacttgtgagcgagaaactcgcaagctaccaagcagcccgcaaagattcgggaagccccaatccagcaagaggtcattcggtgtgttcaacttcatccttgtacctgcaggatctttcggccgcagcgagcgagtgtatcgacccatcggtggtgtttccttaccctctcaatgactcctcgtcgcctaaatcatgcgcatcgcaagactccagcgcctttagcccatcctcagattcgctcctttcgtccaccgagagctcaccacaggggtcgccagagccccttgtgctgcatgaagaaactccgcctacgaccagcagcgattcagaagaagaacaagaggacgaagaagaaattgacgtggtatcggtggaaaagcgccaagcaccaggcaagcgatcagagagcgggtcgccgtcggcaggcggtcactccaagcctcctcattcgccgctcgtcctgaagagatgtcacgtgagcactcaccaacacaattacgcggcacctccttcaacccgaaaggactaccccgccgccaaaagagtgaaattggactccgtgcgcgtcctcagacagatttcaaacaacaggaagtgtacctccccaagatcaagcgatactgaagaaaacgttaaaagaagaacccataacgtgctggaacggcaacggcggaatgagctgaagaggtcgtttttcgcacttcgggatcaaattccagagcttgagaacaacgaaaaggccccgaaggtggtgattcttaagaaagcaactgcatatatcctgtcagtgcaggccgaagaacaaaagctgataagcgaagaagatctgcttagaaagcgccgagaacagcttaaacacaaacttgagcagttgaggaactcgtgtgcc

SEQ ID NO: 128907 - DNA, 1317 bp, Artificial Sequence
  derived and/or modified sequence
atgcctcttaatgtatcctttacgaaccgtaactacgatctggactacgattcggtgcagccttacttttactgtgatgaagaagagaatttctaccagcaacaacaacagtcggagcttcaaccacccgccccctcggaggacatttggaagaagttcgaactgcttcctaccccacctctctcgccatcccgccgatctgggctctgttcaccaagctacgtggcggtgactccattcagccttagaggagacaacgacggagggggcgggagcttttccaccgccgatcaacttgaaatggtgactgagcttctggggggagatatggtcaatcaatccttcatctgtgatcctgatgatgaaactttcatcaagaatatcatcattcaagattgtatgtggtcaggcttttctgcggcagcaaagctcgtgagcgaaaagctggcgtcgtaccaggcggcgaggaaggactcgggatcgccaaacccagccagagggcattccgtgtgctcaactagctcactgtaccttcaggatctgtccgcggcagcaagcgagtgcatcgaccctagcgtggtctttccttacccattgaatgattcctcaagcccaaaatcgtgcgccagccaggattcctctgccttttcaccaagctctgattcccttttgagctctaccgagtctagcccgcaggggtcacctgaaccacttgtcttgcatgaagaaactcctcctactacctcctccgatagcgaggaagaacaggaggacgaggaagaaatagacgtggtttcagtggaaaagaggcaagcacctgggaagcgaagcgaatcaggctcaccgtcggcgggtggtcattccaagccaccacactcgccactggtcttgaaaaggtgtcatgtgtccacgcaccagcacaactatgcagcccctccctcgacgcggaaggactaccctgccgcaaagcgggtcaaactcgactccgttcgcgtgcttaggcaaatttcaaacaatcgcaagtgtacttcgccgcgatcctccgacactgaggaaaatgtcaagcgcaggacccacaacgtgcttgaaagacagagacggaacgagctgaaaagatcgttttttgcgctgagagatcaaattcccgagctcgaaaacaacgagaaggcacccaaagtggtgattctcaagaaagcaaccgcatacattctctcagttcaagcagaggaacaaaagctcatatcggaagaagatctcctccgtaaacgtcgggagcaactgaaacataagctcgaacagcttagaaactcgtgtgcg

SEQ ID NO: 128908 - DNA, 1317 bp, Artificial Sequence
  derived and/or modified sequence
atgcctctgaatgtgagcttcaccaaccgcaattatgatttggattatgactccgtgcaaccatacttctattgcgatgaagaagagaatttctaccagcagcagcagcagtcagaattgcagcctccagctcccagcgaggacatatggaaaaagttcgagctcctgccgaccccccctctgagtcccagcagacggagtgggctttgcagcccctcctatgtagccgttaccccctttagtctgcgaggagataatgacggcggggggggcagtttttctactgcagaccaactagaaatggtgacggagcttctgggaggcgacatggtcaatcagagcttcatatgtgaccccgatgatgagacatttatcaagaacatcatcatccaagactgtatgtggtcaggcttcagtgctgccgccaagctcgtctccgagaaacttgctagctatcaggctgctcgaaaagattccggcagccctaatcctgcccgtggccattccgtttgtagcacatccagcctctacctgcaggatctctctgctgcagcctctgagtgcatcgacccatcggtcgtgttcccctaccccctaaatgacagcagctcacccaagtcctgtgcgtctcaggactctagcgcctttagtccttcttccgacagcctgctctcctcgaccgaatcatctcctcaggggtcaccagaacccctggtgctgcacgaggagacacccccaacaactagcagtgactctgaggaggagcaggaagatgaagaggagatcgacgttgtgtcagtggagaagagacaagctcctggaaagaggagtgagtcagggagcccttcagcgggggggcactccaaacctccacacagccctctggttctcaaacgctgccacgtgtctacgcatcagcataattatgctgcccccccttccacacggaaagactatcctgctgctaagcgagtgaagctagattccgtgcgggtcctccggcaaatttccaataataggaaatgcactagccccaggagtagcgataccgaagagaacgtgaagcgcagaacccacaatgtcttggagcggcaacgccgaaatgaactcaaacggtccttctttgctctgagggaccagattccagagctcgaaaacaatgaaaaagccccaaaagtcgtaatcctgaaaaaggctacagcttatatcctgtcggtgcaggccgaggagcagaagttgatatccgaggaagacctgctgaggaaaaggagggaacaactgaagcacaaattggaacagctgcggaatagttgtgct

SEQ ID NO: 128909 - DNA, 1317 bp, Artificial Sequence
  derived and/or modified sequence
atgccactgaatgtgagttttacaaatagaaattacgatttagattatgactctgtgcaaccatatttctactgcgacgaggaagaaaatttctaccaacagcagcagcagtccgagctccaacctcctgcaccctccgaagatatctggaagaagtttgagctgctgcccaccccgcctctgtccccttcccgccgctctggcctgtgctcccctagttacgtcgccgttacacccttttctctgcgcggggataatgacgggggggggggctccttctccacagccgatcaactggagatggtcaccgaattgctcggaggggacatggtgaaccagagttttatatgcgatccagatgacgagacgtttatcaaaaacatcataatccaggactgtatgtggtctgggttctccgcggccgcaaaactggtctccgaaaagttagcttcataccaggcggcgagaaaggatagtgggtctcctaaccccgctaggggccactccgtatgcagcacatcctcgctctatttgcaggacctttccgccgctgcttccgaatgtattgatccatctgttgtgttcccttacccacttaatgactcttccagtcctaaatcgtgcgcaagtcaggatagctccgctttttctcccagctccgattcactgttatctagcaccgaatcctccccacagggttccccagagccgctggtcttgcatgaggaaaccccacccaccaccagcagcgatagtgaggaggaacaagaggacgaggaggagattgacgtagtgtcggtagagaaacgccaggcacccggcaagcgctccgagtcaggaagccctagtgctggcgggcattcaaagcccccgcacagcccgttggtgctgaagaggtgtcacgtgtccacacaccagcacaactacgccgcaccccccagcacacgtaaagactacccagctgctaaaagggtcaagctggactccgtccgagtgcttaggcaaatttcgaacaatagaaagtgtacaagcccacggagttctgacaccgaagagaacgtcaagagacgtacccacaacgtgctggagagacagaggcggaacgaactgaagcgttcattcttcgcgctgagggaccagatacctgaattggagaacaacgagaaggctcctaaggtggtgatactcaagaaggccaccgcctacatcctctcggtgcaggctgaagagcagaagcttatcagtgaagaagaccttctgcggaagcgtcgcgaacagttgaaacataagcttgaacagcttagaaattcatgtgcc

SEQ ID NO: 128910 - DNA, 1317 bp, Artificial Sequence
  derived and/or modified sequence
atgcccttgaatgttagctttactaatcgcaattacgacctggactacgactccgttcaaccctacttttactgtgacgaggaggaaaacttttaccaacaacagcagcaatcggaactccaacccccagcaccttcagaagatatttggaagaagtttgaacttctgccgactccgccgctgtccccttcgagacgttccgggctttgctcgccttcttacgtggcagtcacccccttttcacttcggggcgataacgatggaggcggtggatccttttcgaccgcggatcagttggaaatggtgaccgaacttctcgggggtgatatggtgaaccagtcattcatatgtgatccagacgatgaaaccttcatcaagaacatcatcatccaggactgtatgtggagcggattcagcgcagccgcgaaacttgtcagcgaaaagttggcaagctatcaagcagcgagaaaggattcggggagccctaacccagctcgcggacatagcgtctgttcaacctcgagcctctaccttcaagatctgagcgctgcggcatccgagtgtatcgatccatcagtggttttcccttaccctcttaatgattcctcgagccccaagtcgtgcgcaagccaagatagctcggcattctcaccttcaagcgactccctgctgtcctcgaccgagtcatcgcctcagggctcccctgaaccgttggtcctgcatgaggaaactcctcccactacctcatcggacagcgaggaagaacaagaggatgaagaagaaattgatgtggtgtcagtggaaaagagacaggcacccggcaaacgcagcgagtccggttctccatcagcaggtggacattcaaagcccccacactcgccattggtgcttaaaagatgtcacgtctcaacccatcaacataactacgcagcaccaccttcgacgaggaaggactacccagcagccaagagagtgaaactcgattcggttcgcgtgctcagacagatttcgaacaatcgcaaatgcactagccctaggtcatcggacactgaggaaaacgtgaaacgaagaacgcacaacgtgctggagcgacaacggcgtaacgagctgaagcggtcgttttttgcactccgagatcaaatacctgaattggaaaacaatgagaaggcgccaaaagtggtcatactcaaaaaggcaaccgcatatatcctgtcagtgcaggcagaagaacagaagctcatttctgaagaagatctgcttcgcaagcgaagggagcaacttaaacacaagctggagcagcttagaaattcgtgcgca

SEQ ID NO: 128911 - DNA, 1317 bp, Artificial Sequence
  derived and/or modified sequence
atgccgctgaacgtgtcattcactaaccggaattacgatctcgactacgactctgtgcaaccgtacttctactgtgacgaagaagagaatttctaccagcaacagcagcagtccgaacttcagccgcctgcaccctcagaggatatctggaagaagttcgagctgctcccaactccgccgctgagcccgtcgcggcggtcgggcctctgctcgccttcatacgtggccgtcaccccgttcagcctgagaggcgacaacgacggaggaggcggatccttctccactgccgaccaactggagatggtaactgaactgcttgggggagacatggtgaaccaatcgttcatctgcgacccagacgacgagacttttatcaagaacatcataatccaagactgtatgtggagcgggttttccgctgcggccaagctggtgtcggagaaactggcgtcctatcaggctgcccgaaaggactccggatcaccgaacccagcgcggggacactcagtgtgctcgacttcctcgctctacctgcaggatctctcggcggccgcaagcgagtgtattgatccttccgtggtgttcccgtaccccttgaacgatagctcgtcgccgaaatcatgcgcttcccaagattcaagcgccttctcaccgtcgtcagattccttgttgagcagcaccgagagttcgccgcagggatcaccagaaccactggtgctgcacgaggaaactccgccaactacctcgtccgattccgaggaggagcaggaagatgaggaagagatcgacgtggtcagcgtggagaagcgtcaggcaccagggaagcgctcagaatcgggttcaccatccgcgggcggccactctaaaccgcctcactctccccttgtcctcaagaggtgccatgtctccacgcaccagcacaactacgccgccccgccaagcactcgcaaagactacccggccgccaaaagagtgaagctggattcggtgagagtcctccgtcagatttccaataaccgcaagtgcactagcccacgctcctccgataccgaggaaaatgtgaagcgcagaacccacaacgtgctcgagcgacaacgccgaaacgaacttaaacgctccttcttcgccctgagggaccaaattccagaactcgaaaacaacgaaaaagcgcctaaggtggtgatcctgaagaaggctaccgcttacatcctctcggtgcaggctgaggaacagaaactcattagcgaagaggacctgctgaggaaaagacgtgagcagttgaagcataagctggaacagctgaggaattcatgcgcg

SEQ ID NO: 128912 - DNA, 1317 bp, Artificial Sequence
  derived and/or modified sequence
atgcccttaaacgtgtcttttactaaccgtaattacgaccttgactacgattccgtacagccttacttttactgcgacgaagaagagaatttctaccagcagcagcagcagtccgaactgcagccgcctgctccatcagaggatatttggaaaaagttcgagttgttgccaaccccccccctctcgcccagcagaaggtctggcctatgcagtccatcctatgtggccgtgactcccttcagcttgaggggcgataacgatggcggagggggaagcttttctaccgctgaccagctcgagatggtgaccgagctgctgggcggagatatggtgaaccagagcttcatctgcgatcccgacgacgagacgttcatcaaaaacataattatacaggactgcatgtggtcaggattttctgccgcggcgaaacttgtctccgaaaaacttgccagctatcaggctgcacggaaggattccggaagtcccaatccagctcgggggcatagtgtgtgcagcacgagctctctctacctgcaagatctgagtgccgccgcctccgagtgcatcgacccttctgtagtattcccctacccactgaatgattctagtagccctaagtcttgtgctagtcaagatagttccgccttctctcctagcagcgactccttactcagtagtacggaaagctcaccacagggctccccagaaccgctcgtcctgcatgaagagacccctccgacaacaagctcagacagtgaggaggagcaggaggatgaggaagaaatcgacgtcgtctctgtcgagaagcgccaggcgcccgggaaacgaagcgaatctggatctccatccgccggtgggcacagcaagcctccccactcacctttggtcctgaagaggtgtcatgtctccactcaccagcacaactatgccgcgcctccatctaccagaaaagattacccagcagccaagcgagtcaagctggactccgtcagagtgctgcgacaaatttccaataaccgaaagtgtactagcccccgctccagcgacacagaggagaatgtaaaaaggagaacgcacaacgtgttggaaagacaaagacgaaatgagttgaagcgatctttcttcgcacttagagatcagattccggagttggaaaataacgaaaaagctcccaaagtggtaatcttaaaaaaggcaaccgcatacattctaagtgtgcaggccgaagagcagaagcttattagcgaggaagacttgcttaggaaacgacgagagcagctgaagcacaaacttgaacaactcaggaactcgtgtgca

SEQ ID NO: 128913 - DNA, 1317 bp, Artificial Sequence
  derived and/or modified sequence
atgccactgaacgtgtcattcactaaccgcaactacgacttggattacgattccgtgcagccgtacttctactgtgacgaggaggaaaacttttaccaacagcaacagcaatcagagttgcagcctccggccccatcggaggatatctggaaaaagtttgagctgctgccgactccgccccttagcccttcacgccgctcagggctctgctccccgtcatacgtggcggtgaccccgttcagcctccgcggggacaacgacgggggtggaggctcgttcagcactgctgaccaacttgaaatggtcaccgaactgctcggaggagatatggtgaatcagtcgtttatctgtgatccggacgatgaaaccttcatcaagaacatcatcatccaagattgcatgtggagcggcttctcggccgcagcaaaacttgtgtcggaaaagctggctagctaccaggcggcacggaaagactctggaagcccaaacccagctcggggacactcagtgtgttccactagtagcctgtacttgcaggacctctcggccgccgccagcgaatgtatagatcctagcgtggtctttccgtaccccctgaacgactcttcgagtcctaagagctgcgccagccaagactcgtccgcgttttcgccgtcgtccgacagcctgctctcttcgaccgaaagcagcccacaggggtcccctgagccactcgtcctccacgaagaaaccccgcccactacttcctccgattcggaagaggagcaggaggacgaagaggagatcgatgttgtctcggtggaaaagaggcaggcccctggcaagcggtcggagtccggatcgcctagcgcgggcggacacagcaagcccccacatagcccactggtcctcaaaagatgccatgtgtccacccaccaacacaattacgctgcacctccgtcgacccgcaaagactaccctgccgcaaagcgcgtcaagctcgattcggtgcgcgtccttcgccagatctcaaataaccggaaatgtacttcacctagaagctcggacactgaagaaaacgtcaagcgtagaactcataacgttctggagagacagcgccgcaacgaactgaagcggtcattctttgccctgcgtgaccaaatcccggaactggagaataatgagaaggctcctaaagtggtgattctcaaaaaggcgactgcatatatcctgtcagtgcaagcggaagaacagaaacttattagcgaagaggacttgctgcggaaacgcagagagcagctcaagcacaaactcgagcagctccggaacagctgtgcg

SEQ ID NO: 128914 - DNA, 1317 bp, Artificial Sequence
  derived and/or modified sequence
atgccactcaacgtgtccttcaccaaccggaactacgacctggactacgactcggttcagccctatttctattgcgatgaggaagagaacttttaccagcaacagcagcagtcggagctccaacctccagccccttcagaggacatctggaagaagtttgagttgctcccgactccgccgttgtcgccctcgcgcaggagcggactgtgttcgccatcatacgtcgcggtcaccccgttttccctccgcggagataacgatggaggcgggggatccttctccaccgccgaccagctggagatggtgaccgagctcttgggcggagacatggtgaatcaatcgttcatctgcgacccggacgacgaaaccttcatcaagaatatcatcatccaggactgcatgtggtccggattctccgccgcagccaaactcgtctccgaaaaactggcgtcgtaccaggccgcgcggaaagatagcggttccccgaaccccgcgcgaggccactccgtgtgctcgacctcgtcactgtacctccaagacttgagcgcggccgccagcgagtgtatcgacccctcggtcgtctttccatacccactgaatgactcgtcatccccgaagtcatgcgcttcacaagattcaagcgcattctcaccctcgtcagactccttgctcagcagcactgaatcatcgccacaaggatcgccggaaccgctggtgctgcatgaagaaactcctccgacgacttccagcgatagcgaagaggaacaagaagatgaagaggaaatcgacgtggtgtcagtcgagaaacgccaggcaccgggcaagaggagcgagtcaggatcgccctccgctggagggcattcgaagcctccgcactccccgctggtcctgaaacgctgccacgtgtcgactcatcagcacaactacgccgcaccccctagcaccagaaaggactaccctgccgccaagcgggtgaagctggatagcgttagagtgctgcgccagatctcgaataaccgcaagtgcacctccccgcgctctagcgatactgaagaaaatgtgaagcgaagaacgcataacgtgctggaacgccagcgcagaaacgaactgaagcgttcctttttcgccctgcgtgaccagattcccgagctggagaataatgagaaagctcccaaggttgtcatcttgaagaaggcgaccgcctacatcctgtcggtgcaagccgaggaacaaaaacttataagcgaggaagatcttctgagaaagagacgcgaacaactgaagcacaagctggaacaactgcggaactcctgtgcc

SEQ ID NO: 128915 - DNA, 1317 bp, Artificial Sequence
  derived and/or modified sequence
atgcctctcaacgtgagtttcacgaaccgcaactacgacctggactatgactccgtccaaccgtacttttattgcgacgaggaggaaaacttttaccaacagcagcagcagtcggagctgcaacccccggcaccatcggaggacatatggaagaagttcgaacttctgcccacgccgcctctctcgcccagcaggcgtagtggactgtgctccccatcctacgttgccgtgacccccttctccctgcgtggagacaatgatggaggtggtggatccttcagcacggctgatcaattggagatggtcactgagctcctgggcggagacatggtgaatcagagctttatctgcgatccagatgatgagaccttcattaagaatatcatcatccaggattgcatgtggagcggatttagcgctgcggctaaactggtgtcggaaaagttggcgtcctatcaagctgctcggaaagattcaggaagtccgaaccccgcccgtggacactccgtttgcagcacatcctccttgtacctgcaagacttgtctgcagcagcatccgagtgcatcgaccccagcgtcgtgtttccgtatcccctgaacgactccagtagtcccaagagctgcgcgagtcaggattcctccgcattttcgccgtcatcggattcactcttgagcagtaccgagtccagcccacagggcagccccgagccgctggtgctgcatgaggagacgccacctaccacctcctcagattctgaggaggaacaggaggatgaagaggagatagacgtggtgtctgtggagaaacgccaagcccccggaaagcggagtgaatccggaagtccgtccgctggaggacactcgaagcccccccacagccccttggtgctcaagcgctgccacgtttccacccaccagcataactatgccgcccccccttcaacgaggaaagattacccagccgccaaacgcgtgaagcttgacagcgtgcgcgtgctgcggcagatctcgaacaaccgtaagtgcacgtcaccccgctcatctgataccgaagagaacgtaaagagacggacacacaacgtgttggagcgacaacggcgtaacgagctgaagaggagtttcttcgctctgcgggatcagatcccggagctggagaataatgaaaaagcgccgaaagtggtgatcctgaagaaagccacggcttacattctgtcggtgcaggcggaggagcagaagttgatttccgaagaggatctactacgtaagcgtcgagaacagctaaagcacaaactggagcagctgcggaactcttgcgcg

SEQ ID NO: 128916 - DNA, 1317 bp, Artificial Sequence
  derived and/or modified sequence
atgccattgaatgtgtcctttaccaaccgcaattacgatttggactacgatagcgttcaaccttatttttactgcgacgaggaagagaatttctaccagcaacaacagcagtccgagctgcagcctccagcaccgtccgaggatatatggaagaagtttgaactgcttccgacaccgccattgagtccgagtcgcaggtcaggactgtgctctccatcttatgtggcagtgaccccgttctctttgaggggtgacaatgacggaggaggtggttctttcagcaccgcagatcaactggagatggtgactgaacttctgggcggtgacatggtcaaccagtccttcatctgcgatcctgacgatgaaacctttattaagaacattatcattcaggactgcatgtggtccggcttttccgcagcggctaaactggtctctgagaagctggcctcctaccaagcagcaagaaaggatagtggctctccaaaccccgcgcgcggacattctgtctgtagcacctctagcctctatctgcaagacctgagcgccgcagcgtcagagtgtatcgacccttctgttgtattcccttatcccctgaatgactcatcatcccccaagagctgcgcaagccaagactccagcgcattcagcccaagttcagatagtcttctgagcagcacagagtcttcaccgcaaggctcccccgagcctttggtgctccatgaggagacccctccaacgacgtcttcagactccgaagaagagcaggaggatgaggaggagattgacgtggttagtgtagagaaaaggcaggccccgggcaagaggagtgagtctggtagcccgtccgccggcggacacagcaaacctccccactccccactcgtgctgaagaggtgccacgtcagcactcaccagcataactacgcggccccaccctctacaaggaaagactatccggcagctaagcgcgtcaagctcgactccgttagggtgctgagacagattagtaacaatcgcaagtgtacctcaccaagaagttccgatactgaagagaatgtgaagcgcagaacccacaacgtgctcgaaagacaacgcaggaacgaattgaagcgctctttctttgccctcagggatcaaatcccagaacttgaaaacaacgagaaggcaccaaaggtggttatactcaagaaggccaccgcatacatactcagcgtgcaggcagaggagcagaagttgatcagcgaggaggatctgctcagaaaaaggagggagcagctgaaacacaagctcgaacagctgaggaattcctgcgct

SEQ ID NO: 128917 - DNA, 1317 bp, Artificial Sequence
  derived and/or modified sequence
atgccacttaacgtctccttcaccaatagaaattacgaccttgattatgattccgtgcaaccgtacttttactgtgatgaggaggaaaacttttaccagcagcaacagcaatctgagctgcaacctccagcaccttccgaagatatttggaaaaagtttgaactgctcccaactcctccgcttagccctagccggaggagcggactgtgctccccctcgtacgtggcggtgacgccattctcgcttagaggagataacgacggtgggggtggatcgttttcgaccgccgatcaattggaaatggtcacggaactccttggcggagatatggtaaaccaatccttcatttgtgatcctgatgatgagactttcataaagaatatcattatacaagattgtatgtggtccggcttttccgcagcggcaaagctggtgagcgagaagttggcatcgtaccaggccgcaaggaaggatagcggtagcccgaatcccgcacgcggccattcagtgtgctcaacctcatcactgtacttgcaggatctttctgcagcagcttcggaatgtatcgacccctctgtcgtatttccatacccattgaacgattcgtcgagccccaaatcgtgtgcatcgcaggacagcagcgcattttcaccttcatcggattcgctcctttcgtcaaccgaatcatccccacaaggatcgcctgagccgcttgtccttcatgaagagactccacctaccacttcgtctgactctgaggaagaacaagaagatgaagaagaaattgacgtggtgtccgtggaaaagcgccaagctccaggaaagaggtctgaatccggatcacctagcgccgggggccatagcaagcctccgcattcccctctggtcttgaaacggtgccacgtttccacccaccagcacaattacgcggcaccaccaagcacgcgcaaagattacccagcagccaagcgggtgaagctggactcggtgagagtgctcaggcaaatcagcaacaatcgaaaatgcacgtcgcctcggtcaagtgacaccgaggagaacgtcaagaggcggacccataacgtcctggagaggcagcgacgtaatgagcttaagagatcgttctttgcacttagagatcagattcccgaactggaaaacaacgaaaaggcacctaaagtcgtcattcttaagaaggcaactgcatacatcctctccgtccaagctgaagaacaaaagctcatatcggaggaagatctccttcgcaaaaggagagaacagctgaaacacaaactggaacaacttcgtaactcctgtgca

SEQ ID NO: 128918 - DNA, 1317 bp, Artificial Sequence
  derived and/or modified sequence
atgcccctcaatgtgagcttcaccaatagaaattacgatctagactacgattccgtccagccctacttctattgtgacgaagaagagaacttctatcagcagcagcaacagtccgagctccagcctcccgcaccatcagaggatatatggaagaagttcgaactgctcccaaccccccctctgagccccagtcgacgcagcggtctatgctcgccttcatatgtggcggtgaccccgttcagtctgcgaggcgacaatgacgggggaggtggttcattttctaccgcagatcagctggagatggtgactgagcttttagggggtgacatggttaaccagtctttcatttgtgaccccgatgatgaaacctttattaaaaatatcataatccaagattgcatgtggagcgggtttagcgcagctgcgaaactcgtgagcgagaagctagcatcgtatcaggctgcacggaaggatagtggctctcccaacccggctcgagggcacagcgtgtgcagtaccagttccctttacttgcaagacctgtcagccgcggctagcgagtgtatcgaccccagcgttgtcttcccttatccactcaatgacagttcatctcccaagtcgtgcgcttcacaggattccagcgcgttctctccaagcagcgattctcttctttccagtacagaatcttcacctcagggcagcccagagccccttgtcctgcatgaggagacgcctcccaccacctccagcgactcagaggaagagcaggaggacgaagaagagatcgacgtagtcagcgtagaaaaacgccaggcgccgggcaaaaggagtgagtcaggtagtccgtctgccggcggccatagtaaacccccacatagccccctggtcctgaagagatgccatgtaagtacccaccaacataattacgcggcccccccgagcactcggaaagactacccggctgcaaagcgtgtgaaactagattcagtacgtgttcttcgacaaatctccaacaacagaaagtgcacaagccctcgatcgtctgataccgaggaaaacgtcaagcgcaggacgcacaacgttttggaacgccagcgcaggaatgagcttaaaaggtccttctttgcgctacgagaccagattccagaactcgaaaataatgaaaaggcccctaaagtcgttatactgaaaaaggccaccgcttatattctgtccgtgcaggcggaagagcaaaagcttatcagcgaggaagacttgctgcgcaagaggcgggaacagcttaaacataagctcgagcagttgaggaatagctgcgcg

SEQ ID NO: 128919 - DNA, 1317 bp, Artificial Sequence
  derived and/or modified sequence
atgcctctgaacgtatcattcacaaatagaaactacgatctcgattacgacagcgtccagccgtacttttattgcgatgaagaagagaatttttatcagcagcaacagcaatcagagttgcagccgccggccccctcggaagatatatggaagaagtttgagctattgccaacaccccctctgtctccgtctcggcgatcaggtctctgttcaccatcttacgttgccgtcacgccttttagcctgcgcggcgataatgacgggggcggaggctcattcagcactgcagatcagcttgaaatggtcaccgaactcctcggaggcgacatggtcaatcagagctttatttgcgatcctgatgatgagacatttattaaaaacattatcattcaggactgcatgtggtcgggttttagcgcggcggcaaaactggttagcgaaaaattagcgtcttaccaagctgcccgaaaagattcgggctcacctaatcctgcgcggggtcacagcgtgtgttcgacttctagcctctatcttcaagacctgtcggccgccgcttccgagtgtatcgaccctagcgtggtttttccgtaccccttaaacgactcaagctcaccgaaatcatgcgcgtctcaggactctagcgccttttcaccttctagcgattcccttctttcctcaaccgagtcgtcaccgcaaggatctcctgaaccgctagtattgcacgaggaaacgccaccgacaacgagctcggactccgaggaagagcaggaagatgaggaagaaatagatgtcgtgagcgtcgagaagagacaagcgccgggtaaacgctcagagagtgggtccccctctgccggaggccattcaaagccgccgcatagtccgcttgtattaaagcgttgtcatgtgagcacgcatcaacacaattacgctgcccctccgtcaactcgtaaagactacccagctgccaaacgcgtgaaacttgattcagtacgcgtcctgagacagatcagtaacaatcggaagtgcacatctccgcgctctagtgatacggaggaaaatgtgaagcgccggacgcataatgttttagagcgtcaaagacgaaacgaacttaagcgttcgtttttcgctcttcgagatcagatcccggaactggagaacaacgagaaagcgccgaaagtcgtaatcctgaagaaagcaacagcgtacatcctctccgtccaagcagaggaacaaaaacttatatctgaagaggatttattacgcaaacgaagagaacagcttaagcataaacttgaacagttaagaaattcttgtgcg

SEQ ID NO: 128920 - DNA, 1317 bp, Artificial Sequence
  derived and/or modified sequence
atgcccctgaatgtgtcatttactaaccggaattacgatctggactacgactccgtgcagccatatttctattgtgatgaagaagagaacttttaccagcagcagcagcaaagtgagttacaaccacctgccccaagtgaggacatctggaaaaagttcgaactcctgccaacaccacctctttcacccagccggcgttctggactttgttcaccctcctacgtggccgtgactcccttttcactcagaggcgataacgatggcgggggaggctcattctctactgcagaccagcttgaaatggtgaccgagttactaggcggggacatggtgaaccagtcattcatctgcgacccggatgacgaaacctttatcaagaacatcatcattcaagattgcatgtggagcggtttctccgctgccgcgaagttagtgtcagagaagctggcaagctatcaggcagcccgcaaggattctggcagtccaaatcctgcccgtgggcactcggtttgctctaccagttcgctctaccttcaggatttgtccgccgccgcctcggaatgcattgaccctagcgtagtcttcccctacccactgaacgatagcagcagcccgaagtcatgtgccagccaggattcatccgcattctctccatccagcgatagcctcctatccagcacagagtcatctccccagggctcccctgagcctctagtgctgcatgaggaaacccctcctaccaccagctcggattccgaagaagagcaagaggacgaagaagaaatagatgtggtctctgtcgaaaagcggcaagcccccggcaaacgaagcgaaagcggatcaccatcagcgggcggtcactccaagccaccgcactcacccttggtgctgaaaaggtgtcatgtctctacccatcagcacaactacgctgcgcccccctctacaagaaaagattaccctgccgcaaagcgggtaaaactagatagtgtgagggttttacgccagatctccaataataggaagtgcacttccccacgcagcagtgacacagaggaaaatgtgaagcgacggacacataacgtgctggaacgtcagcgtcgcaacgagctcaaacgctcattctttgcgctgagggaccagattccagagctcgagaacaacgagaaagcccctaaggtggtcattttgaaaaaggccacagcatacatcctgagtgtccaggccgaagagcaaaaattgatctccgaagaagatctgctgagaaagcgtagagaacagcttaaacataagctcgagcagttgaggaattcctgtgca

SEQ ID NO: 128921 - DNA, 1317 bp, Artificial Sequence
  derived and/or modified sequence
atgccattgaacgtctcttttaccaatcgaaactacgatctcgattatgattcggtccagccttacttctattgcgatgaggaggagaacttctatcagcagcagcagcagtccgagctgcagccgcccgccccatctgaggatatttggaagaaatttgagcttctcccaactcccccactgagcccctctcggcgctccggactgtgcagccccagttatgtggccgtaacacccttttctttgcggggagacaacgacggcggcggcggcagtttttcaaccgccgaccagctagaaatggttaccgagctcctcgggggggacatggtcaaccagagcttcatttgtgacccagacgacgaaacctttatcaagaacatcatcatacaggattgtatgtggtctggcttcagtgctgcggccaagctagtgagcgagaaactcgcttcctatcaggcggcaaggaaagactccggctccccgaatcctgcgcgcgggcacagcgtgtgctccacaagctctctgtacttgcaggatctgtcggccgcagcttccgaatgtatagaccccagcgtggttttcccctaccctctgaacgacagtagctccccaaaaagttgtgccagccaggactccagtgcattctccccttccagcgactcactcttatcatccaccgagagctctccgcaggggtctcctgagcccctagtgttgcatgaagaaaccccgcccacaacttcttctgactcagaagaggagcaggaggatgaggaagagatcgacgtggtgagtgtcgaaaaacggcaggctcctggaaagcgtagtgaatcaggatccccgagcgccggaggccactcaaagccgccacactctcctttggtgttaaaacgctgtcacgtctccacccaccagcacaactacgccgcgccccccagcacccggaaagattatcccgcggcaaagcgagtgaaactggacagcgtccgtgtgctgaggcagatcagcaataacaggaaatgcacaagcccgcgctcaagtgacacagaggagaacgtaaagcgacgcacccacaacgtgttggagaggcagcgcagaaatgaactgaagcgtagcttcttcgcactgagggatcagatccccgaactcgaaaataacgagaaggcaccaaaagtcgtcatcctgaaaaaagccactgcctatattttgagcgtccaagcggaagagcagaagctaatttcagaggaagacttacttagaaagcgccgcgaacagctcaaacataaactggagcaacttaggaattcgtgcgcc

SEQ ID NO: 128922 - DNA, 1317 bp, Artificial Sequence
  derived and/or modified sequence
atgcccttgaatgtgtcctttacgaatagaaattacgatctggattacgactcggtgcagccttacttctactgcgatgaggaagagaatttctatcagcaacagcaacagtccgagttgcagccgcccgcgccctctgaggacatttggaaaaagtttgagctattgcccaccccaccattgagtccttctcgacggtccggactgtgcagtccctcatatgttgcggtgactcctttttcactccggggagataacgatggcgggggggggagcttttcaacagctgatcagttggaaatggtgactgaactgctgggtggcgacatggtgaatcagtccttcatctgtgatcctgatgacgagacctttattaaaaacatcatcatccaggactgcatgtggtcagggttcagtgctgcagccaagctggtctctgagaagttagcaagctatcaggcagctaggaaggactccgggtccccgaatcccgctagaggacactctgtctgctctacgtcttcactgtatttgcaggacctctctgccgccgcttcagaatgcatagaccccagcgtggtcttcccctatccactgaacgactcttcatcacccaagtcctgcgccagccaggattcatctgctttctccccctcctctgattccttgctctccagcactgagtctagtccccagggctcacctgaacccctggtgctccacgaggaaacaccacctactacctcatccgatagtgaggaggaacaggaagatgaggaggagattgacgtggtaagcgtcgaaaaacgacaggctcccgggaagcgttctgaatcaggcagcccctcagcaggtggccactcaaaacccccacatagtccacttgtgctcaaacggtgtcacgtgtctacacaccagcacaactacgcagcccccccttctactaggaaggattaccccgctgcgaaacgggtgaaactcgactctgtcagggttcttaggcagataagcaataatcgtaagtgtacatcccctaggagcagtgacaccgaagagaatgtaaagaggcggactcacaatgtgctggagagacaacgccgcaatgagctgaagcgtagcttttttgcattgagagaccagatccctgaactggaaaacaatgagaaagcccccaaggttgtcatcctcaagaaagcaaccgcctatatcttgtctgtgcaagctgaggagcagaagctaatctccgaagaagatctgctcaggaagcgcagagagcagctgaaacataagctggaacagcttaggaactcatgcgcc

SEQ ID NO: 128923 - DNA, 1317 bp, Artificial Sequence
  derived and/or modified sequence
atgccacttaatgttagcttcacgaaccggaactatgacctcgattatgactcagtgcagccgtatttttactgtgatgaggaggagaacttttaccagcagcaacagcagtctgaactgcaacccccagctcctagtgaggatatctggaagaagttcgagctcttgcccacaccaccgctctctccttcacgcagatcagggctttgtagccccagctatgtggcagttactcctttctctctgcggggggataatgacggcgggggaggaagcttttctacggctgaccaactcgagatggtcaccgagctcctggggggagatatggtgaaccagagcttcatttgtgacccagacgacgagacctttatcaaaaacatcataattcaggactgtatgtggtctggattttctgccgcagccaaattggtttctgagaagctagcctcctatcaggccgcgaggaaggattctggatctcctaatcctgccagagggcactccgtgtgttccacttcaagtctctatcttcaggacctgagtgccgccgcctcagaatgtatcgatccaagcgtggtatttccataccccctgaacgactccagctcacccaaatcatgcgcctcccaagactcctcagccttctccccctcaagcgacagtttactgtcttctaccgaatccagtccacaaggttctcccgaacccttagtccttcacgaagagacacccccaaccactagtagcgattcagaggaagagcaggaagacgaggaagagatcgacgtggtaagtgtggagaaaaggcaggcccctgggaagagatccgagagcggctctccatcagctgggggccattccaagcccccccacagccccctcgtgctgaagaggtgccatgtctccacccatcagcacaactatgctgccccaccttcaacacggaaggactaccccgccgccaagagggttaagctagattcggttcgcgttcttaggcagattagcaataatcggaagtgtaccagtcctcgatcaagcgatacagaggaaaatgtcaagcgcagaactcacaacgtccttgaaaggcagcggagaaatgaattgaagagaagcttcttcgccttgcgagatcaaatacctgagttagagaataacgagaaggcacctaaggtggtgattctcaagaaagctaccgcatacatcctaagtgtgcaggctgaggaacagaaacttatctcagaagaggacctactcaggaaacggcgggagcagctgaaacataaactggagcaacttcgcaactcgtgcgcc

SEQ ID NO: 128924 - DNA, 1317 bp, Artificial Sequence
  derived and/or modified sequence
atgccgcttaacgtctcattcaccaaccgcaactacgacctggattacgattctgtgcaaccatacttctactgcgacgaggaagaaaacttttaccagcagcagcaacagtcggaactccagccacctgcaccgagcgaagatatctggaagaagttcgagttgctcccgaccccgccgctgagcccatcacgcagaagtggactctgctcaccgtcatacgtggcagtgactcccttttcgctgcgcggagacaatgacgggggcggtggatccttctccactgcggaccagctggaaatggtcacggagttgctgggaggagacatggtgaaccaatcctttatctgcgatccggacgacgagacgttcataaagaacataatcatccaagactgcatgtggagcgggttctcggccgcggctaaattggtgtccgaaaagctcgcctcctaccaagctgccaggaaagactcgggatccccaaatcctgctcggggtcatagtgtgtgctcgacttcatcactgtatctgcaagacctctcagcggccgccagcgaatgtattgacccctcggtggtatttccttacccgctgaacgattcatccagtccgaaatcgtgtgcgtcacaagactcatctgccttctccccatcctccgactcactgctcagcagcactgaatcctcgccgcaggggagcccagaacccctcgtgctgcacgaagaaaccccacctacgacctcctccgattcggaagaggagcaggaggatgaggaggaaattgatgtggtgagcgttgaaaagcgccaggctccgggcaagcggtcagagtccggctctccgtccgcaggaggacactccaagcccccgcactccccgctcgtgctcaagcggtgtcatgtctctacccatcaacacaattatgcggcgccaccgtccacccgcaaagattaccctgctgcaaaacgagtgaaacttgactctgtgcgggtcctcaggcaaatctctaacaaccgcaagtgcacctcgcctagaagctcggacactgaggaaaatgttaagcgcaggactcataatgtgctggagcggcagcgtaggaacgagttgaagcggtctttcttcgcactgcgggatcagatcccagaactggaaaacaacgaaaaggcccccaaggtcgtgatcctgaaaaaggctaccgcttacatcctctcggtccaagccgaggagcagaagctgatctcggaggaggatctgctgaggaaaagacgcgaacagcttaagcacaagctggagcagctccgcaattcctgcgcg

SEQ ID NO: 128925 - DNA, 1317 bp, Artificial Sequence
  derived and/or modified sequence
atgccactaaatgtgtcctttacgaatagaaactatgatctggattacgattccgttcagccctacttctactgtgacgaagaagaaaacttttaccagcagcagcaacagtctgaactacagccacccgctccaagcgaggacatctggaagaagtttgagctgctgcccacacctcccctctccccaagccggaggagcgggctttgcagcccatcatacgtagctgtcactccgtttagcctgaggggcgacaacgacggaggagggggatcatttagtaccgccgatcagctcgaaatggtaacggagctgttaggtggggacatggttaatcagagctttatctgcgatcccgatgacgagacctttatcaaaaacataataattcaggactgcatgtggtctggcttcagcgctgccgcaaaactggtgagcgagaagctcgcctcgtatcaggccgcccgcaaagacagtgggtccccaaaccctgctcgtgggcactcagtgtgctcaacgagttccttatatctgcaggacctgagcgccgctgccagcgaatgcattgacccttccgttgtgttcccataccccctgaacgacagttccagtcccaagtcatgcgcctcccaggactcctccgcctttagcccgagcagtgacagcctgttgagcagtaccgagtcaagcccccagggaagtccagaacccctcgtacttcatgaggagacccctcctactacaagtagtgacagcgaggaagagcaggaagacgaggaagaaattgatgtagtgagtgttgaaaaaaggcaggctcccggtaaacggtccgaaagtgggtctccttctgctggcggacatagcaaacctcctcactctcccctggtccttaagcgctgtcacgtttccacacatcaacataattacgccgcgccccccagtaccaggaaagactacccggccgctaaacgggtgaagctggattccgtgcgcgtgctgcggcagatctccaacaataggaagtgtacatctcctcgatcttccgacactgaagagaacgttaaaaggcggacacataatgttttggaaagacagagaagaaatgagctgaagcgatctttcttcgccctccgggaccagatccctgagctagaaaataacgagaaggctccaaaagtggtcatcctgaaaaaagctaccgcctatatcttaagcgtgcaggccgaggaacagaagcttataagcgaggaagacttgctgaggaagcggcgtgaacagctgaagcacaagttggagcagctgcgcaactcatgtgcc

SEQ ID NO: 128926 - DNA, 1317 bp, Artificial Sequence
  derived and/or modified sequence
atgcctctgaacgtgtccttcaccaaccgcaattatgacctggattatgatagcgtacagccttacttttactgtgacgaggaagagaacttctaccagcagcagcaacagtccgagttacagccaccggcaccaagtgaggacatatggaaaaagtttgagctactgcccaccccacccttgagccctagtaggaggtccggcctgtgcagtccgtcctatgttgccgtcaccccatttagtctccgcggagataacgatggcggtgggggtagcttctcaacagctgatcagctagaaatggtcaccgagctgttggggggtgatatggtgaaccagtcattcatttgtgatcctgatgacgagacctttatcaaaaacatcatcattcaggactgtatgtggtctggcttctctgctgccgctaagctcgtatccgagaagcttgcctcttatcaggctgcaagaaaagattctggctcccccaacccagcacggggacactcagtgtgctcaacctccagcctataccttcaggatctctccgccgccgcctccgagtgcatcgatcccagcgtggttttcccttatccgttaaacgattctagttcccccaaaagctgcgcaagtcaggatagctctgccttttcgccaagttccgattcactgctgagcagtacagagtcttctccgcagggctctcccgaacctcttgtactgcacgaggagaccccacccaccaccagcagtgactctgaggaggagcaggaggacgaagaagaaatagacgtggtctccgtggagaaacggcaggcaccaggaaagagaagcgaatctggttcaccttctgccggtggtcattcaaagccacctcattccccactggtcctgaaaagatgtcacgtttccactcaccagcataactacgccgctccgcctagcactagaaaggactaccccgccgctaaaagggtcaagctcgacagcgtccgggttctgcgacaaatctctaacaacaggaagtgtacaagcccacgctcatctgacacagaagaaaacgtgaagaggcgcacacataacgtcttggagcgccagcggcgtaacgaacttaagcgtagctttttcgcactgcgcgatcaaatccctgagctcgaaaacaatgagaaggcccctaaagttgtcattctcaagaaagccacagcttatatattgagcgtccaggcagaggagcagaagctgatatctgaagaagacctgctgcgtaaacgacgcgagcagctcaagcacaagctggagcaactaagaaattcctgcgcc

SEQ ID NO: 128927 - DNA, 1317 bp, Artificial Sequence
  derived and/or modified sequence
atgcctttgaatgtttcatttaccaaccgcaattatgatctcgattacgacagcgtgcagccttacttttattgtgacgaggaggaaaatttttatcagcaacagcagcagtccgagctgcagcctccagcaccctccgaggatatatggaagaagttcgagctgttgcctacccctcctttatccccgtcacggagatccggtctatgctcccccagctacgtggcagtcaccccattctctcttaggggggacaatgacggagggggcggcagcttctcaactgcagatcagctcgagatggtgacggaactgctaggtggggatatggtgaaccagtccttcatttgtgatccggacgatgaaaccttcataaagaacatcatcatccaggattgcatgtggagtggtttttctgccgctgccaagctggtgtctgaaaaactcgcgagctaccaggccgcccggaaggactctggctcccccaatcccgctcgaggacattccgtctgtagcacctcttccctttatctacaagacctcagtgcagccgcctcagagtgtatcgacccctccgtcgtgttcccttaccctttgaacgactcctcaagtccgaaatcctgcgctagccaggactcctccgccttcagccccagctcggacagcttgctcagttccacagaaagctcaccccagggaagcccggagccactggtgctccacgaggaaacaccacccacaacctcttctgactcggaggaggagcaggaggatgaggaagagatcgatgtcgtctccgtcgagaaacgacaagcaccaggcaagcgatccgaatccggctctccttctgcaggggggcattcgaagcccccccactcccctttagtgctgaagaggtgccatgtttcaacacaccagcacaattatgctgccccaccaagcactcgaaaggactatccagctgcaaagcgggtaaagctggacagtgtaagggtcctcaggcagatctcgaataaccgcaagtgtacctcccccaggtcctccgacactgaagaaaacgtgaagcggcgaactcacaacgtcctcgagagacagcggaggaatgaactgaaaagaagtttttttgcactgagagaccagataccggaattagaaaataacgaaaaggcccccaaagtggtaatcctaaaaaaggccaccgcgtacattctaagtgtccaggctgaagagcagaagctgattagcgaagaggacctgcttcgtaaacgcagagaacagttgaaacacaagctggaacagctgagaaactcttgcgca

SEQ ID NO: 128928 - DNA, 1317 bp, Artificial Sequence
  derived and/or modified sequence
atgcctctgaatgtgtcctttactaataggaattatgatctggactacgactcggtacagccgtacttttattgtgacgaagaagaaaacttttaccagcagcagcagcagagtgagcttcagccgccagctcctagtgaggacatatggaaaaagttcgagctgcttcctacgcccccactaagcccttctcgacgaagcggtctgtgctctcctagctatgtggcggtcactcccttctcactccgtggagacaacgatgggggaggcggatccttctctacagccgaccagttggagatggttactgagctattgggcggggatatggtgaatcagtcttttatttgcgatcctgacgatgagactttcatcaagaacataataattcaggactgtatgtggagcggattttctgccgccgccaaactggtgtctgaaaagctcgcatcctaccaggctgcgcgcaaggattctggttctcccaatcctgcgagagggcatagcgtgtgcagcacaagctctctttatctgcaagacttaagcgccgccgcttcagaatgtattgatcccagtgtagtgttcccgtatcctctgaatgattcctcctcacctaaatcatgcgctagtcaagactcttctgcattttctccctcctctgactccttactgtcttctaccgagagcagtccacaggggtcccctgagccacttgtgttacatgaggaaacacccccaaccaccagctctgatagcgaggaggaacaagaagatgaggaggagatagatgtggtgtctgtcgagaaaagacaagcgcctggcaagcgttctgagtccggctcccctagtgccgggggccacagtaagcccccccactcaccattggtgctaaaacgatgccacgtctccacccaccaacataattacgcagcccctcctagtacacggaaagattatcccgcagccaagcgagttaagctggactcagtgcgggtgctgcgtcagatctccaacaacagaaaatgcacctcaccgagatcctcagacacagaggagaatgtaaagcgccgtacacacaacgtgctggaaagacagcgcagaaacgagctgaagcgatcattcttcgcattacgcgaccagataccggaacttgaaaataatgaaaaggctcctaaggtcgtcatcctaaaaaaggctaccgcctatattctgtccgtgcaagccgaggagcagaagctcatatccgaggaggacctgttacggaagcggcgggagcagctgaaacacaaactggagcagctgagaaatagttgtgca

SEQ ID NO: 128929 - DNA, 1317 bp, Artificial Sequence
  derived and/or modified sequence
atgccattgaacgtgagctttaccaacaggaactacgaccttgactacgatagcgttcaaccatacttttactgcgatgaagaagagaacttctaccagcaacagcaacagagcgagcttcagccccctgcgcccagcgaggatatctggaaaaagtttgagcttctcccgacgcctccactctcgccttcgcggagatcaggactttgttcacctagctacgtcgccgtgacgccattttcattgaggggggacaacgacgggggaggtggtagcttcagcactgctgaccagcttgaaatggtgaccgaactcctgggcggggatatggtgaatcagagcttcatatgcgaccctgatgatgaaactttcataaagaatatcataattcaagactgcatgtggtcgggattctcggcagctgcaaaacttgtctcagaaaagctcgcaagctatcaagccgcgcggaaggacagtgggtcgcctaatcctgcgcgtggccattcagtgtgttcaacttcctccctttacttgcaagatctgtccgcagccgcctcggagtgtatcgatccttcagtggtgtttccatatcccctgaacgatagttcgtcccctaagtcatgtgccagtcaagattcgtccgctttttccccctctagcgattcacttctgtcctccaccgaatcgagccctcagggatcgcctgaaccgttggtgctccatgaagaaaccccgcctactactagcagcgacagcgaggaggaacaggaagatgaggaggaaatagatgtcgtgtcggtggagaaacggcaagcaccaggtaagcggtcggaatcaggtagcccatccgcaggaggacattccaagccaccgcattccccacttgtgctgaagcgctgtcacgtgtccacccatcagcacaactacgccgccccaccgtccacccgaaaggattacccagctgcgaagagagtgaagctcgattccgtgcgagtcctgcgccaaattagcaataatcgtaaatgcacctctcctcggtcatccgacaccgaagagaacgtgaaacggcgcacccacaatgtacttgaacggcaaaggcgcaacgaactgaagagaagttttttcgcactgcgcgaccagatcccagaactggaaaacaacgagaaggcccccaaagtcgtgattctgaagaaggcaactgcttacattttgtcggtgcaggcggaagagcaaaagctcatttccgaagaggatctgcttagaaagagacgggagcaactgaagcacaaattggaacagcttagaaacagctgtgca

SEQ ID NO: 128930 - DNA, 1317 bp, Artificial Sequence
  derived and/or modified sequence
atgccgcttaacgtgtccttcactaacagaaactacgacctggattatgattctgtccagccgtacttctactgcgacgaggaggagaacttctaccagcagcaacagcaatccgagctgcaacctccagcgccatctgaagatatttggaagaagtttgaactgctgccgactccgcctctcagcccatcgcgccgctcgggcctctgctcaccgtcgtacgtggcggtgacccctttctcgctccggggagacaatgatggcggtggtggatcctttagcaccgcagatcagctggaaatggtgaccgagcttcttgggggagacatggtaaaccaatccttcatctgtgacccagacgatgaaacgttcatcaagaacatcatcatccaggactgcatgtggagcggtttctccgcggccgccaagctggtgtcagaaaaactggcctcctaccaggcagctcgcaaggattcgggatcccctaatccagcccggggacattcagtctgcagtacgtcatcgctgtacctccaggacttgtcggcggccgctagcgagtgcatcgaccccagtgtggtgttcccatatcctctcaacgatagctcgtcacccaagtcgtgtgcatcgcaagattcctcggcgttctctccctcctcggattctctcctttcctccactgagtcgtcgccacagggctcgcccgaacctctggtcctgcacgaggaaaccccaccgacgacttcgtcggactctgaagaagaacaagaagatgaggaagaaatcgacgtggtgtcggtggagaagcgccaagctccggggaagaggagcgaatcgggatcgccttcagccgggggccacagcaagccaccgcactcgccactggtgctcaaaagatgtcatgtgtccacccaccagcacaattacgcagccccgccttcgacgcgcaaagattacccggcagccaagcgggtcaaattggactcggtgagagtcctgcggcagatcagcaacaatcgaaagtgcacttcgcccagaagctccgacaccgaagaaaacgtgaaacggagaacccacaacgtcctggagcgacagcggcgaaacgaactgaagcggagcttcttcgccctgcgcgaccagatccctgaactcgagaacaatgagaaagccccgaaggtcgtgatcctcaagaaggccactgcctacatcctgtccgtgcaagccgaggaacaaaaactcatctcagaggaggatctcctccgaaaaaggcgcgaacaactcaagcataagctggagcaactcaggaattcgtgcgcg

SEQ ID NO: 128931 - DNA, 1317 bp, Artificial Sequence
  derived and/or modified sequence
atgccactcaacgtgtccttcactaatagaaattacgatcttgactacgattcggtgcagccttacttttactgtgacgaagaagagaacttctaccagcagcaacagcagagcgaactgcagccgcccgcaccttcagaagatatctggaagaagtttgagctccttcctactcccccgctgagcccttcgcggagatccggcctctgttcaccaagctacgtggcagtgactcctttctcattgcggggtgataatgatggaggcggtggatcttttagcactgcggaccagcttgaaatggtgactgagctcctggggggtgatatggtgaatcagtcattcatctgcgatcctgatgatgaaaccttcattaagaacatcataatccaagactgtatgtggtcaggattcagcgcggcggccaagctcgtctcggagaagctggcatcctaccaagcagcccggaaggactcaggatccccaaatccggcgagaggacattcggtgtgcagcacctcctcgctctatcttcaagatctgagtgcagccgcatcagaatgcattgacccatcggtggtgtttccgtatcctctcaatgactcaagctcgcccaaatcctgcgcatcccaagactcgtctgcattttccccttccagcgactcccttctttcgagcaccgagagctcaccccaggggtcaccagaaccactggttctccacgaagaaacgccccctactacttcttcagattcagaggaagagcaggaagatgaagaagaaattgatgtggtgtcggtcgaaaagaggcaggcaccagggaagcggagtgaaagcggatcgccttcagcaggaggccactccaagcctcctcattcgccccttgtcctgaaaagatgccatgtgagcacccatcaacataactacgcagcccctccttcgacccgcaaagattacccagcagctaagcgcgtgaaactggactccgtcagggtgttgagacagatctcaaacaacagaaagtgcaccagccctaggagctcggatactgaggaaaacgtgaagcgcaggacccacaacgtgctggagcgacaacggcggaacgaactgaaacgttcatttttcgccctccgtgaccaaattcccgagctcgaaaacaacgaaaaggcaccaaaggtcgtcattctcaaaaaagcaactgcatacattctgagcgtgcaggcagaggaacagaaactcatctccgaggaagatctgcttagaaagaggcgggaacagcttaagcataagctggaacaactgagaaactcctgcgca

SEQ ID NO: 128932 - DNA, 1317 bp, Artificial Sequence
  derived and/or modified sequence
atgcctctcaacgtgtcctttactaataggaattatgacttggactacgattctgtgcagccatacttctactgcgatgaggaagagaacttctaccagcaacagcaacagtctgaactccaacccccagctccttcagaggacatctggaagaagttcgagctcctgccgactcccccgctgtcgccaagccgtaggtcaggactttgcagcccatcgtacgtagcagtgacgccgttctccctgcgcggggacaatgatgggggcggaggcagtttttcaaccgctgaccagttggagatggtgaccgaactgctcggaggagatatggtcaaccaaagtttcatctgcgatccggacgatgagactttcatcaagaacatcattatccaggattgcatgtggtcaggattttccgcggcggctaagctcgtgagtgagaaactggctagctaccaggcggcgcggaaggactcgggatcccccaatccagcgcgcggacactcagtctgttcgacgagctcattgtatctgcaagacctttccgccgccgcatcggagtgcattgatccctcggtggtttttccgtacccgctgaacgactcgtcctcaccaaagagctgcgcttcccaggactcgtcggccttcagtccgtcgtctgactcgctgctgtcatccacggaatcaagcccccaagggtcccctgaaccgctggtcctgcatgaagaaactccccctaccacttccagcgactcggaagaggaacaagaagatgaagaggaaattgacgtggtgtccgtggaaaagaggcaggctccgggtaagcgatccgagtcaggtagcccttccgcaggcggtcactccaagccgccccactccccgctcgttctgaaacgctgtcatgtgagcacccatcagcataactacgcagcaccgccctcgactagaaaggactacccagccgcaaagagggtcaaactggattcggtgagagtgctccgccaaatctctaacaaccgcaagtgtacttcgcctcgctcgtccgatacggaggaaaatgtgaagcggagaactcacaatgtcctcgagcggcaaagacgcaatgaactgaaaaggtcattcttcgcgctgcgggaccagatccccgagctcgaaaacaatgaaaaggcgcctaaagtcgtgatcttgaagaaggcaaccgcctacatcttgtccgtgcaggcagaggaacagaaactcatcagcgaagaggatcttcttcggaagagacgcgagcaactgaaacacaaactcgagcagctgcggaactcctgcgcg

SEQ ID NO: 128933 - DNA, 1317 bp, Artificial Sequence
  derived and/or modified sequence
atgccgctcaacgtctcttttaccaaccggaactacgatctggattacgactccgtgcagccttatttctattgcgacgaggaagaaaacttctatcagcagcagcagcagagtgagctccagcccccagcaccctctgaggatatttggaagaagtttgagctgcttccaacgccacctctgtccccatcacgcaggagtggcttgtgtagccctagctatgtggcggtcaccccctttagtctgcggggcgataatgacggggggggtggtagttttagtaccgctgaccaattggagatggtcactgagctcctcggcggcgacatggtgaaccagtccttcatatgcgacccggacgacgaaacttttatcaagaatatcattatacaggactgtatgtggtcaggcttctctgctgccgccaagttggtgagtgaaaagctggcctcttatcaggccgccaggaaggactctggctcacccaaccccgcgagaggccatagcgtgtgcagcaccagtagcttgtacctgcaggatttgagcgccgccgcgtcagagtgtatcgatccttctgttgtcttcccgtacccactgaatgacagttcgagccccaagtcctgtgccagccaggactcctcagccttttcaccttccagtgactccctgctttcaagcacggagtcatcgccccagggctctcctgagccactagtcctccacgaagagacaccgcctaccacaagcagcgattctgaggaggagcaggaggatgaggaggagatcgacgtggtgtctgtggaaaaacgacaggcacccggcaagaggagtgagtccggttctcccagtgctggcggacactctaaaccaccacatagccccctagtactgaaaagatgtcacgtctcaacccatcagcataattatgccgcgccacccagcactagaaaagattatccagccgctaaaagagtgaagctagatagtgtccgggtgttgcgtcaaataagcaataatcgtaagtgtacaagtccaagaagctctgacaccgaggagaacgttaagaggcgtacccataatgtgctggagaggcagaggagaaacgaactcaaaagatctttctttgctcttagggaccagatccccgagctagagaataatgagaaggccccgaaggttgtgattctaaagaaggccaccgcttatatcctgtctgtccaggcggaagaacagaagttgataagcgaggaagacctgttgcgcaagcgcagagaacagttaaagcacaagctagagcagctgagaaactcctgcgcc

SEQ ID NO: 128934 - DNA, 1317 bp, Artificial Sequence
  derived and/or modified sequence
atgcctcttaacgtctcattcacaaatagaaactacgatcttgactacgattcagtgcaaccatacttctattgtgacgaagaagaaaatttttatcaacaacagcagcagtccgagctgcaaccacctgcgcctagcgaggacatttggaagaaatttgaactgctacccaccccgccactctctccctcacgtcgttctggactgtgttcaccttcctatgtagctgtcactcccttttcactgcgcggggataacgacggggggggaggcagcttctcaaccgccgaccagttagagatggtgacagagctcctcgggggcgatatggtaaaccagagctttatttgtgacccagacgacgagacctttatcaagaatatcataatccaggactgtatgtggtcaggattcagcgcggccgccaaattggtatccgagaaattggcctcataccaggctgcaaggaaggactcaggttcacccaacccggcccgagggcattcggtctgcagcacctcgtccctatatcttcaggatctttccgcggcggcctcagaatgtattgatccatccgtggtatttccatatccacttaacgatagtagcagcccaaaatcatgtgcatcccaggattccagcgcattcagccccagttccgattcactgctgtcttccacagagagctccccgcagggctctcccgagcctctggttcttcatgaggaaacaccgcccactacctcttccgactcagaggaagagcaggaggatgaggaagagatagacgtcgtctctgtggagaaacggcaggctcctggcaaacgttccgagtcaggaagcccttcagcaggcgggcacagtaagccgccacattctcctcttgtgctaaagcgttgtcacgtctctacccaccagcataactacgcagcaccacccagcacacgaaaggattatcccgccgcgaagcgtgttaaattggacagtgtccgagttttaaggcagatatccaataaccgcaagtgcacctccccgcggtcatcagatacggaggagaacgtgaagaggagaactcacaacgtgcttgagaggcagaggcgtaatgagcttaagcgctcgttctttgcactgcgggatcagatccctgaattggagaataacgaaaaggcccccaaggtcgtcatcttgaaaaaggccacggcatatattttgagcgtccaggcggaggagcagaagttaatctctgaggaggacttattgcggaaacgcagggagcaactcaaacataagctggagcagctgaggaattcatgtgct

SEQ ID NO: 128935 - DNA, 1317 bp, Artificial Sequence
  derived and/or modified sequence
atgcctctgaacgtctcttttacgaatagaaattacgacttggattacgattcggtgcagccctatttctactgcgatgaagaggaaaacttttaccagcagcagcaacaatcagagcttcagcctccagccccttccgaagatatttggaaaaagtttgagctgctcccaactccacctctgtcccctagccggagatcgggactctgctcaccatcctacgtggccgtgactcctttttcgctgcggggtgataacgatgggggtggaggctcgttttcaactgccgaccagctggaaatggtgactgaactcctgggcggagacatggtgaatcagtccttcatatgtgatcccgacgacgagactttcatcaaaaacatcatcatccaggactgcatgtggtccggatttagcgccgccgcaaagctggtttccgagaagctggcctcgtaccaagcggcacgaaaggactcgggttcccccaacccggctcgtgggcattcagtctgttccaccagctccctgtacctgcaagatctgtccgcagccgcaagcgagtgcattgatccatcggttgtgttcccataccccctcaacgactcttcttcccctaaatcatgtgcatcccaagactcatccgccttttcaccgtcgtctgatagcctcctgtcatcgacggaatcctcgccccagggttcccctgaaccgcttgtccttcacgaagagactccgccaaccacctcctcggattcggaggaagagcaagaggatgaggaagagatagacgtggtttcggtggaaaagcgccaagcacccggaaagaggtcggaatcaggatcgccctccgctgggggtcattcgaagcctccacactccccactcgtcttgaagcgatgtcatgtgagcacccatcagcataactacgcggccccaccgtccacccgaaaagattatccagcagccaaaagagtgaagctggattcggtcagggtgttgagacagattagcaacaaccgcaaatgtacctctccccgtagcagtgataccgaggaaaacgtgaagcggagaacgcataatgtgcttgaacggcaacgcaggaatgaactgaagcggagcttcttcgctctcagagatcagattcctgagttggagaataacgaaaaggcccctaaggtggtcatcctgaagaaggcgaccgcttacatcctctcggtacaagctgaagaacagaagctgatatcggaggaggaccttcttcgtaagcgacgagagcagcttaaacacaagctcgagcaactgcggaactcctgtgca

SEQ ID NO: 128936 - DNA, 1317 bp, Artificial Sequence
  derived and/or modified sequence
atgcctctgaacgtaagtttcaccaataggaactatgatttggactacgattccgtgcagccttacttttattgcgatgaagaagagaatttttaccagcagcaacaacagagtgaattacaaccaccggctccatctgaggatatttggaagaagttcgagcttcttcctactccccctttgagtccatccaggcggagcggtctttgctctccctcttatgttgctgttacgccattttcccttaggggggataatgatggtggaggagggagtttctcaactgcagatcaactcgaaatggttacagaattattggggggagacatggttaatcaaagctttatttgtgatccagatgatgagacctttataaaaaacattattattcaagattgtatgtggtcagggttctctgctgctgctaagctcgttagcgagaagctggcgtcctatcaagctgctcgcaaggattcgggctcccctaaccctgctcgcggtcacagcgtctgtagtacatcttcactataccttcaggatctgtcagctgctgcatcagagtgtatcgatccgtccgtggttttcccctaccctctgaacgattcatcctcaccgaagtcctgtgcatcccaagattcctctgctttttctccatccagtgatagcttgctttcttctaccgagtccagcccacaaggctcacctgaaccattggttctccatgaagagacaccacctacaactagttctgattccgaagaggagcaggaggacgaagaggagatcgatgttgtttccgttgaaaagcgtcaggctccaggtaagagaagcgagagcggttcccctagtgctggtggccattcaaaacctccacattcccctctcgttttgaagcgatgccatgttagcactcaccagcataattacgcagctcctccatcgacacgtaaggattacccagctgcaaagagggtcaagttggatagtgtgagagtcttgaggcaaatttctaataaccgtaagtgtacttccccacgtagttcagataccgaagaaaacgtaaagagaaggacacataacgtgttggaaaggcagcgacgaaatgagttgaaaaggagcttcttcgcccttagggatcaaattcctgagctcgagaataatgaaaaggccccaaaagtggtcattttaaagaaggcgactgcttacattctctcagtacaggcagaggaacaaaaacttatatcggaagaggatctcctccgaaaaaggcgagaacaattgaagcataaactcgagcaacttcgtaattcatgcgca

SEQ ID NO: 128937 - DNA, 1317 bp, Artificial Sequence
  derived and/or modified sequence
atgccactgaacgtgagctttaccaaccgcaattacgacctcgactatgactctgtccagccatacttttattgtgatgaggaggagaatttttaccagcaacaacaacagtctgagctgcagcctcctgctcccagcgaggatatctggaaaaagttcgaactgctgcctactccccccctgtctccgagccgccgcagcggcctgtgttcacctagctatgtggccgttactcctttctctctgcgaggcgataacgatggtgggggtggttctttttcgacggctgaccagctggaaatggtgacggagttattggggggtgacatggttaaccagagcttcatttgcgatccggatgatgaaaccttcatcaagaatattatcatccaggattgtatgtggagcgggttctctgctgcggccaagctggtatcagaaaaactggcgagctaccaagcagcgcgcaaggattccggttcgccgaacccggcccgtgggcacagcgtgtgtagcacgagctcactgtacctgcaagatctgtcagccgcagccagcgagtgtatcgatccgagcgtggtttttccatatcctctgaatgacagtagcagcccgaagtcctgtgcgagccaggattctagcgctttttctccgagcagcgattccttgttgtctagcactgaatcatcaccgcagggctctcctgagccgctggtcctacacgaagagacccctcctaccacgtcttcggatagcgaggaagagcaggaagacgaggaggaaatcgatgttgttagcgtggagaagcggcaggcgcccggaaagcgctccgagtcaggcagcccaagcgctggcggtcattctaaacccccgcactctccactggttctgaagcgctgccatgtgtccacccaccaacacaactatgccgctcctccgtccactcgcaaggattatcccgccgctaaacgagttaaactggatagcgtgcgggtcctgcgtcaaatctctaataatcgcaagtgtaccagcccacgcagcagcgacacggaggagaacgtgaaaagaaggacgcataacgttcttgaacgtcaacggcgcaatgaattaaaaagatccttcttcgcgctgcgggatcaaattccggagttggagaacaatgagaaagcaccaaaggtcgttatcttgaagaaggccacggcatacattctcagcgtgcaagctgaggaacagaagctgatctccgaagaggatctcctgcgcaaacgacgcgaacagctcaaacataagctggaacaattacgaaattcttgcgcc

SEQ ID NO: 128938 - DNA, 1317 bp, Artificial Sequence
  derived and/or modified sequence
atgcccttgaatgtgtcgttcacgaacagaaactacgacctcgattacgattcggtgcaaccatacttctattgcgacgaagaagaaaacttctaccaacagcagcagcaaagcgagctgcagccgcctgccccaagcgaggacatctggaagaagttcgaactccttcctactcctcccctgtcccccagccggcgcagcggactctgctcgccctcctacgtggcagtcactccgttttcactgagaggagataatgacggagggggcggctcattttccactgccgaccagttggagatggtcaccgaacttttgggtggtgacatggtgaatcagtccttcatctgcgaccctgatgacgaaaccttcatcaaaaacatcatcatccaggactgtatgtggagcgggttctccgcggccgcgaagctcgtctccgaaaagctggcctcgtaccaggctgccaggaaggactcaggaagccctaacccggcccgcggacactccgtgtgctcgacttcatccctgtacctccaggatctgtcagcagccgcaagcgaatgcatcgatccaagcgtcgtctttccttacccactcaacgattcaagctctccaaagtcctgtgccagccaggactcgtcagccttctcgccgtcatccgatagccttctttcctccacggaatccagcccgcagggatccccggaaccgctggtgctccatgaggagactccgccaactacctcctcggatagcgaggaggaacaggaggacgaagaggagatcgacgtggtgagcgtcgagaaacggcaggcgcctggcaaacgatcggaatccgggtccccttcagccggtggacacagcaagcctccgcacagcccactggtcctcaagcggtgccacgtgtccacccatcaacacaattacgcggctcccccgtcgaccagaaaagactaccctgctgcaaagcgcgtcaagctcgatagcgtgagggtgctcagacagatctcgaataaccgcaaatgtaccagcccgcggtccagcgataccgaggaaaatgtgaagcgccggactcacaatgtcctggagagacagaggcggaatgagctgaaaaggtcgttcttcgccttgcgcgaccaaataccagaacttgagaataacgagaaagcgccaaaggtcgtgatcctgaaaaaggcgaccgcgtacatcttgtctgtccaggccgaggaacagaagctgatctcggaagaagatttgctgcggaagagacgggagcaacttaagcacaagctggaacaactgcgcaattcatgcgct

SEQ ID NO: 128939 - DNA, 1317 bp, Artificial Sequence
  derived and/or modified sequence
atgcctttgaatgtgtcattcactaacagaaactacgatcttgattacgattctgtgcaaccttacttttactgcgacgaagaagaaaacttctaccagcagcaacagcagtccgaactgcaaccgccagccccctccgaggatatctggaaaaagttcgagctgctgccgactccacccctcagcccgtcgcggcgctcgggattgtgctcgcccagctacgtggccgtgactccgttctccctgcgcggagacaatgacggtggaggagggtcgttttccaccgctgatcaactggagatggtgacggagctcctcggaggcgacatggtcaatcagagcttcatatgtgacccagacgatgagacttttatcaaaaacatcatcattcaagattgcatgtggtcgggattttccgcagcggcgaagctcgttagcgaaaagctcgcatcctatcaagccgccagaaaggactccggatcacctaacccggcgcgcggacactcggtctgcagcacttcttccctctacttgcaagacctgtccgcagcagcttcggaatgcatcgacccgtccgtggtgttcccttaccctctgaatgactcttcctcaccaaaatcgtgcgcgtcccaggactcttcggcattctcgccgtcaagcgatagcctgctctcgtccaccgaaagctccccgcaaggctcgccggagccgctggtcctccacgaggaaaccccacctactacttcgtcagactccgaggaagaacaggaagatgaggaagaaattgacgtcgtgtcagtggagaagcggcaggcccctggtaaacgatccgaatcggggagcccatcggctggcggacactcaaaacctccgcattcaccgctcgttctgaaacgctgccacgtctccactcatcagcacaattatgcggcgccaccgtccacccggaaggattacccggctgcaaagcgggtgaagctcgattcagtccgcgtccttaggcagatttcgaacaaccgaaagtgtacctcccctcggagctcagacaccgaagagaacgtgaagaggcgcactcacaacgtgcttgagcgccagcggagaaacgaactgaagcgctccttcttcgcgttgagggaccagattcctgagttggaaaacaacgaaaaggccccgaaagtggtcatcctcaagaaagccaccgcttacatcttgagcgtgcaggccgaggagcaaaagctgatctctgaggaagatttgctcaggaaaagaagggaacaactgaaacataagctcgaacagttgcgtaatagctgcgct

SEQ ID NO: 128940 - DNA, 1317 bp, Artificial Sequence
  derived and/or modified sequence
atgccactgaatgtgtcattcacgaatcgcaactacgatttggattacgacagcgttcagccctatttttactgcgacgaagaggaaaatttctatcagcagcaacaacagagcgagctgcaacctccggctccgagtgaggacatctggaaaaaattcgaattgctacccacaccccccctgtctccctcacgaagaagcggtctgtgttccccatcctatgtggccgtaaccccctttagtctgcggggagataacgatgggggcggagggtcgttctccacagcggaccaactggagatggtgactgagctcctaggcggcgacatggtgaatcagtccttcatctgtgacccagacgatgagactttcatcaagaatatcataattcaggattgtatgtggagtggctttagcgccgctgccaaactggtgtcagagaaattggcctcctaccaggctgctcggaaagatagcgggtccccaaatccagctcgtggccattcagtatgctcgacctctagtctctacctccaggacctgtctgcggctgcctctgaatgcatagacccctccgtggttttcccataccccctgaacgactcgtcatcacctaagtcttgcgcttcacaggactcatccgcatttagtccatcatctgactcactgttgagcagcacagagagcagtcctcaggggagtcctgagcctttggtgcttcacgaggagacgccacccactactagctccgatagtgaggaggaacaggaagacgaggaagagatcgacgtggtgagcgtggaaaagcggcaggcacccgggaagagaagcgagtccggtagcccatctgcagggggccattctaagccccctcattctcctctggtcttgaagcgctgtcacgtttccacgcatcagcataactacgcagcacctccgagcactagaaaagattaccctgctgcaaagcgcgttaaacttgacagtgttagggtcctaaggcagatttccaataataggaaatgcacgagccccagaagcagcgacactgaagaaaacgttaagaggaggactcataatgtgttggagaggcagagacgaaacgagctgaaacgtagcttcttcgctcttagggaccaaataccagagctcgaaaacaatgaaaaagccccaaaggttgtgatcttaaagaaggccacggcctatatattgagcgttcaagcagaagaacagaagctgataagcgaggaggacctgcttagaaaacgccgtgaacagcttaagcataaactggagcagctccgcaactcatgcgct

SEQ ID NO: 128941 - DNA, 1317 bp, Artificial Sequence
  derived and/or modified sequence
atgcccctgaacgtaagttttacaaaccggaattatgatttagactatgactctgtgcagccctacttctattgtgacgaggaggagaatttctaccaacagcagcagcagagcgagctccaacctcccgcgcccagcgaagacatttggaaaaaattcgaattgctgcctactccaccactttctccatcaagacggtcaggcctgtgctccccctcatacgtggccgtgaccccttttagtctgcgtggggacaacgacggcggtggcgggagcttctcaacagcggatcagttagagatggtaacagagttgttgggcggagacatggtgaatcaaagttttatatgcgatcctgacgatgagacatttatcaaaaacatcattatacaggactgcatgtggtcagggttctctgccgcagcaaaactcgtgagcgaaaaattggcaagctaccaagcagcccggaaggatagtggatcccctaatccggccagaggccattctgtgtgttcaacctctagcttatatcttcaagatctcagcgccgccgcctcagagtgcatcgaccctagtgtggtcttcccctatccgttgaacgattcatcctctcccaagtcatgcgcctcgcaggattctagcgccttctctcctagcagtgattccttattatctagcacggaatcatctcctcaggggagcccggagcccctggtgctccacgaagagacacctcccacgacctcatccgatagcgaggaggagcaggaggatgaggaagagatcgacgtcgtctctgtggagaagagacaagccccaggcaagcggtctgaaagcggcagcccctcagcgggcgggcattcaaaacccccacactcaccattggtcctcaagagatgtcatgtcagtacacaccagcacaactatgcagctccaccctcgacaaggaaagactatccagctgccaaaagggtgaaactggattctgtccgggtactgcggcagatttctaataacaggaaatgcactagccctaggtcctctgacacggaggagaacgtcaagaggagaactcacaacgtgctggaacgacagagaaggaatgagcttaagagatcctttttcgcactgagggaccagataccagaactcgagaataacgagaaagcacctaaggtggtgatcttgaagaaagcaactgcttacattctttctgtccaggcagaagagcagaagctgatcagcgaggaggatctgctgcggaaaagacgcgagcagctgaaacacaaactagagcagttgcgcaatagctgcgcc

SEQ ID NO: 128942 - DNA, 1317 bp, Artificial Sequence
  derived and/or modified sequence
atgcctttgaacgtttctttcactaacagaaattacgatttggactacgattctgtacagccctatttctactgtgacgaagaagaaaatttctaccagcagcagcagcagtccgaactgcagcctccagctccatcggaagatatttggaaaaaattcgagctactgcccactccccctctgtcaccttcaaggagatccggactctgttcaccctcatatgtcgctgtgactcctttctctttacgcggggacaacgatggaggaggggggagtttctctacagctgatcagctcgaaatggtaactgaactgctcgggggggatatggtgaaccagtcctttatatgcgatcccgacgatgagacattcataaaaaacatcataattcaggactgtatgtggtccgggttttctgctgcagcaaaactggtctcagaaaaattagccagttatcaggctgcgagaaaagattctggaagtcccaatcccgccagggggcattcagtgtgttctacatcctcactttatctacaggatctaagtgctgcagcctccgaatgtattgaccctagtgtagtgttcccttaccctctaaacgatagttcctccccaaaatcttgtgcttcccaggattctagtgcattctcacctagtagtgatagtttattatcaagtactgaaagttcaccccaggggagtcccgaacccctggtgctacacgaagaaactcctccaacaactagttcagattctgaggaggaacaggaagacgaagaggaaatagatgtggtgtccgtcgagaaaaggcaggctcctgggaagcgctctgaatctgggtcaccctcagcaggaggacactccaaacccccacattcccctctggttctcaaacgatgtcatgtatctactcatcagcataattatgctgcccctccctcaacaagaaaagattacccagccgccaaaagggtgaaactcgactccgtgagagtcctgaggcagatatcaaataatcgaaaatgtacatcccccagatcctcggatacagaagaaaatgtcaaacgacgaactcataatgtgttggagaggcagcggagaaatgagctgaagcgctcatttttcgcactccgagatcagattcctgaactggaaaataacgagaaagcacctaaagttgttatcctcaaaaaagccacagcctacatattatcagtccaggccgaagaacagaaacttatctctgaagaagacctcttacgaaaacgaagggaacagctaaaacacaaactcgaacagctgagaaacagttgcgct

SEQ ID NO: 128943 - DNA, 1317 bp, Artificial Sequence
  derived and/or modified sequence
atgcctctgaatgtgagcttcaccaataggaactacgacctcgattacgattctgtccagccttacttttactgtgacgaggaagagaatttctaccagcaacaacaacaatctgagctgcagccccccgccccctcggaagatatttggaagaaattcgaacttcttcctacgcccccactgagccctagcagaagaagcgggctctgtagccctagctacgtggcagtcaccccgttttcccttcgcggggacaatgatggtggcggtggatcattttccaccgcagatcagctggaaatggtgaccgagcttcttggtggtgacatggtgaaccaatcattcatctgcgacccagatgatgaaaccttcattaagaatatcattattcaggattgtatgtggtcagggttttcagccgcagccaagctggtgagcgaaaaactggcatcataccaagcagcacgaaaagattcgggatcaccaaatcccgcgagaggacattccgtgtgctccacgagctccctctatcttcaggacttgtcggccgcagcgagtgagtgcatagacccttcggttgtgtttccataccctttgaacgattcgtcgagccctaaatcctgcgcgtcgcaggattcgtcagctttctctccttcatcggattcgctcctctccagcaccgaatcgtctccacaagggtcacccgaacctcttgtgctgcatgaagaaacccctcctaccacgtcctccgattccgaagaggaacaggaagatgaagaagaaatcgacgtggtgtcagtcgagaagcgccaagcacctggaaaaagatcggaaagcggatcgccttcggctgggggccattcaaaacctccacacagccccctcgtgctgaagcggtgtcacgtgtcaacccatcaacacaactatgcagcaccaccttcgacgagaaaagattaccccgccgcaaagagagtgaagctcgattcggtgagggtgctgaggcaaatttcgaacaacagaaaatgtacgtccccgagatcatcggatactgaggaaaacgtcaaacgccggactcataacgtgcttgagaggcaacgccgcaatgagctgaagcgatcattctttgcgctgagggaccagatccctgagcttgagaacaacgaaaaggcgcctaaggtcgtgattctgaagaaggctaccgcatatatcctgagcgtgcaggccgaagaacagaagctcatcagcgaggaagatctcctgaggaaacggagagaacagctgaagcacaaattggaacagcttcgaaattcatgtgca

SEQ ID NO: 128944 - DNA, 1317 bp, Artificial Sequence
  derived and/or modified sequence
atgcccctgaatgtctccttcaccaaccgtaactacgatctggattacgactccgtgcagccgtatttttattgcgacgaggaagagaacttttatcagcagcaacaacagagcgaattgcagccccccgctccctccgaggacatttggaagaagtttgagctgctgcccacccctccattgtccccctcgcggaggtcggggctgtgtagcccttcatacgtggcagtgactcctttctctttgaggggggataacgacggaggaggagggtcattctccaccgcggaccagttagaaatggtaaccgagttactgggcggtgacatggtcaaccagagcttcatctgcgacccggatgatgaaaccttcataaaaaatataatcattcaggactgtatgtggtctgggttctcggcggctgccaagctggtctctgaaaagctcgcaagctaccaggccgctagaaaggactccgggtcaccaaatccggctcggggccattcagtgtgctcgactagttccctgtacctgcaggacctgagcgccgccgcttctgagtgcatcgatcctagtgtggtttttccttaccccctgaacgacagcagcagccccaaatcatgtgctagccaggattcttcggccttttctccaagctccgattccttgctctcttctacggagtcttccccacaaggctctcccgagccactggtactgcacgaggaaaccccccccaccacctcgagcgactctgaagaagagcaggaagacgaagaagaaattgatgtggtgtccgtggagaagaggcaggcgccgggtaagcggtccgagtccggatccccatctgccggtggacattctaagccccctcattcacccctcgtactgaaacgttgccacgtgtcaacccaccagcataactatgcagcgcccccctccactaggaaggattatcctgcagctaaacgtgttaagttagatagcgttagggtactccgacagatttcgaataataggaaatgtacctccccacgatcatccgatacggaggagaatgttaagcgaaggacgcataatgttctggagaggcagagaagaaacgagctgaagagaagcttcttcgcactgcgtgatcagatcccggaactggagaataacgagaaggcacctaaagtcgtaatattaaaaaaggcaactgcatacatcctgtccgtgcaggccgaggaacagaagctcatcagtgaagaagacctgctacggaaaagacgagagcagctaaaacataagctggagcagctgagaaatagttgcgca

SEQ ID NO: 128945 - DNA, 1317 bp, Artificial Sequence
  derived and/or modified sequence
atgccgttaaatgtttcgtttacgaatcgtaattatgatttagattatgattcggttcaaccgtatttttattgtgatgaagaagaaaatttttatcaacaacaacaacaatcggaactacaaccgccggcgccgtcggaagatatatggaaaaaatttgaactattaccgacgccgccgctatcgccgtcgcgtcgatcgggtttatgttcgccgtcgtatgtagcggttacgccgttttcgttacgtggtgataatgatggtggtggtggttcgttttcgacggcggatcaattagaaatggttacggaactactaggtggtgatatggtaaatcaatcgtttatatgtgatccggatgatgaaacgtttataaaaaatataataatacaagattgtatgtggtcgggtttttcggcggcggcgaaattagtttcggaaaaactagcgtcgtatcaagcggcgcgaaaagattcgggttcgccgaatccggcgcgtggtcattcggtttgttcgacgtcgtcgctatatctacaagatttatcggcggcggcgtcggaatgtatagatccgtcggtagtatttccgtatccgctaaatgattcgtcgtcgccgaaatcgtgtgcgtcgcaagattcgtcggcgttttcgccgtcgtcggattcgttactatcgtcgacggaatcgtcgccgcaaggttcgccggaaccgctagtattacatgaagaaacgccgccgacgacgtcgtcggattcggaagaagaacaagaagatgaagaagaaatagatgtagtatcggttgaaaaacgacaagcgccgggtaaacgttcggaatcgggttcgccgtcggcgggtggtcattcgaaaccgccgcattcgccgttagtattaaaacgatgtcatgtatcgacgcatcaacataattatgcggcgccgccgtcgacgcgaaaagattatccggcggcgaaacgagtaaaattagattcggttcgtgttctacgacaaatatcgaataatcgaaaatgtacgtcgccgcgttcgtcggatacggaagaaaatgttaaacgacgtacgcataatgttctagaacgacaacgtcgaaatgaactaaaacgttcgttttttgcgttacgtgatcaaataccggaactagaaaataatgaaaaagcgccgaaagttgtaatattaaaaaaagcgacggcgtatatactatcggtacaagcggaagaacaaaaactaatatcggaagaagatctactacgaaaacgtcgagaacaattaaaacataaactagaacaactacgtaattcgtgtgcg

SEQ ID NO: 128946 - DNA, 1317 bp, Artificial Sequence
  derived and/or modified sequence
atgcctcttaacgtgagtttcacaaacaggaattatgatctcgattacgattctgtacagccctatttttattgcgatgaggaggagaatttctatcagcaacagcagcagtcggaactacagccaccagccccctccgaagatatttggaaaaaatttgaattactgccaactccacctcttagtccatcaagacgctctgggttatgcagtccatcctatgtagctgtgacaccattttctctcagaggggataacgatggaggaggagggtctttttccacagcagatcagctggaaatggtgactgaactgctaggaggagacatggtcaatcagtcttttatatgtgatcccgatgacgaaacattcatcaaaaacatcatcatacaggattgtatgtggtctggattttccgccgctgcaaaactagtctctgaaaaactggcaagttaccaggctgccaggaaagatagtggatccccaaatccagcgcgggggcattccgtttgttcaacttcttccctctatctccaggatctcagtgctgcagcatctgaatgtatcgatccctctgttgtcttcccttatccacttaatgatagttcctctccaaaatcttgtgcctcccaggatagttctgcattttccccttcttctgattctctactatccagtacagaatcgtcaccacaaggatcgccagaacctcttgttctccatgaggaaactcctccgactactagttccgattctgaagaggagcaggaggatgaggaagaaatcgatgtggtctctgtagagaagcgccaggcccccgggaaacggtctgaatctgggagtccatctgctggggggcattctaaaccccctcattctccactcgtgctcaaacgatgccatgtttctacacaccagcataattacgctgctcctccatccacaaggaaagactacccagccgctaaaagagtgaaactcgattctgtacgcgttttgaggcagataagtaacaatcggaagtgtacatctccacggtctagtgacactgaagaaaatgtgaaacggcggactcacaatgtccttgaaagacaacggaggaatgagttaaaacgctcgttttttgccctaagagatcagattcccgagctcgaaaataatgaaaaagcacctaaagtggtcatattgaaaaaagccacagcatatattctgagtgttcaggccgaagaacagaagcttataagtgaggaagacttgctcaggaaaaggcgagaacaactgaaacataaactcgagcaactaaggaactcctgtgct

SEQ ID NO: 128947 - DNA, 1317 bp, Artificial Sequence
  derived and/or modified sequence
atgccgctgaacgtcagctttaccaacagaaattacgacctcgactatgactcagtgcagccttacttctactgcgacgaggaggaaaatttttaccagcaacagcaacagtccgagctccaaccacccgcacccagtgaggacatatggaagaagtttgagctcctgcctacccctcccctctctccaagcagaagatctgggttgtgttcacccagttacgtggccgtgactccattttctctgcgcggagataacgatggtgggggcgggtccttttccaccgctgaccaactggagatggtcacagagttgctcggtggcgatatggttaatcagtccttcatctgcgaccccgacgatgaaaccttcatcaagaacatcataatccaggactgtatgtggtccggcttctctgcagctgcgaagctcgtgtctgagaaactggcttcataccaggctgctcgcaaggactccggctcaccaaatccagcgcggggtcactctgtatgctctaccagcagtttgtatttgcaagacctgtctgcagcggcaagtgagtgtatcgatccctccgtggttttcccatacccacttaatgacagcagcagcccgaagtcctgtgcctcccaggatagtagtgccttctctccatcttccgattctctcctgtccagtaccgagagctctcctcaaggcagccctgaacctttggtactgcatgaggagacaccaccaacaacttcatctgacagcgaagaggagcaggaggacgaggaagagatagacgtagtcagcgtggagaagaggcaggcaccgggtaagcgatctgagtccggttcaccgagcgccggcgggcatagcaaaccgccacacagcccccttgtgttgaagcggtgccacgtttccacgcaccagcataattatgccgcgccaccaagtacacggaaagattaccccgcagctaaaagggtgaagctcgatagtgtgcgggttctccggcagatctccaacaaccggaaatgcacaagcccccgctcaagtgacactgaggagaatgtaaagcgcaggacacacaacgtgctcgagcgccagagacggaatgaactgaagaggtctttctttgcgcttcgcgatcagattcctgagctggagaataatgaaaaggctccaaaggtcgtcatattgaagaaagctacagcctacatcctcagcgtccaggcagaagagcaaaagctgatcagtgaggaagaccttctgcgcaaacggcgcgaacagctcaagcacaagctggaacagctgcgcaatagctgcgca

SEQ ID NO: 128948 - DNA, 1317 bp, Artificial Sequence
  derived and/or modified sequence
atgccgctcaacgtgtctttcactaatagaaactacgatcttgattacgactccgtgcagccatacttttactgtgatgaggaagagaacttttatcaacagcagcagcaaagcgaactccagcctcctgccccatccgaagatatctggaagaaatttgaattgctgcctacgccacctctctcaccctccagacgcagcggcctgtgtagccccagctatgtggcagtcactccattctcgttgcggggggataacgatggaggtggcggttccttttcgaccgcagaccagttggagatggttaccgagctgctgggaggagacatggtgaaccaatcgtttatctgcgatccggatgacgaaaccttcatcaagaatatcatcatccaggattgtatgtggtcggggttcagcgcagccgctaaacttgtgtcagaaaagctggcatcatatcaagccgcaagaaaggattcgggaagcccaaacccagcacgcgggcattcggtgtgctcaacctcgtctctttatcttcaagatctctcggcggcagcctcggaatgtattgatccgtccgtggtgtttccgtaccctctgaacgattccagcagccctaagtcatgcgcatcgcaagattcctcggccttctccccctcatcggactcacttctttcctcgaccgagtcctctccccaaggatccccagaaccactggtcctgcacgaagaaaccccacctactacctcgtcagattcagaagaggagcaagaggacgaagaggaaatcgatgtggtgtcagtggaaaagcggcaagcaccagggaagagatcggagtcgggttcaccatcggctggaggccatagcaaacctcctcattcgcctttggtcctgaagcgctgtcacgttagcacgcatcaacacaattacgcagctcctccctcgactcgaaaagattaccctgccgcgaaaagagtgaaactcgactccgtgcgcgtgctcaggcaaatttcaaacaacaggaaatgcacttcaccccgttcgagcgataccgaagaaaatgtgaaaagaaggacccacaacgtgctggaacggcagcggagaaacgaacttaagcgctcatttttcgcccttcgagatcagattcccgaacttgagaataatgagaaagcaccaaaggtcgttatactcaagaaggctactgcatacattctgtcggtccaggcagaagaacagaagctgattagcgaagaggatctcctccgtaagcggagagaacaacttaaacacaagctcgagcaactcagaaattcatgtgcc

SEQ ID NO: 128949 - DNA, 1317 bp, Artificial Sequence
  derived and/or modified sequence
atgccactgaatgtgtcgttcactaacagaaactacgaccttgactacgattccgtccaaccttacttttactgcgacgaggaagaaaacttttaccaacagcagcaacagagtgaattgcagcctccggctcctagcgaggatatttggaagaaattcgaactgttgccaaccccgccgctgagtccaagcagacgctcgggactgtgctccccgtcgtacgttgccgtgaccccgttctccctgcgcggggataacgacggaggcggaggatccttctcgaccgcggatcaactggagatggtaactgaactcctgggtggggatatggtgaaccagagcttcatttgcgacccggatgacgagactttcatcaagaacatcattatccaggactgtatgtggagtggattctcggccgcggctaagctggtatctgaaaaactggcctcgtaccaagccgcaagaaaggattcggggagcccgaacccagcgcgcgggcattcagtgtgctccaccagctcactgtacctgcaagacttgtccgctgctgcgtctgaatgcatcgatccatcagtggtgttcccgtacccgcttaacgactcatcttcaccgaagtcttgtgcatcgcaggacagcagcgcattcagcccgtctagcgactcgctgctgtcaagcaccgagagctccccgcaggggtcgccagaacccttggtgcttcatgaagaaacgccgccgacgacttcatcagactcagaagaggaacaggaggatgaggaagagatcgatgtggtttcggtcgaaaagcgccaggcgccagggaagcgctcggagagcggatccccctcggcaggaggccactcgaagccgcctcactccccgctcgtgctcaaacgctgccacgtctcaacccaccaacacaattatgccgccccgccatcgacccgcaaagattaccccgcagccaagcgggtgaagctcgacagcgtgcgcgtgcttcgccaaatcagcaataatcggaagtgtacttcgccaaggtcgtcggacaccgaggaaaatgtgaagcggagaactcacaatgtgctcgagcgtcagcggcgcaatgaactgaaaagatctttctttgccctcagagatcagatcccggagctggaaaacaacgaaaaggccccgaaggtggtgatcctgaaaaaggcgaccgcttacatcctgagcgtgcaagcggaagagcagaagttgatctcggaggaggacctcctgcggaagagaagggagcaactcaagcataagctggagcagctccggaactcatgcgcg

SEQ ID NO: 128950 - DNA, 1317 bp, Artificial Sequence
  derived and/or modified sequence
atgcctctgaacgtgtcgtttactaatagaaactatgaccttgactacgacagcgtccaaccgtacttctactgcgacgaagaagagaacttctaccagcagcaacagcaatccgaactgcagccaccagcgccctcagaagatatctggaagaaatttgagctgctgccgaccccgcctctgtcaccctccagacgatctggactgtgttcgccttcctacgtggccgtcaccccgttctcgctgagaggcgacaacgacggaggcggcgggtcgttcagcaccgctgaccagctcgagatggtcacggagttgctcggaggagacatggtgaatcagtcatttatctgcgacccggatgacgaaactttcattaagaacattatcatccaagattgcatgtggtcggggttcagcgcggccgccaagctggtgtcagaaaagttggcgagctaccaggcagcccggaaagacagcggatcgccgaacccggcgaggggccatagcgtctgctcaacttcatcgctctacctgcaagacctcagcgcagctgcctcggagtgcatcgacccttccgtggttttcccctacccgctgaacgattcctccagcccgaaatcctgcgccagccaggacagctccgcattttccccgtcgtccgatagcctcctgtcctcaaccgaatcgtcgccacagggatcgccagaacctctggtgctgcatgaggaaactccaccgaccacgtccagtgattcggaggaagagcaggaagatgaggaggaaatcgatgtcgtgagcgtcgagaagagacaggccccgggaaagcggtccgagtccggtagtccatcagcgggtggacattcaaagcctccacattccccactcgtgctcaaacggtgccacgtgtccactcaccaacacaattacgccgctccgccatcgacccgtaaggactaccccgcagcgaagcgcgttaagctggattcggtgcgggtgctccggcaaatttcgaacaatcggaagtgtacttcgccccgctcctcagataccgaagagaatgtgaaacgcaggactcacaacgtgctggaacgccagcgccgcaacgagcttaagagatcattcttcgctttgcgcgaccaaatcccggagctcgaaaacaatgaaaaagcacctaaggtcgtgatcctcaagaaagccaccgcctacatccttagcgtgcaggccgaagaacaaaaactgatcagcgaggaagatctgctgcgaaagcgcagggaacagctgaagcacaagttggagcagcttcggaattcttgtgct

SEQ ID NO: 128951 - DNA, 1317 bp, Artificial Sequence
  derived and/or modified sequence
atgccactgaacgtttcgttcactaatcggaactacgacctggattacgattccgtccaaccgtacttttactgtgatgaggaggaaaacttctaccaacagcagcagcagtccgagctccagccgcccgccccgagcgaggacatctggaagaaattcgaactgttgccaaccccacctctttcaccgtcgcggcgctcgggcttgtgctcgccttcttacgtggccgtcactccgttctcgctgcggggcgacaacgatggtggtggtggttccttttcaaccgccgaccagctcgaaatggtgactgagctgctcggaggagatatggtcaatcaatcgttcatttgcgatccggacgacgagactttcatcaagaacattatcattcaagactgcatgtggtccggattttccgcggccgcgaaactggtgagcgagaaactggcgtcctaccaggcggcaagaaaggactccggatccccgaatccggcaaggggacactccgtgtgtagcacttcatccttgtacctgcaggacctgagcgccgcggcaagtgaatgcattgacccatctgtggtctttccgtaccctctgaacgactcctcgagcccaaaaagctgtgcctcccaggattcatcggctttctcaccgtcatcggactcccttctgtcctccaccgaaagctcaccgcagggatcccccgagccactcgtgctccatgaggaaactccgcctacgaccagcagcgactcggaagaagagcaggaggacgaggaagaaatcgacgtggtgtccgtcgaaaagaggcaggccccgggtaagagatcggagtctggctcaccgagcgctggaggccatagcaagccgccacacagcccactggtgctcaagcgctgccacgtgtcgactcaccagcacaattacgccgccccacctagcactcggaaggactacccggcagccaaacgggtcaaactggattcggtcagggtgctgcggcagatctctaacaatcgcaaatgcacctccccgcggtcgagcgatactgaagaaaacgtgaagcgccgcactcacaacgtcctggagcgccagcggcgcaacgaactgaagcgcagctttttcgctctgcgcgaccagatcccggagctggaaaacaatgaaaaggcaccaaaagtcgtgatccttaagaaggccactgcttacattttgtccgtgcaggcggaggaacagaagctgatcagcgaagaggaccttctgcgcaagcgccgagagcaacttaagcacaagttggagcagctgcgcaactcgtgcgcg

SEQ ID NO: 128952 - DNA, 1317 bp, Artificial Sequence
  derived and/or modified sequence
atgcccctgaacgtctcttttacgaataggaactatgacctggactatgattctgtgcagccttacttctactgtgacgaggaagaaaatttttaccagcagcagcaacagtcagaactccagccccctgctccttctgaagatatctggaaaaagttcgaactgctgcctaccccgccgctgtcgccatctcgacgcagcggtctgtgttcacccagctatgtcgccgtgacccctttcagtctgaggggagataatgacgggggcggcgggtctttttccactgcggaccagctggaaatggttactgaactgctgggcggcgacatggtgaaccagagcttcatctgcgaccccgacgacgagacatttataaagaacattattatacaagattgtatgtggtccgggttctccgccgcggcgaagctggtgtcagaaaaactggcctcctaccaagctgctaggaaggacagcggctctccaaacccagctagaggtcactccgtgtgctcgacctcatctctgtacctgcaggatctctccgcggccgcaagtgaatgcattgatcccagtgtggtgttcccctatcccctcaacgacagcagctcacctaaaagttgcgccagccaagattcctcagcgtttagtccttcctccgacagcctactttcatccactgagagcagtcctcagggttcaccagaacccctcgtgctccatgaggaaaccccccccactacaagttctgattccgaggaagagcaggaggatgaagaggaaattgatgtggtgtctgtggagaagcgtcaggcacccgggaaaaggagtgagtcaggaagtccatctgccggcggccatagcaagcctccccacagtcctttagtcctgaagcgatgccatgtgtctacacaccagcacaattacgctgctccacctagcactagaaaggattatcccgctgccaagcgcgtcaagctagattctgtgagggtgctgaggcagatttcaaataacagaaaatgcacaagccccaggtcatccgacaccgaagaaaacgtcaaacggcgcacacataatgtcctggagaggcagcgacgtaatgagttgaaaagaagcttctttgccctgcgtgaccaaatcccagaactggagaataacgagaaggctccaaaagtcgtgatcctgaaaaaggccaccgcttacatcctgagcgtccaggcggaagagcagaagctgatctcagaggaggatttgttgcgaaagcgaagggagcaattaaaacataaactagaacagttgcgaaacagctgcgca

SEQ ID NO: 128953 - DNA, 1317 bp, Artificial Sequence
  derived and/or modified sequence
atgcccctcaatgtcagcttcactaatcgcaattacgatctggattacgactcggtgcagccttacttttactgcgatgaagaagaaaacttctatcaacagcagcaacagtccgaactgcagccgccggccccatcagaggacatctggaaaaagtttgaactcctgccgactccacccctgtcgccctcacggcggagcgggctgtgctccccatcctacgtggccgtcactcctttctcgttgcgcggagacaatgatgggggaggcggatcattctcgacggcagatcagctggaaatggttaccgagctgctgggcggtgatatggtgaaccagtcctttatctgcgatcctgacgacgaaaccttcattaagaacataatcatccaagactgcatgtggagcggattctccgcagcggcaaagctcgtgagtgaaaagctggcgtcgtaccaagccgcccggaaggactccggaagcccgaacccagcacggggacattcagtgtgtagcaccagttcattgtatcttcaagacctctccgccgccgcgtcggagtgcattgacccatccgtggttttcccataccctcttaacgactcatccagccccaaatcctgtgcctcccaagactcctcagctttctcgcctagtagcgatagcttgctgtcgagtacggaatcgtccccacagggatcaccagaaccgctggtgctccacgaggaaactccaccgaccacctcttcggattcggaagaagagcaggaggatgaagaggagatagacgtcgtcagcgtcgagaaaagacaggcacccgggaaacgcagcgagtcgggctccccgtctgccggtggccacagcaagccaccgcattccccgctggtgctgaaacggtgccatgtgagcactcaccagcacaattacgccgcgcctccgtccactcgcaaggactaccctgcagctaagcgagtcaagctcgattccgtgcgggtgcttcgccagatctctaacaatcggaaatgcacttccccacgcagcagcgacactgaagagaatgtgaaacgcagaacccataacgtgcttgagcggcagcgccggaacgaactcaagagatcgtttttcgccctccgcgaccagatccctgaacttgaaaacaacgagaaagccccgaaggtggtgatcctgaagaaggcgaccgcctacatcctctccgtccaggcggaggagcagaaactgatctcggaggaggatctcctgcgcaagaggcgcgagcaactgaaacacaagctggagcaactgcggaacagctgtgcc

SEQ ID NO: 128954 - DNA, 1317 bp, Artificial Sequence
  derived and/or modified sequence
atgccactcaacgtgtcgttcaccaatcgcaactacgatcttgattacgattccgtgcaaccttacttttactgtgacgaggaggagaacttttaccaacaacagcaacagtcagaattgcagcctccggcaccttcagaagatatttggaagaagtttgaactccttcccactcccccactgtccccatcaagaagatccggactttgttcgcctagctacgtggcagtgacccctttcagcctgagaggagacaacgatggaggcgggggtagcttttctactgcagatcaacttgaaatggtgaccgagcttctcggaggagatatggtcaaccagtcatttatctgtgatccagatgacgaaactttcataaagaacatcattattcaagattgtatgtggagcggtttctcggcagctgcgaagctggtgtccgagaaactcgcatcgtatcaagcagcgcgcaaggatagtggtagccccaaccctgcacgcggacactccgtgtgttcaacctcgtcactgtaccttcaggatctgagcgcagctgcctcggaatgtatcgatccttccgttgtgtttccttaccccctcaacgactcatcctcgccgaagagctgtgcatcccaagattcgtccgcgttctcgccctcatcggattcccttctgtcatcaactgagagttcccctcaagggtcacccgaacccctggtgctgcacgaggaaactcctccaactactagctcagattcggaggaggagcaagaggacgaagaagaaatcgacgtggtgtcagtggaaaagagacaggcaccaggtaagcgctcagaaagcggatccccttcggccggaggacactccaaaccgcctcattccccgcttgtgctgaaacggtgccatgtgtccactcaccaacacaattacgcagctccaccttcgacccgtaaggattaccctgcagcaaaacgcgttaagctggattccgtccgagtgcttcggcaaattagcaacaatcgaaaatgtaccagcccgcgctcgtccgataccgaggagaatgtgaaaaggaggactcataatgtgcttgagagacagcgcagaaatgagctgaagcggtcattcttcgcactgcgtgatcagattcctgaactggaaaacaacgagaaggcgccaaaggtcgtgatcctgaagaaggcaaccgcctacattctctcagtgcaggccgaagaacaaaagttgatttcggaagaagatcttttgaggaaaagaagggaacagcttaaacacaagctcgaacagcttcgaaacagctgtgca

SEQ ID NO: 128955 - DNA, 1317 bp, Artificial Sequence
  derived and/or modified sequence
atgccactaaacgtctcctttacaaataggaactacgacctcgattatgattcagtgcaaccgtacttttattgcgatgaggaggaaaatttttaccaacagcagcagcaatccgagctgcagccccctgccccatccgaggatatctggaagaaatttgagctcctgcctacaccgccactgtcccccagtaggcgctctgggttatgctctccatcttatgtcgccgtcactcctttttcacttagaggcgacaacgatggcggtgggggttctttttcaaccgcggatcagcttgaaatggtcaccgaattattgggcggggacatggttaaccaatctttcatctgcgaccctgacgacgagaccttcataaaaaatattatcatccaggattgtatgtggagcggcttctcagcagccgccaaactggtgtcagaaaagcttgcctcttaccaagctgcgagaaaggattcgggaagtcccaatcccgcacggggtcactccgtatgttccacttcatctctgtatctacaggatttgagcgctgcggcttccgagtgcatcgaccccagtgtcgtttttccgtaccctctgaacgattccagcagcccaaagagttgtgcaagccaggatagctctgccttcagcccaagctccgattctcttctgagcagcactgagtcatcccctcagggttccccagagcctctggtgcttcatgaggagactccccctactacttcgtccgactccgaggaggaacaggaagatgaggaagaaattgatgtggtatccgtggagaagagacaggctccgggcaagcggtcagaatctggaagcccatcagcaggaggtcacagcaaacccccgcacagccccctggtgctcaaaagatgccatgtctctacacaccagcataattacgccgcgccgcctagcacccggaaggattaccctgctgccaagagggtcaagctggatagtgttcgcgttctcaggcaaatctccaacaataggaaatgtacatcaccccggtcaagcgatacagaggagaatgtaaaacggagaacccataatgtgttggaacggcaacgtcgaaatgagcttaagcggtcctttttcgcgttgcgcgatcagatcccagaacttgaaaacaacgagaaagcccctaaggtggtgatcctaaagaaggcaaccgcatatattctctccgtccaggcggaggagcagaagctgatctctgaggaggacctccttcgcaagcgccgagagcagttaaagcataagttggaacagctccgaaattcatgcgcc

SEQ ID NO: 128956 - DNA, 1317 bp, Artificial Sequence
  derived and/or modified sequence
atgccactcaatgtgtccttcaccaaccgcaactacgacttggattacgatagcgtgcagccttacttctactgtgatgaggaggaaaacttttatcaacagcagcagcaatccgaactccaaccacccgccccttcggaagatatctggaagaagtttgagcttctgccgaccccaccgctttcaccttcgagaaggtccggtttgtgttccccttcatacgtcgcagtgaccccgtttagcctccgcggagacaatgatggaggaggaggatcatttagcacggcagaccagcttgagatggtgaccgagctccttggaggtgacatggtgaatcagtcgttcatttgtgatcccgacgacgaaactttcatcaagaatatcattatccaagactgcatgtggtcgggattctccgccgcagccaagctcgtgtcggaaaagctggcgtcctaccaggccgccagaaaagactccggatcaccaaaccctgcacgcgggcatagcgtttgcagcacctccagcctgtacctccaggacctgagtgcggctgctagcgaatgcatcgatccctccgtcgtattcccgtaccccctgaacgattcctcctccccgaagtcgtgcgcctcacaagatagttccgcattctccccgtcatccgactccctgctgtcgtcgaccgagtcgtcaccgcagggatcgccagagccactggtccttcatgaagaaaccccgcccactacctcgtctgactccgaagaagaacaggaagatgaggaagagatcgacgtcgtctccgtcgagaaacggcaagcgccaggcaaacgctctgagtcaggtagcccgtccgccggaggccactcaaagccgccacactcacctctggtgctgaagcgctgccatgtgtcaactcatcagcacaactacgccgctccaccgtcgactaggaaggactacccagccgctaagagggtgaaacttgattcggtgagggtgctgcgccagatctcgaacaatcgcaaatgcactagcccccggagctcagacactgaggaaaacgtgaagcggcggacccacaacgtgttggagaggcagcggcgcaatgaactgaagaggtctttcttcgctctgcgagatcaaatccccgaactggagaacaatgagaaagcacctaaggtggtcatcctcaaaaaggctactgcctacatcctgtcggtgcaagcggaagagcaaaaacttatcagcgaggaggatctgctgcgcaagagaagagagcagcttaaacacaagctggaacaactgcggaattcttgtgcg

SEQ ID NO: 128957 - DNA, 1317 bp, Artificial Sequence
  derived and/or modified sequence
atgcccctgaatgtgtctttcacaaacaggaattatgatctggactatgactcagtgcagccttacttctattgcgacgaagaagagaacttttatcagcaacagcagcagtccgaactccagccccccgctccttccgaggacatatggaaaaagttcgagctgcttcctactccgcctctgtcacctagccgaagaagcgggctgtgctctccatcttacgtggcagtcacacctttctcactgagaggggataatgatgggggtgggggatctttcagcaccgccgatcagctcgagatggtgacagaattgttgggtggcgatatggttaatcaaagttttatttgtgacccagatgatgagacgtttataaagaacatcattattcaggactgcatgtggtctggcttcagcgccgctgcaaagttggtttcagagaaactggcaagctaccaggccgcaaggaaggattctggatcacctaaccccgctcgaggtcactcagtttgcagtacgtctagtctctatttgcaggacctgtccgcagctgcttctgagtgtatagatcccagcgtggtttttccttaccccttgaacgacagtagcagcccaaagagctgcgcctctcaagacagctccgccttctccccaagttcagactctctgttgtcctctactgaaagctcaccacagggaagcccagagcctctggtactgcacgaggaaactccgcctactactagtagcgattccgaagaggaacaagaagatgaggaagagattgacgttgtctctgtggaaaagaggcaggcaccgggcaagaggtccgagtcaggttccccatcagccggggggcatagtaaacctcctcatagtcctttggtcctcaagagatgccatgtgagcactcaccagcacaattatgccgctcctccctcaacccgaaaggactatccagccgctaaacgggtcaaactggacagcgtgagagtcctgcggcagatttccaacaaccggaagtgcacgtcacccaggtccagcgataccgaggaaaacgttaaacgccggacccataatgtgctggagcggcagcgcaggaatgagctgaagaggtctttcttcgcattgagagaccaaatcccagaactggaaaataatgagaaggcacctaaggttgtgatccttaagaaagccaccgcttacatcttgtctgtgcaggctgaggagcaaaaactgatttcagaggaggacttgctcaggaagaggagggaacaactgaaacataaactcgaacagctgcggaatagctgtgca

SEQ ID NO: 128958 - DNA, 1317 bp, Artificial Sequence
  derived and/or modified sequence
atgccactcaacgtaagctttacaaacaggaactacgaccttgattacgatagcgtacagccatatttttattgtgacgaggaagagaacttctaccagcagcagcagcagtctgagctccaacccccagctccttcagaggatatctggaagaagttcgagcttctgcctacccccccactgtctcctagtcgtagatctggactgtgttccccttcatacgtcgccgtcactccatttagcttgcgcggtgacaacgatggcggtggtggcagctttagtactgctgatcagctggagatggtaacagagctgctgggcggtgacatggttaatcaatcatttatatgtgatcccgacgacgagacattcatcaagaacatcatcatccaggattgcatgtggtctggcttctcagccgctgcaaaactggtgagtgagaagcttgcctcataccaggcagcaaggaaggacagcggcagccctaaccccgccagaggtcattctgtgtgttctacatcatcattgtacctgcaagatctgtcagctgccgcaagcgagtgcatcgacccttctgtggtgtttccctaccctctcaacgactcatcatcccccaaatcctgcgccagccaggactctagtgcttttagccctagttccgactccctgctgagctccaccgagtcatcaccacagggtagtccagagcctctcgtcctgcacgaggagacaccaccaaccacaagctctgacagtgaagaagagcaggaggatgaggaagaaatagacgtggtcagcgtggaaaagaggcaggccccaggaaaaagatctgaatctggatccccaagcgctggcggacactctaagccccctcactctccccttgtattgaagcgttgtcatgtttccacccatcagcacaactatgctgctcccccttcaactagaaaggactatcctgcagccaagagagtcaagctggactcagtgcgtgtgctcaggcagatatctaacaacagaaagtgtacatctccacgtagtagcgacacagaggaaaacgtgaaacgccgcacacacaacgtgctggagcgccaacgccgcaatgagctgaaacgctccttctttgccctgcgcgaccaaattccagaactggaaaacaacgagaaagctcccaaggtagtcattttgaaaaaggctactgcctatatcttgtcagttcaagcagaggagcagaaacttatttccgaggaggacttgctcaggaagaggagggaacagcttaagcataagctcgaacagctgaggaactcatgcgcc

SEQ ID NO: 128959 - DNA, 1317 bp, Artificial Sequence
  derived and/or modified sequence
atgccgctgaacgttagctttactaacagaaactacgacctggactacgacagcgtgcagccatacttttactgtgacgaagaggaaaacttttaccagcagcagcaacagtccgaactgcaacccccagccccttcagaagatatctggaaaaagtttgaactcctgccgaccccaccgctgtcccccagccggagaagcgggctgtgttccccatcctacgtcgcggtcactccgttctccctcagaggagataatgacggaggaggcggatccttttcaactgcagaccaactggaaatggtgaccgagctcctgggcggggacatggtgaaccaatcgtttatctgcgacccggatgatgaaacgttcatcaagaacataatcattcaggactgcatgtggtcaggattctcggcggcggcaaagctggtgtcggagaagctcgcatcctaccaggccgcccggaaggatagcggctcgccgaaccccgcaaggggtcattcagtgtgctcaactagctccctctatctccaggatctgagcgcggctgctagcgagtgcatcgacccatcggtggtctttccgtaccctctcaatgactcctcctcgcctaagtcgtgcgccagccaggactcatcagcgttctcgccgtcatccgactccttgctcagctcgactgagtcctcaccacagggtagcccagagccactggtgctccatgaagaaaccccgccaaccaccagctcggactccgaggaagagcaagaggacgaggaggaaatcgatgttgtctccgtggaaaagcgccaggccccaggaaagagaagcgaatccggatctccatcggcaggtggccattcaaaaccgccccactcccccctggttctgaagcgatgtcatgtgtctacccaccaacacaactacgccgcgcccccgtcgacccggaaggattaccccgcggcaaagagagtcaagctggactcggtgcgggtgctgcgccaaatctccaacaataggaagtgtacctccccccggtcctcggacactgaggaaaacgtgaagcggcgcactcacaacgtcctcgaaagacagcgccgcaatgagctcaaacggtcgttctttgccctccgcgaccagatccctgagcttgagaataacgaaaaggctccgaaagtggtgatcctgaagaaagcgactgcatacatcctcagcgtgcaagccgaagagcagaaactcatttccgaagaagatctgctgcgcaaacggagggagcaactgaagcacaaattggagcaactgcgcaactcgtgcgct

SEQ ID NO: 128960 - DNA, 1317 bp, Artificial Sequence
  derived and/or modified sequence
atgcccctcaatgtcagcttcacgaaccgcaactatgacttagattatgacagcgtccaaccatatttctactgcgacgaggaggagaatttctaccaacagcagcagcagagtgagctgcagcctccagctccaagcgaagatatttggaaaaaattcgaactactgccgactcccccattgagcccatcccgacggtcaggattgtgtagtccatcctacgtggctgtgacccctttctctcttcgaggggacaacgatggagggggagggtcattctccaccgccgaccagcttgaaatggtgacggagctgcttgggggggatatggtcaatcaatcattcatttgtgaccctgacgatgagacctttatcaagaatattatcatacaggactgtatgtggagcgggtttagcgcagcggcaaagctggtctcagaaaaattggcctcctatcaggcagctcgtaaagatagcggtagcccaaatcccgccagaggacattcagtgtgtagcacgagttccctgtacctccaagatctgagcgcagctgcttctgagtgtatcgacccaagcgtggtctttccgtaccccctgaatgattcctcatcacctaaatcttgcgccagccaggactcaagcgctttctccccgtcatcggacagtctcctgagctccacagaatcgtccccccaaggtagcccagagcccttggtcttgcacgaggagactcctcccaccacatcttctgactctgaggaggagcaggaagacgaagaggaaatcgatgtcgtgagcgtggagaaaaggcaggcccccgggaagcggagcgaaagtgggtcaccatccgccggtgggcactccaagccaccccattcgcctttggtgctgaaacggtgtcatgtttctacgcaccagcacaattacgccgctcctcccagtacgagaaaggattaccccgctgccaagagggtgaaactggacagtgtaagagttttgagacagatctccaacaacagaaaatgcaccagccctaggtcctctgacacagaggagaacgtgaagcgccgcacccataatgtgctggagcggcagcgtagaaatgagctgaagcggtcttttttcgccttgagagaccaaatccccgaactcgaaaacaatgagaaggctcccaaagttgtgatcctgaagaaggcaacagcctatatcctaagtgtgcaggcggaggaacaaaaattaatctctgaggaagacctgcttcggaagagaagagaacagctcaaacacaagctggaacagctgagaaattcctgcgca

SEQ ID NO: 128961 - DNA, 1317 bp, Artificial Sequence
  derived and/or modified sequence
atgccacttaacgtgtccttcactaaccgcaactatgacctggactatgactccgtgcaaccttacttctattgtgatgaggaggagaacttctatcagcagcagcaacagtcagaacttcaaccaccggccccctcagaagacatctggaaaaagttcgaattgctcccaaccccccccctgagtccttctagacgctcagggctgtgctcccccagttacgtcgcggtgacccccttttcacttcggggcgataacgacgggggcggagggagcttcagcactgccgaccagctggagatggtcacagagctgctggggggagacatggtaaatcagtcgtttatttgcgacccggatgatgagacattcataaagaacatcatcatccaggattgcatgtggtctggcttcagcgcagccgccaagctggtgtctgagaagctagcatcataccaggccgcgcggaaagattccggatcacccaatccagctcgtggtcatagcgtttgcagcacttcctcactctaccttcaggatctcagcgctgctgcttctgagtgcattgatccgtccgtggtgtttccttatccacttaacgacagttcaagccctaaatcctgtgcgtcccaagatagttctgccttctcaccaagcagtgattctctgctgagcagcacggagagctctcctcaggggtcccccgagccattggttctgcacgaagagacgccccccacaacatcctctgattcggaagaagaacaagaggacgaagaggaaatcgacgttgtgtccgttgaaaaaagacaggcccctggaaaaaggtcggagagcggttctccatccgccggagggcacagcaagccaccgcatagccccttagtactgaaaaggtgtcacgtgtctacccaccagcataattatgccgcgccgccctcaacacgaaaggactatccggcggctaaacgggtgaagcttgatagcgttcgggtcctgcgacaaattagcaacaaccggaaatgtactagcccccgatcatcggacaccgaagaaaacgtgaagagaaggacacataacgtgctcgaaagacagaggcggaatgagctcaagagatccttttttgctttgagggatcagatacccgaacttgagaacaatgagaaggcacctaaggttgtgatcctgaaaaaagcaacagcttacatccttagcgtccaggccgaggagcagaaactcatctcagaggaagatcttctgagaaagagaagggaacagcttaaacacaaacttgagcagttacggaacagttgcgca

SEQ ID NO: 128962 - DNA, 1317 bp, Artificial Sequence
  derived and/or modified sequence
atgcctctcaacgtcagttttactaatcggaattacgacctggattacgacagcgtgcaaccttacttctactgcgacgaggaggaaaatttttatcaacagcagcagcagtctgaactccagcccccagccccctccgaagacatttggaaaaaattcgagctgttaccaacacctcccctctctccgagccgccggtccgggctgtgcagtccgtcctacgtggccgttacgcctttctctctccggggtgacaatgacggcggaggcggaagtttctctacagccgatcaactggaaatggtgaccgaactgttgggaggtgacatggtcaaccagagctttatctgcgatccagacgacgagacctttatcaagaatattataattcaggactgtatgtggtccggtttttcagcggcagctaagttggtgagcgagaagctcgccagctatcaggcggctcgtaaggactccggttcaccgaatcccgcacgtggccacagcgtctgttctacctcctctctgtacttgcaggacctgtccgccgctgcaagcgagtgcatcgacccaagcgttgtgttcccttatccattgaacgacagctctagccccaagtcctgcgccagtcaagactcctcagcattttcaccatcctcggatagcctgctgtcttccaccgaaagctcaccacaaggctcaccagagcccctggttctgcacgaagagactccacctactacaagctccgattccgaggaggagcaggaggatgaggaggaaattgacgtggtgtcagtggagaaaagacaggccccgggaaagcgatccgagagcggatcccccagtgctggtggacatagtaaacccccccattccccactggtcctgaagagatgtcacgtttctacccatcagcacaactatgcggcgcccccttctacacgcaaagattatcccgccgccaaacgagtgaagctcgattcagtgcgcgtgctgaggcagataagtaacaaccgcaagtgtacatcacctcggtccagcgatactgaggagaacgttaagcggaggactcacaatgtgctggaacgtcagcgacgaaatgagctgaagaggtcatttttcgccctgcgggaccagatcccagagctagagaacaacgagaaggcccccaaagttgtgatcctcaagaaggctacggcgtacatcctgtccgtccaggctgaggaacagaaattgatttccgaggaggacctcctgaggaagcgccgagagcagctgaagcacaagttagagcagcttcgtaactcatgcgca

SEQ ID NO: 128963 - DNA, 1317 bp, Artificial Sequence
  derived and/or modified sequence
atgcctttgaacgtgtcgttcactaataggaactatgacctggattacgactcagtgcagccgtacttctactgcgatgaggaagagaacttctaccagcaacagcagcaatcagaacttcagcctccggcgccgtcggaggatatctggaagaaattcgagttgctgccgacgccgccgctcagcccgagccgccggtcaggcctctgctccccaagctacgtggcagtgaccccgttctccctcagaggagacaatgacggaggagggggctcctttagcactgccgaccaactggagatggtgactgagctgctgggaggagacatggtgaaccagtccttcatctgcgatccggacgacgaaactttcatcaagaacatcatcatccaagattgcatgtggagcggattttctgcagcagctaaattggtgtcagagaaactcgcctcatatcaggcagccagaaaggactcgggcagccccaacccggccagaggacactcagtgtgcagcacttcgtcgctgtacctgcaagacctgtccgccgcagcttcggagtgcatcgaccctagcgtggtgtttccataccccttgaacgactcgtccagcccaaagtcgtgtgcgtcccaggacagctccgccttcagcccgtcctcggacagcctcctgtcatcgaccgagtcctcgccacaggggtccccggagccgctcgtcctgcacgaagaaaccccgccaacgacttccagtgatagcgaggaggaacaggaagatgaggaagaaatcgatgtggtttccgtggaaaagagacaggctcctggaaagcgctcggagtcgggaagcccgagcgccggaggacatagcaaaccgccccactctcctctggtcctgaaacggtgtcacgtctccacccaccagcacaactacgccgccccgccctcgactcggaaggactacccggccgcaaaacgggtgaagttggacagcgtccgggtgctccgccaaatctcaaacaacagaaaatgtacctcacctcgctcatccgacacggaagagaatgtgaaaaggaggacccataatgtccttgaacggcagcgccgcaacgaactgaagcggagctttttcgcgcttcgggaccagatcccagaactggagaataacgaaaaggccccgaaggtggtcatcttgaagaaggccacggcttacatcctttcagtgcaagctgaggaacagaaactgatctccgaagaggacctcctcagaaagcggcgcgagcaactgaagcacaagctggaacagcttagaaattcgtgcgca

SEQ ID NO: 128964 - DNA, 1317 bp, Artificial Sequence
  derived and/or modified sequence
atgcctctgaacgtgtcatttacaaataggaactacgacctcgattacgacagtgttcaaccatatttttactgcgacgaagaagagaacttctatcagcaacagcagcagagcgagctgcagccacctgctccatccgaggatatctggaagaaatttgagctcctaccaacacctcccctgagcccgtctagacggagcggcctctgctccccctcttacgtcgctgtgacgcctttcagtctccgaggagataatgatggagggggcgggtctttcagtactgctgaccagttagaaatggtgactgagctccttggcggggacatggtcaatcagagcttcatctgcgacccagacgatgagacttttatcaagaatatcattatccaagattgtatgtggtccggtttcagtgcagctgctaagctcgtttctgagaaactagcttcctaccaagccgcgagaaaggacagtgggtcacctaacccagctcgggggcactctgtttgtagcacgagcagcctctatctgcaagatctgtctgctgcggccagcgagtgcatagatccatcggttgtcttcccctacccactgaatgacagtagtagtcccaagtcctgcgcaagtcaggactctagcgcattctcaccaagttctgacagcctgctgagctccaccgagtcctccccacagggatcacctgagcctctcgtgctgcacgaggaaacccctcccacaacatcctccgattctgaggaggaacaggaggacgaggaggaaattgacgtcgtgtccgtggagaaacggcaggcaccagggaagcgatctgaatctggctccccctccgcagggggtcattccaagcctccgcactcccccctggtcctaaagcggtgtcatgtatctacccatcaacacaactatgccgctccccctagcacccggaaagactatcctgcggcaaagcgggtgaagctggattctgtgcgtgtgctgcgccagatcagtaacaaccgcaagtgcacgtctccaagaagttccgatactgaggagaacgtgaaacgacgaactcacaacgtcctagagcggcagcgacggaatgaactaaagaggtccttttttgctctgagagaccagatccctgagctggaaaacaacgagaaggctcccaaagtcgtcatcctgaagaaggctaccgcatacattttgtcagtgcaggcggaggagcaaaaactgatctccgaggaagacttgcttaggaagcgtcgtgaacagcttaagcataagcttgagcagctccgtaactcctgcgcc

SEQ ID NO: 128965 - DNA, 1317 bp, Artificial Sequence
  derived and/or modified sequence
atgccacttaatgtatcttttacaaacaggaactacgatctggactacgattccgtccagccctacttttactgtgatgaggaagaaaatttttaccagcagcagcagcagagcgaacttcagcctccagccccaagcgaagatatatggaaaaaatttgagctgctgcccacaccccctctctctccttctaggcgcagcggactgtgctctcccagctacgtcgcagtgactcccttcagtcttcggggggacaacgacggcggaggggggtctttcagcacagccgaccagctcgagatggtgacagagctgctcggaggcgatatggtcaatcagtcctttatttgcgatcccgatgatgaaacatttattaaaaacatcataatccaagactgcatgtggtccgggttctctgctgcggcgaaattggtgtcagagaaacttgcgtcctatcaagcagccaggaaggacagcggtagcccaaatccagctagaggtcattctgtctgcagcacgagctctctgtacctgcaagatctgtccgcagccgcttcagaatgtatcgaccccagtgtggtgtttccttacccgcttaatgactcatcgtcaccaaaatcatgcgcatcacaggattcctcagcctttagcccttcatccgattcgctgctctcaagcactgagtcgagtccccaaggaagccccgaaccactcgtcctgcacgaagagacacccccaacaacttctagtgatagtgaggaagagcaggaagacgaggaggaaatcgatgtggtttccgtggaaaagcggcaggcccctggtaagagatctgagagcggtagcccatcagcaggcggtcatagcaagccgccgcactccccactcgtgttgaagcgctgtcatgtgagcactcaccagcataattatgccgcacctccaagtacacggaaggactatcccgctgcgaagcgcgtcaagctagactccgtccgggtactgaggcagatttcaaacaaccggaagtgtactagccccaggagtagcgacacggaagagaacgtgaagagacgaacacataacgtgttagagcgccagcgcagaaacgaactgaaacgatcattttttgctctgagggaccaaatccccgagctggaaaataatgagaaggcacctaaagtggtcatactgaagaaagcaaccgcgtacatactgtctgtccaggccgaggaacaaaaactcatctccgaagaagatctgctgcggaagcgacgcgagcagctgaagcacaaacttgaacagttgaggaattcatgtgcg

SEQ ID NO: 128966 - DNA, 1317 bp, Artificial Sequence
  derived and/or modified sequence
atgccactgaacgtgtccttcaccaacaggaactacgacctggattacgattcagtgcagccgtacttctactgcgatgaagaagagaatttctaccaacaacagcagcagtcggaactccagccgccggccccgtcagaggacatctggaagaagtttgaacttctgccgactccgcccttgagcccgtccaggcgctccggcctgtgctccccgtcctacgtggctgttaccccgttttctctgcgcggagacaacgacggaggtggtgggtccttctccactgccgaccagttggaaatggtgactgagctccttggaggagatatggtgaatcagagcttcatctgcgacccggatgatgaaaccttcatcaaaaacatcatcatccaggattgcatgtggtctggcttcagcgcagccgcgaaactggtgagtgaaaaacttgcttcataccaggctgcccggaaggactcgggatccccgaatcccgcccgcggacactccgtctgctcgacctcgtcgctctacctgcaggatctgtcagcagcggcctcggaatgcatcgacccctctgtcgtctttccgtacccgttgaatgattcaagctcgccgaaaagctgcgcctcacaggattcttcagcgttcagcccttcatcagactcgttgctgagctccactgaatcgagcccgcagggatcgccggagcctctggtcctccacgaggaaactccgccaacgacctcatcggacagcgaagaagagcaagaggacgaggaagaaatcgatgtggtatcggtggagaagagacaggcccctgggaagcgcagcgaatcgggatctccttccgcaggaggccattcgaagcctcctcattcaccgctggtgctgaagcgctgccacgtgtccactcaccaacacaactacgcggcgcccccatcgactagaaaggactatcctgccgcaaagagagtgaaactcgactcagtgagggtcctccgccaaatctcgaataatcgcaaatgtacctcaccgcgctcatcagatacggaggagaacgtgaaacgccgcacccacaatgtcttggagcgccagagacggaacgagctcaagcggtcgttcttcgcgctgcgcgaccagatcccggagttggaaaacaatgaaaaggcaccaaaagtcgtgatcctcaagaaagcaacggcctatattctcagcgtgcaagcggaggaacagaagctgatctccgaagaggacctcctgcgcaagagacgcgaacaactgaagcacaaactcgagcagctgagaaactcgtgtgca

SEQ ID NO: 128967 - DNA, 1317 bp, Artificial Sequence
  derived and/or modified sequence
atgccactgaatgtgagcttcactaacagaaactacgacctggattacgactcggtgcagccttacttttactgtgatgaagaggagaacttctatcagcaacaacaacaatcagagctgcaaccacctgcgcccagcgaggatatctggaagaaatttgaacttctgcctaccccgccactgtcaccaagccgcaggtcgggactctgttcaccttcgtacgtggcagtcacgcctttttcccttcgcggagataatgatggtgggggtgggtcgttctctactgccgatcaattggaaatggtgactgagcttttgggaggagatatggtgaaccaatcgttcatctgtgatcctgacgatgaaactttcataaagaacatcatcattcaagactgcatgtggtcgggatttagcgcagcagctaaacttgtctccgaaaagttggcgagctatcaggcagctagaaaggattccggttcgcctaatcctgctagggggcactcagtgtgttcgacttccagcctttacctgcaagatctgagcgcagccgctagcgaatgcatagacccatccgtggtgttcccatacccgctgaatgattcctcatcaccaaaatcgtgcgcatcacaggattccagcgctttcagcccatcgtcggactcgcttcttagctccactgaatcgtcccctcaaggctcgcctgaaccgcttgtgcttcacgaggagactcccccaaccacctcctcggactcggaagaagagcaggaggatgaagaagaaattgatgttgtgtcggtggagaagcggcaggctccgggaaagaggtcagaatcgggatccccaagcgcgggtggtcatagcaagcccccgcattcaccactggtgctcaagcgatgtcatgtctcgactcatcaacataactacgcagccccgcccagtaccagaaaagattaccctgccgcaaagagggtgaaactggactcagtcagagtgctgagacaaatttctaataacagaaaatgtacctcgcctcgttccagcgatactgaagaaaacgtgaagagaaggacgcataacgtgcttgaaagacagcgcagaaatgaattgaaacggagcttctttgcacttagagatcaaatacccgaactggaaaacaatgaaaaggccccgaaggtagtgattctgaaaaaggcgaccgcctacatactgtcggtccaagcagaagagcaaaaactgattagcgaagaagatctgctgcgtaagcgcagagaacagcttaagcataagctcgaacagctccggaattcgtgcgca

SEQ ID NO: 128968 - DNA, 1317 bp, Artificial Sequence
  derived and/or modified sequence
atgcccctgaatgtctcttttaccaatcgaaattacgatcttgactacgactccgttcagccctacttctattgtgatgaggaagagaatttctatcagcagcagcaacagtctgagctacagccgccagccccttcagaggacatctggaagaagttcgaactgctgcctacacccccgctatcaccttctcgcagatcaggcctatgtagcccctcctacgtagccgttaccccctttagcttgcgcggcgacaatgacggcggcggaggaagcttctccaccgctgatcagctagagatggtgacagagctgctgggtggggacatggtgaatcagtccttcatttgcgatcccgacgatgaaacctttatcaagaatattattattcaggattgtatgtggagcgggttcagcgctgccgccaagctggtttccgaaaagctcgccagttaccaggccgccaggaaggattcaggtagtcccaatccggcacgggggcacagcgtatgtagcacttcttctctgtatcttcaggatctgagcgccgcagcttcggaatgtatcgatccctccgtggtgttcccctatccactcaacgattccagtagccccaaatcctgtgcgtctcaggattctagcgccttcagcccgtcttccgacagcttactctctagtactgaaagtagcccacaggggagtcctgagccgctggtgctgcacgaagagaccccccccacaacatcttccgactccgaggaggagcaggaggatgaagaggaaatcgacgtggtcagtgtggagaaacgacaggcccctggaaagcggtccgagtcgggatctccttccgcagggggacacagcaagccccctcactcccccctggtgctcaaacgatgtcacgtcagcactcatcagcacaattatgctgccccccctagcaccaggaaagattaccccgccgccaagagggtgaagctggactctgttagggtcctacggcagatcagcaataatcgaaaatgcacttctcctcggagcagtgacacggaggagaacgtgaaaaggagaacccacaatgtcctcgagcgccaaaggcggaatgagctcaaaagatcattctttgcacttcgcgaccagattcctgagctcgagaacaacgaaaaggccccaaaagtcgtgattctgaaaaaggctaccgcatacatattgagcgtgcaggccgaggagcagaagctgatttccgaggaagacctgctcaggaagcggcgcgaacagctcaagcataagctagaacagcttaggaattcgtgcgct

SEQ ID NO: 128969 - DNA, 1317 bp, Artificial Sequence
  derived and/or modified sequence
atgccacttaatgttagctttactaacagaaattacgatcttgattacgactcggtccagccatacttttactgtgatgaagaggaaaatttttatcaacaacaacagcaatctgaattacagccaccggcaccttcagaggatatttggaaaaaattcgagttgctgccaacgccaccattgtcgccaagtcgtcgatcaggactctgctctccatcatacgttgctgtgactccattttctttgcgtggagataatgatgggggcggaggatcattctccacagcggaccaactcgaaatggtcacagagttgttgggtggagatatggttaaccaatcttttatttgtgatccggatgatgaaactttcattaagaatatcatcattcaagattgtatgtggtcgggcttttcagctgccgccaagcttgtttctgaaaaacttgcctcttatcaggcagcacgaaaagatagcggatctccaaacccggccaggggacattcagtatgttctacgagctccctttatttacaagatttgtccgctgcggcatccgagtgcattgatccgagcgttgtgtttccgtatcctcttaacgattcaagcagtcctaaatcgtgcgcgtctcaggattcctcagcattctccccctcatcagattcattactttcaagcacggagtcatcacctcaggggtcaccggaacctttggttcttcatgaggagactccacctaccactagctctgattcggaagaggaacaagaagatgaggaagaaatagatgttgttagcgtcgagaaacgacaggcaccaggtaagcgatctgagtctgggtcaccatccgcgggaggacattcaaagccgccacattctccgctcgtactcaaaaggtgtcacgtgtcaacgcatcagcataattacgccgctccaccatcgactagaaaagactacccggctgctaagagagtcaagctagattcagttcgagtgttaagacaaatttccaataaccgtaagtgcacttctccacgtagttctgatactgaagaaaatgtgaaacgacgtacccacaatgtcctcgaacgtcagcgccgaaatgagttgaaacgttctttctttgctctaagggatcaaataccagaacttgaaaataatgagaaagcaccgaaggttgtgattctgaaaaaggctactgcctacatcttgagcgttcaggctgaggaacaaaagctaattagcgaagaggatctacttagaaagagaagggaacaacttaagcacaaacttgaacaacttcgaaatagctgtgct

SEQ ID NO: 128970 - DNA, 1317 bp, Artificial Sequence
  derived and/or modified sequence
atgccactgaacgtgtcgttcaccaaccgcaattacgatctcgactacgattcggtccagccttacttttactgtgacgaggaggagaacttttaccaacagcagcaacagagcgagctccagcctcctgccccgtcggaagatatctggaagaagttcgaactgctgcctactccgccattgagcccatcgcggcggagcggactgtgtagcccctcatacgttgccgtgaccccgttctccctccggggggacaacgatgggggaggcggatccttttccaccgcggaccaactcgaaatggtgaccgaactgcttggaggtgatatggtcaatcagtcgttcatctgcgacccagatgatgaaactttcatcaagaatatcattatccaagactgcatgtggtcaggattcagcgccgccgcaaagctggtgtccgagaagctggcttcctaccaagcagcgcggaaggactcgggatcaccgaacccagcgcgcggacattccgtttgtagcacctcgtcattgtacttgcaagacctctcggcggctgcctcggaatgcatcgatccttctgtcgtgtttccgtacccgttgaatgattcctccagcccaaaatcctgcgcctcgcaggacagctcagcattctcgccaagcagcgatagcttgctgagctcgacggaatcaagccctcaggggtccccagaaccgttggtgctgcacgaggaaacccctcctaccacttcctcggattcagaggaagaacaggaagatgaagaagagattgatgtggtgtccgtggaaaaacgccaggcgccaggcaagaggtcggaatcggggagcccaagcgcagggggccactcgaagccaccgcattcgccgctcgtgctgaagcgctgccacgtgagcactcaccaacacaattacgcggcccctcccagtaccagaaaagactaccccgcggcgaagagagtgaagctggattccgtccgcgtcttgcggcaaatctcgaacaatcggaagtgcaccagcccccgcagctcagataccgaggagaacgtgaagcgcagaactcataacgtcttggagcggcagaggagaaacgaactgaagcgctcattctttgcactccgcgaccagattccggagttggagaacaacgagaaggccccgaaggtggtcatcctgaaaaaggccaccgcttacatcctgagcgtccaggccgaggaacaaaagctgatctccgaggaggatctgctgcgcaagagacgcgaacagctgaaacacaagctcgagcaactcaggaactcttgcgcc

SEQ ID NO: 128971 - DNA, 1317 bp, Artificial Sequence
  derived and/or modified sequence
atgcccctcaatgtctcttttacgaataggaactacgacctcgactatgactcagttcaaccatatttctactgtgacgaggaggagaatttctaccagcagcaacagcagtccgagctccagccacccgctccatccgaagatatatggaaaaaattcgagctcttgcccacacctccactttctcccagcaggcggagtggcctctgcagcccatcctatgtcgccgttacaccctttagccttagaggagataatgacggaggaggtggtagcttcagtactgccgatcaactggaaatggtgactgagcttctcggcggagatatggtgaaccaaagctttatttgtgatcccgacgacgaaacattcattaagaatatcatcatacaggattgtatgtggtccggatttagcgccgcagctaagttggtgagcgagaaactcgcctcttatcaggccgcgcggaaagactccggatctccaaaccctgcaagaggacattcagtttgcagtacaagctcactgtatctccaggaccttagcgcagcagcgtcagagtgtatcgacccatccgttgtattcccataccccctcaatgattccagttctcccaaatcttgcgcttcccaggactcttcagcctttagcccgtcctcagactcactcctgagcagtaccgaaagtagcccccagggcagcccggagccgctggtgctgcacgaggaaactccccccactactagctctgatagcgaagaggagcaggaggatgaggaggagatcgacgtagtgtcagtagagaagcggcaggctccaggaaagcgcagcgaatcaggatcaccttccgcaggtggccactcaaagccgcctcattcccccctggtgctgaagcgatgtcacgtgagtacacaccagcataactacgctgctccgccctccactcggaaggactaccccgccgcaaagcgagttaagctcgattccgtgagggtccttaggcagatctccaataaccggaaatgcacctccccgcgcagttctgacaccgaggagaacgtgaagaggcggacccacaatgtcttggaacgccagcgacgcaatgagctcaagaggtccttttttgctctgcgcgaccagatccctgaactggagaataacgagaaagctcccaaggtggtaatcctgaagaaagctacagcatatattctgtccgtacaagccgaggagcaaaagctgatctctgaggaagacctgctgcgcaaacgacgcgagcagctcaaacataaactcgaacagttgcggaactcttgtgct

SEQ ID NO: 128972 - DNA, 1317 bp, Artificial Sequence
  derived and/or modified sequence
atgcctctcaacgtatccttcaccaaccgtaattacgatttggattatgacagtgttcaaccgtatttttattgcgacgaggaggagaacttttatcaacaacaacaacaaagtgaattgcaacctcccgctcccagtgaagatatttggaaaaagttcgagttgctgcccacaccgccgctgtctcccagtcgcagaagtggcttatgctctccatcttatgtagccgttaccccgttctcgcttcgcggagataacgatggagggggcgggtcgttctcgactgccgaccaactcgagatggtcaccgagctgttgggaggcgatatggtgaaccaatccttcatctgcgaccccgacgatgagaccttcattaaaaacattatcattcaggattgcatgtggtctggattttcggccgcggcgaagttagtgagcgaaaaattagcctcgtatcaggctgcacgcaaagatagtggtagcccaaatccagctaggggccattcagtctgcagcacgagttccctatatctgcaagatctctccgctgctgcgagtgaatgtatcgatccaagtgtagtgttcccctacccgctcaacgactcgtcgtcacctaagagttgcgcctcgcaggacagcagcgcattctcgccgagttcagatagccttttaagttcgactgaatcttcgccacaaggatctcctgagcccctggttctccacgaggaaacaccccctaccacttctagcgactcggaggaagagcaggaagatgaggaggagatcgatgtagtaagcgtagagaaacgacaagcgccggggaaacgcagtgaaagtggttcgccaagcgctggcggacatagcaagcccccccactcccctctggttctcaagcgctgccacgtgtccacccaccagcacaactacgccgcgcctccgagtactcggaaggattacccagctgccaaacgggtaaaactagatagcgtccgggttcttcgccaaatttcaaacaatcgcaagtgtacgtctccacgctcgtcggacactgaggaaaatgtgaaacgccgaacacataatgttctcgagcgtcagcgacgaaacgagctgaagcgcagcttcttcgcattgcgcgatcaaatccctgaactcgaaaacaatgagaaggcccctaaagttgtcattttaaaaaaagccactgcttatatattgtctgtccaagctgaagagcagaagctgatcagtgaggaggacctcctgcggaagcgaagagaacagcttaagcacaaattggagcaacttcgtaactcctgcgcc

SEQ ID NO: 128973 - DNA, 1317 bp, Artificial Sequence
  derived and/or modified sequence
atgcctcttaatgtatcttttactaatcgtaattatgaccttgattatgattcagttcaaccatatttttattgtgatgaggaagagaatttctatcaacaacaacaacaatcagaacttcaaccacctgcaccatcggaagatatttggaaaaaatttgaattattaccaacacctccattatccccatcaagaagatcaggattatgttcaccatcttacgttgcagttacaccattttcattaagaggagataatgatggaggaggaggatcattttcaactgctgatcaattagaaatggtaactgaattattaggaggtgatatggttaatcaaagtttcatctgtgatcctgatgacgaaacatttatcaaaaatattattattcaagactgtatgtggtcaggattttctgctgcagctaaattagtatcagaaaaattagcatcatatcaagctgctcgtaaagactcaggaagtccaaatcctgcaagaggacattctgtttgttcaacttcttctctttatcttcaagatttatctgctgctgcatcagaatgtattgatccatcagtagtttttccttatcctttaaatgatagttcatcaccaaaatcatgtgcttcacaagactcttctgctttctctccatcatcagacagtttactttctagtactgaaagttcaccacaaggatcaccagaacctttagttcttcatgaagaaactccaccaactacatcatcagattctgaagaagagcaagaagatgaagaagaaattgacgttgtttcagttgaaaaaagacaggcacctggaaaaagatctgaatcaggaagtccttctgcaggtggacattcaaaacctccacactcaccattagttttaaaaagatgtcatgtttctactcatcaacataactatgcagctccaccatctacaagaaaggattatccagctgctaaaagagttaaattagattctgtaagagttcttagacaaattagtaataatagaaaatgtacatctccaaggtcatcagatactgaagaaaatgttaaacgaagaacacataatgtattagagcgacagagaagaaacgaattgaaaagatcatttttcgcccttcgagatcaaattcctgaattagaaaataatgaaaaggctccaaaggttgttattttaaaaaaagcaactgcttatattctttcagtacaagcagaagaacaaaaattaatttctgaagaagatttattaagaaaacgaagggaacaacttaaacataaattagaacagctaagaaacagttgtgca

SEQ ID NO: 128974 - DNA, 1317 bp, Artificial Sequence
  derived and/or modified sequence
atgccactcaacgtctcatttaccaaccgcaattacgatctcgattacgattcggtccaaccatacttctactgtgacgaagaagaaaacttttaccagcaacaacaacaatccgagctccaacctcctgcaccatcagaggacatctggaagaaatttgagctgttgcctaccccgcctctttcgcctagcagacggtcaggtctttgttcaccttcgtacgttgctgtcacgcccttttcgcttcgtggagataacgatggaggtgggggttcattcagcaccgcagaccagctggagatggtgactgaacttcttggtggtgatatggtgaatcagagctttatctgtgaccctgatgatgaaacctttatcaagaacattatcattcaggactgtatgtggtcggggttctccgcagcagcaaagctcgtgtcggagaaacttgccagctaccaagcagcacggaaagactcgggttcccctaatccagcacgtggtcatagcgtctgctcgacgtcatccctttaccttcaagatctgtcggcggcggcatctgaatgtattgatccatcggtggtctttccgtaccctctgaacgacagctcctccccaaagagctgcgcatcgcaggactcctcggcatttagcccttcatcggattccctgctttcctcgactgaaagcagcccacaaggatcgccagaacctcttgtgcttcacgaagaaacccctcctaccacctcgtcggacagcgaggaggagcaagaagatgaagaagaaattgacgtggtgtcggtggaaaagcgccaagcccctggaaagagatctgaatccggcagcccatccgccggaggtcattccaagccacctcatagtccattggtgctgaagaggtgtcacgttagcacccatcaacacaattacgctgctcctccttctacgcggaaagattaccctgccgccaagcgggtgaaactggactcggtgagagtgctccggcagattagcaacaataggaagtgtacctcacctagatcctcggataccgaagagaacgtgaaaagaagaacgcacaacgtgctggaacggcaacgcaggaatgaacttaaaagatctttcttcgccctgcgtgatcagatccccgagcttgaaaacaacgaaaaggcacccaaggtggtgatcttgaagaaggccactgcatacatcctttccgtgcaggcagaagagcaaaaacttatttcggaagaggacctgctgcggaagaggcgagagcaacttaagcataagctggaacaactgagaaactcctgtgcg

SEQ ID NO: 128975 - DNA, 1317 bp, Artificial Sequence
  derived and/or modified sequence
atgcctctgaacgtgtcttttaccaatagaaattatgatctagattacgattctgtgcagccatacttctactgtgatgaagaggagaatttctaccagcagcagcagcagtcagagctacagccgccggcaccttctgaggatatttggaagaaatttgagctgctgcccacaccccctctcagtccgtctcgtcgcagcgggctatgctctccctcctacgtcgcagtgactcccttttcccttcgaggtgacaatgacggggggggcggatcattctccactgccgaccagctggaaatggtgactgagttgctgggaggtgatatggtgaaccagagttttatctgtgaccccgatgacgaaaccttcataaaaaacattattatccaggattgcatgtggtccggcttctcagcagcggcgaagttagtgtccgagaagttggcaagctaccaggccgcgcgtaaggattcgggaagccctaatcccgccagagggcattccgtgtgctcaacctccagcctgtacctgcaggatctttccgctgctgccagtgaatgcattgatccctccgtggtgtttccttacccactgaatgactcttcttctccgaaatcatgtgctagccaagacagcagcgcatttagcccatcttcagactccctcctttcctctaccgagtcctccccccaagggagcccagagccactagtgttgcatgaagagacaccacccaccactagttccgattctgaggaagagcaggaggacgaggaagagatagacgtggtcagtgttgaaaaacggcaggcaccaggaaagcgctcagagagtggttctccgtccgccggggggcactccaaacctcctcattctccccttgtattgaaacgctgtcacgtgtctacacaccagcataattatgcggcccccccatctacgagaaaagattaccccgcggcgaagcgggtgaagctcgatagcgttcgcgtcttgaggcagattagcaataatcggaagtgcacgtctcctcggtccagcgacactgaggaaaacgtgaaacgacgcactcacaacgttctggagaggcagcggcgcaatgagttaaagcgatccttcttcgcactccgcgaccagatcccagagttggaaaataacgaaaaggccccaaaggtagtcattctgaagaaggccactgcctacattctgtctgtacaggccgaggaacaaaagttgatttcggaggaagacctgctacgcaagcgcagagagcaactgaagcacaagctggagcaactgcggaattcttgcgcc

SEQ ID NO: 128976 - DNA, 1317 bp, Artificial Sequence
  derived and/or modified sequence
atgccacttaacgtatcatttactaaccggaattacgacttggactatgattcggtacagccatatttctattgtgatgaggaggagaacttctaccagcaacagcagcagagcgagctgcagccaccggctcccagcgaagatatctggaagaagtttgaactacttcccacccctcccctgtctcctagccggcggagcggcctgtgcagccctagctatgtggcagtcacccccttctctttgcggggggacaacgacgggggaggtggctcttttagtaccgcagaccagctcgagatggtgaccgagttgctcggaggtgacatggtgaatcagtcatttatttgtgaccccgacgacgaaactttcattaagaatatcattatacaggactgcatgtggtccggcttttccgctgctgccaagctggtttctgaaaaactggcaagttatcaagccgccagaaaagattccggaagtcctaatcccgctagaggccatagcgtgtgttctactagctccctgtacctgcaggatctctccgcagccgcatcggagtgcatcgaccccagcgttgtgtttccttatcccctgaatgacagttcctctcccaaatcctgcgcatcacaagactctagcgcgttttcaccctcatctgactccctcttatccagcacagaaagtagccctcagggctctcctgagccgctggtcctgcatgaggaaacaccgccgaccacctccagtgacagcgaggaagaacaagaagatgaggaggaaattgacgtggtcagcgttgaaaagagacaggcaccgggtaaacgtagcgagtctggatcgccgagtgcaggaggacacagtaaacctccccactctcctctggtgttgaaaaggtgtcacgtcagtacgcaccaacacaattacgccgccccaccctctacccgcaaggactatccagctgccaaaagagtcaaacttgactctgttagggtgctgagacagataagtaacaatcggaaatgcactagccctcgctcaagtgataccgaagaaaacgtaaaaagacggactcataatgtcctcgaacggcagaggcgaaatgaactgaagagatcattctttgcactgcgagatcagatccccgagctggaaaacaacgaaaaagcacctaaggtagtcattttaaagaaggctacagcgtatatcctgagtgttcaggccgaagagcagaaactcattagcgaggaggacctcctccggaagaggagggagcagctgaaacacaagctggagcaattgagaaattcgtgcgcc

SEQ ID NO: 128977 - DNA, 1317 bp, Artificial Sequence
  derived and/or modified sequence
atgcccctgaacgtgagcttcacaaatagaaattatgacctcgactatgactcagtacaaccttatttttattgtgatgaagaggagaatttttatcagcaacagcagcaatcagagctgcagccacccgccccgagcgaggacatctggaaaaaattcgagctgcttcccaccccgccattgtctccaagtcggcggagcgggctgtgctctcctagttacgtggcagtaacgcctttctcactgaggggcgataacgatggagggggagggtcgttctcgaccgctgaccagctcgaaatggttaccgaactcttggggggagatatggtgaaccagtctttcatttgtgatcccgacgacgagacttttatcaagaatatcataatccaggattgcatgtggagcggattcagcgccgcagccaagctcgtttctgagaagctcgcaagttaccaggcggctcggaaggactcaggctctcctaatcccgctcgggggcacagtgtgtgctcaaccagctctctgtacttacaggatctgagcgctgctgctagcgaatgtatcgaccccagcgtggtgttcccgtacccattgaacgactccagctcgccgaagtcttgtgcaagccaggacagttccgccttctccccttcgagcgactcattgctttcctccaccgagagctccccacaggggagtcctgaacccctcgttctgcatgaggagactccaccaactacttcctctgattccgaagaggagcaggaggacgaggaggaaatcgacgtcgtcagtgtcgagaaacggcaggctcctggcaaacggagtgaatccggaagtccaagcgccggaggacattctaagccgccccacagccctttagttctcaaacgatgtcacgtgagcacacaccagcataattacgcggccccaccatccactagaaaggactatcccgccgccaagagggtcaagctagatagcgtgcgggtactaagacagatctctaataatagaaaatgcacgagtccaaggtcaagtgacaccgaggagaatgtgaagcgacggacccataatgtgctcgaaaggcaaaggcgaaacgaactcaagcgtagcttttttgcactgcgggatcagatccccgagctagagaacaacgaaaaagcccctaaggtggtcattcttaaaaaggcgactgcctacatcctgagcgtgcaggccgaggaacagaagctgatttctgaagaagacctgctgcgcaagcgcagggagcaactgaagcataagctagaacagctgaggaattcttgtgcc

SEQ ID NO: 128978 - DNA, 1317 bp, Artificial Sequence
  derived and/or modified sequence
atgccgctcaatgtctcatttacgaatcgcaactacgacctggactacgattccgtccaaccgtacttttactgtgacgaagaagaaaacttctatcaacaacagcagcaatccgaactgcagccccctgcaccttcagaagatatttggaaaaagttcgagctgctgccgacgccacctctgagcccgagccggaggtccgggctgtgctcgcctagctacgttgccgtgaccccgtttagcctgcgtggagataacgacggcggaggaggatcgttctccactgcggatcaactggagatggtgaccgaactcctgggaggagacatggtcaaccagtccttcatttgcgaccctgatgacgaaacgttcattaagaacatcatcatccaggactgcatgtggagcggattcagcgcggcagcaaagctggtcagcgaaaagctcgcttcgtatcaagcggcacgcaaagattcaggatccccgaacccggcccgcggacattcggtctgctcaactagctcattgtacctccaagacctgtcagcggctgcatcggagtgtatcgacccatcagtggtgttcccgtacccgctgaacgactcctccagcccgaagtcgtgcgcctcccaggattcgtccgcgtttagcccaagtagcgattcgctgcttagcagcactgaatcgtcgccgcaaggctcacccgaaccattggtcctgcacgaagaaacccctccgaccacttcttccgactcggaagaagagcaggaagatgaagaggagatcgatgtggtttcagtcgagaaacggcaagcaccgggaaagagatctgagtccggatccccatcagcagggggccactccaaaccaccgcacagcccactcgtcctgaagaggtgccacgtgtccacgcaccagcacaattacgcagccccgccgtccaccagaaaagattacccagcggccaagcgcgtgaagctggacagcgtgcgggtcctccgccagatcagcaacaatcggaagtgtacctcgcctcgctctagcgacaccgaggagaatgtcaagagacggacccataatgtgctcgagcggcagcgcaggaacgaactcaaacggtcgttttttgccctgagagatcagatcccagaactcgaaaacaacgaaaaggccccgaaggtcgtgatcctgaagaaggccactgcctacatcctgtcagtccaggcggaagagcagaaactcatctcggaagaggatctgctgcgcaagcggcgggaacagttgaagcataagctggagcaactcagaaattcctgtgct

SEQ ID NO: 128979 - DNA, 1317 bp, Artificial Sequence
  derived and/or modified sequence
atgccactcaatgtaagctttactaatcgcaattatgaccttgactacgactcagttcagccctatttttactgtgatgaagaggagaatttttatcagcagcagcagcagagcgaattgcagcctcctgcccccagcgaagacatctggaaaaagtttgaactgttgcccacacctcccctgagcccttccagacggagtggcctttgttctcctagttatgtcgccgtgacaccgttctcactgcgaggagacaatgatgggggcgggggcagcttcagcactgctgatcagctggagatggtgactgaattgctggggggggatatggtgaaccagtcattcatatgtgatcccgatgacgaaacttttataaagaacatcatcatccaggactgcatgtggagcggcttcagcgctgccgctaagttggtgtctgaaaaactagcttcctatcaggctgcacgtaaagactcagggtcacccaatcccgctagagggcattcagtctgctccacatcctccctttatcttcaggatctgtctgctgccgcaagtgagtgcatcgacccatctgtcgtcttcccatacccgttgaacgattcatccagccctaaaagctgcgcaagccaggatagttcagcttttagtccgagtagcgattccctgctatcctccacagaatcctctccccaaggaagtcctgagcctctagtactgcacgaggagactccccccaccacatcctcagacagtgaagaagagcaggaagatgaggaagaaattgatgtggtgagtgtcgagaagagacaggcccccggtaagagaagtgagagtggtagtccctctgcagggggccactcaaaaccacctcacagccctctggtcttgaagcggtgtcacgtatctacacatcagcataattatgcagcacccccttcaacgcgcaaggattacccggcggcaaagagagtgaaactcgattcggtgagggtcttaaggcaaatctccaacaaccgtaagtgtacatcaccaaggtcctcggatacagaggagaacgttaagcggagaacacacaacgttctggagagacagcgtcgcaacgaactaaaaagatcgttttttgccctccgcgatcagatcccagaactggagaataatgaaaaggcgcccaaggtggtgatcttaaagaaggctactgcttacattcttagcgtgcaggcagaggagcagaagctcataagcgaggaggatcttctgagaaagcgcagggagcagcttaaacacaagctagaacaactcagaaactcctgtgct

SEQ ID NO: 128980 - DNA, 1317 bp, Artificial Sequence
  derived and/or modified sequence
atgcctcttaacgtgagctttaccaatcgaaactacgatcttgactacgactccgttcagccctatttctactgcgatgaagaagaaaacttttaccaacaacaacagcaatcggagctccagcctccggctccatcggaggacatttggaagaagttcgaactcctgcccactcctcctctgtccccatcgcggaggtccggtctgtgttccccatcctacgtggccgtgaccccatttagcctgcgcggagataacgacggtggaggtggctcattctcgactgcggaccaacttgaaatggtgaccgagctgcttgggggtgacatggtcaatcagtcctttatctgcgacccagatgatgaaaccttcatcaaaaacatcattattcaggattgcatgtggtcaggattttccgcagcggcaaagttggtcagcgagaagttggcatcataccaagccgcacgaaaagatagcggttccccgaatcctgcccgcggacacagcgtttgttccacctcatcactttacctgcaagatctctcggcagctgcaagcgaatgtatcgatccgtcggtggtttttccttatccactcaatgattctagctcccctaagagctgcgcgagccaagactcctccgcattttcgccatcatcggatagcctgctttccagcaccgaaagctcccctcagggcagcccggagccgttggtgctccatgaagaaactccgcctacgaccagctcagattcagaagaggaacaagaagatgaggaagagattgacgtggtcagcgtggaaaagagacaggcacctgggaagcgatctgagtcggggtccccctctgccggaggccattcaaagccgccacactctccacttgtgctgaaaagatgtcacgtctcgacccatcagcataactacgcagcgcccccatcgactagaaaggactacccggccgccaagcgggtgaaacttgatagcgtgagagtgctcagacagatcagcaataatcgcaaatgtactagcccgcgaagctccgacaccgaagaaaacgtcaaacgacgtactcataacgtactcgagcggcaaagacgcaacgagcttaagcgatcatttttcgcgctgcgggaccaaatccccgaactggagaacaacgaaaaggcgccaaaggtcgtgattctgaagaaagcaacggcatacatcctttctgtccaggctgaagaacagaagttgattagcgaagaggatcttctgagaaagcgccgtgaacaactcaagcataaactggaacaacttcggaattcctgtgcc

SEQ ID NO: 128981 - DNA, 1317 bp, Artificial Sequence
  derived and/or modified sequence
atgccgctgaacgtgtcgtttaccaaccgcaattacgatctcgattacgatagcgtgcagccttacttttactgtgatgaagaagagaacttttaccaacaacagcagcaatcggaactgcaacctcctgcaccatcagaagatatatggaagaagtttgaacttctgcctacgcctcctctgtcgccttcccgtcgatccggcctttgtagcccaagctatgttgccgtgactcctttttcgctgagaggagataatgacggtggtggtggttcgtttagcactgcggatcagctcgaaatggtgacggaacttctgggtggagatatggtcaatcagagcttcatttgcgatccggacgacgaaacctttatcaagaacattatcatacaggactgtatgtggtctggtttcagcgcggcggctaaattggtgtcggaaaagctcgcctcataccaggcggctagaaaagattcgggttccccgaaccctgcaagaggtcatagcgtctgtagcacttcttccctgtacctgcaagatctttcggcagcagcctcggagtgcattgatccttccgtcgtattcccgtatcctcttaacgactcctcctcccctaaaagctgtgcgagccaggactcctcagcatttagcccgagctcagactctcttctctcctcgactgaaagctccccccagggaagccctgagccacttgtgctccacgaggaaacccctccgactactagttccgatagtgaggaagagcaggaggacgaggaggagatcgatgtggtgtcggtggagaagcggcaagcaccaggtaaacgatcggaatcaggctccccctcggcaggcggccacagcaaaccaccgcatagccctcttgtgctgaagcgttgtcatgtgtccacccaccagcataactacgctgcccctccctcgacccgtaaggactacccagcagcaaaacgggtgaagctcgactccgtgagagtcctgcgacagattagcaacaataggaagtgcacctcccccaggtcatctgataccgaggaaaacgtgaagagacggacccataatgtgcttgaaaggcagcgccgtaacgagcttaaacgctcgttttttgccctgcgcgaccaaattcccgaactggaaaacaacgagaaagcccctaaggtggtcattctgaagaaggcgactgcatacattctgtcggtccaggctgaagaacaaaagttgatctcagaagaggatctgctgcgcaagcggagagaacaactgaagcataaactggaacaacttagaaatagctgtgcc

SEQ ID NO: 128982 - DNA, 1483 bp, Artificial Sequence
  derived and/or modified sequence
gggaaataagagagaaaagaagagtaagaagaaatataagagccaccatgcccctcaacgttagcttcaccaacaggaactatgacctcgactacgactcggtgcagccgtatttctactgcgacgaggaggagaacttctaccagcagcagcagcagagcgagctgcagcccccggcgcccagcgaggatatctggaagaaattcgagctgctgcccaccccgcccctgtcccctagccgccgctccgggctctgctcgccctcctacgttgcggtcacacccttctcccttcggggagacaacgacggcggtggcgggagcttctccacggccgaccagctggagatggtgaccgagctgctgggaggagacatggtgaaccagagtttcatctgcgacccggacgacgagaccttcatcaaaaacatcatcatccaggactgtatgtggagcggcttctcggccgccgccaagctcgtctcagagaagctggcctcctaccaggctgcgcgcaaagacagcggcagcccgaaccccgcccgcggccacagcgtctgctccacctccagcttgtacctgcaggatctgagcgccgccgcctcagagtgcatcgacccctcggtggtcttcccctaccctctcaacgacagcagctcgcccaagtcctgcgcctcgcaagactccagcgccttctctccgtcctcggattctctgctctcctcgacggagtcctccccgcagggcagccccgagcccctggtgctccatgaggagacaccgcccaccaccagcagcgactctgaggaggaacaagaagatgaggaagaaatcgatgttgtttctgtggaaaagaggcaggctcctggcaaaaggtcagagtctggatcaccttctgctggaggccacagcaaacctcctcacagcccactggtcctcaagaggtgccacgtctccacacatcagcacaactacgcagcgcctccctccactcggaaggactatcctgctgccaagagggtcaagttggacagtgtcagagtcctgagacagatcagcaacaaccgaaaatgcaccagccccaggtcctcggacaccgaggagaatgtcaagaggcgaacacacaacgtcttggagcgccagaggaggaacgagctaaaacggagcttttttgccctgcgtgaccagatcccggagttggaaaacaatgaaaaggcccccaaggtagttatccttaaaaaagccacagcatacatcctgtccgtccaagcagagactcaaaagctcatttctgaaattgacttgttgcggaaacaaaatgaacagttgaaacacaaacttgaacagctacggaactcttgtgcgtgataataggctggagcctcggtggccatgcttcttgccccttgggcctccccccagcccctcctccccttcctgcacccgtacccccgtggtctttgaataaagtctgagtgggcggc

SEQ ID NO: 128983 - DNA, 774 bp, Artificial Sequence
  derived and/or modified sequence
atgcccctgaacgtgagcttcaccaacagaaactacgacctggactacgacagcgtgcagccctacttctactgcgacgaggaggagaacttctaccagcagcagcagcagagcgagctgcagccccccgcccccagcgaggacatctggaagaagttcgagctgctgcccaccccccccctgagccccagcagaagaagcggcctgtgcagccccagctacgtggccgtgacccccttcagcctgagaggcgacaacgacggcggcggcggcagcttcagcaccgccgaccagctggagatggtgaccgagctgctgggcggcgacatggtgaaccagagcttcatctgcgaccccgacgacgagaccttcatcaagaacatcatcatccaggactgcatgtggagcggcttcagcgccgccgccaagctggtgagcgagaagctggccagctaccaggccgccagaaaggacagcggcagccccaaccccgccagaggccacagcgtgtgcagcaccagcagcctgtacctgcaggacctgagcgccgccgccagcgagtgcatcgaccccagcgtggtgttcccctaccccctgaacgacagcagcagccccaagagctgcgccagccaggacagcagcgccttcagccccagcagcgacagcctgctgagcagcaccgagagcagcccccagggcagccccgagcccctggtgctgcacgaggagaccccccccaccaccagcagcgacagcggcggcaccagaagatag

SEQ ID NO: 128984 - DNA, 1365 bp, Artificial Sequence
  derived and/or modified sequence
ctggacttcttcagagtggtggagaaccagcagccccccgccaccatgcccctgaacgtgagcttcaccaacagaaactacgacctggactacgacagcgtgcagccctacttctactgcgacgaggaggagaacttctaccagcagcagcagcagagcgagctgcagccccccgcccccagcgaggacatctggaagaagttcgagctgctgcccaccccccccctgagccccagcagaagaagcggcctgtgcagccccagctacgtggccgtgacccccttcagcctgagaggcgacaacgacggcggcggcggcagcttcagcaccgccgaccagctggagatggtgaccgagctgctgggcggcgacatggtgaaccagagcttcatctgcgaccccgacgacgagaccttcatcaagaacatcatcatccaggactgcatgtggagcggcttcagcgccgccgccaagctggtgagcgagaagctggccagctaccaggccgccagaaaggacagcggcagccccaaccccgccagaggccacagcgtgtgcagcaccagcagcctgtacctgcaggacctgagcgccgccgccagcgagtgcatcgaccccagcgtggtgttcccctaccccctgaacgacagcagcagccccaagagctgcgccagccaggacagcagcgccttcagccccagcagcgacagcctgctgagcagcaccgagagcagcccccagggcagccccgagcccctggtgctgcacgaggagaccccccccaccaccagcagcgacagcgaggaggagcaggaggacgaggaggagatcgacgtggtgagcgtggagaagagacaggcccccggcaagagaagcgagagcggcagccccagcgccggcggccacagcaagcccccccacagccccctggtgctgaagagatgccacgtgagcacccaccagcacaactacgccgccccccccagcaccagaaaggactaccccgccgccaagagagtgaagctggacagcgtgagagtgctgagacagatcagcaacaacagaaagtgcaccagccccagaagcagcgacaccgaggagaacgtgaagagaagaacccacaacgtgctggagagacagagaagaaacgagctgaagagaagcttcttcgccctgagagaccagatccccgagctggagaacaacgagaaggcccccaaggtggtgatcctgaagaaggccaccgcctacatcctgagcgtgcaggccgaggagcagaagctgatcagcgaggaggacctgctgagaaagagaagagagcagctgaagcacaagctggagcagctgagaaacagctgcgcctag

SEQ ID NO: 128985 - DNA, 1263 bp, Artificial Sequence
  derived and/or modified sequence
atgcccctgaacgtgagcttcaccaacagaaactacgacctggactacgacagcgtgcagccctacttctactgcgacgaggaggacatctggaagaagttcgagctgctgcccaccccccccctgagccccagcagaagaagcggcctgtgcagccccagctacgtggccgtgacccccttcagcctgagaggcgacaacgacggcggcggcggcagcttcagcaccgccgaccagctggagatggtgaccgagctgctgggcggcgacatggtgaaccagagcttcatctgcgaccccgacgacgagaccttcatcaagaacatcatcatccaggactgcatgtggagcggcttcagcgccgccgccaagctggtgagcgagaagctggccagctaccaggccgccagaaaggacagcggcagccccaaccccgccagaggccacagcgtgtgcagcaccagcagcctgtacctgcaggacctgagcgccgccgccagcgagtgcatcgaccccagcgtggtgttcccctaccccctgaacgacagcagcagccccaagagctgcgccagccaggacagcagcgccttcagccccagcagcgacagcctgctgagcagcaccgagagcagcccccagggcagccccgagcccctggtgctgcacgaggagaccccccccaccaccagcagcgacagcgaggaggagcaggaggacgaggaggagatcgacgtggtgagcgtggagaagagacaggcccccggcaagagaagcgagagcggcagccccagcgccggcggccacagcaagcccccccacagccccctggtgctgaagagatgccacgtgagcacccaccagcacaactacgccgccccccccagcaccagaaaggactaccccgccgccaagagagtgaagctggacagcgtgagagtgctgagacagatcagcaacaacagaaagtgcaccagccccagaagcagcgacaccgaggagaacgtgaagagaagaacccacaacgtgctggagagacagagaagaaacgagctgaagagaagcttcttcgccctgagagaccagatccccgagctggagaacaacgagaaggcccccaaggtggtgatcctgaagaaggccaccgcctacatcctgagcgtgcaggccgaggagcagaagctgatcagcgaggaggacctgctgagaaagagaagagagcagctgaagcacaagctggagcagctgagaaacagctgcgcctag

SEQ ID NO: 128986 - DNA, 1362 bp, Artificial Sequence
  derived and/or modified sequence
ctggacttcttcagagtggtggagaaccagccccccgccaccatgcccctgaacgtgagcttcaccaacagaaactacgacctggactacgacagcgtgcagccctacttctactgcgacgaggaggagaacttctaccagcagcagcagcagagcgagctgcagccccccgcccccagcgaggacatctggaagaagttcgagctgctgcccaccccccccctgagccccagcagaagaagcggcctgtgcagccccagctacgtggccgtgacccccttcagcctgagaggcgacaacgacggcggcggcggcagcttcagcaccgccgaccagctggagatggtgaccgagctgctgggcggcgacatggtgaaccagagcttcatctgcgaccccgacgacgagaccttcatcaagaacatcatcatccaggactgcatgtggagcggcttcagcgccgccgccaagctggtgagcgagaagctggccagctaccaggccgccagaaaggacagcggcagccccaaccccgccagaggccacagcgtgtgcagcaccagcagcctgtacctgcaggacctgagcgccgccgccagcgagtgcatcgaccccagcgtggtgttcccctaccccctgaacgacagcagcagccccaagagctgcgccagccaggacagcagcgccttcagccccagcagcgacagcctgctgagcagcaccgagagcagcccccagggcagccccgagcccctggtgctgcacgaggagaccccccccaccaccagcagcgacagcgaggaggagcaggaggacgaggaggagatcgacgtggtgagcgtggagaagagacaggcccccggcaagagaagcgagagcggcagccccagcgccggcggccacagcaagcccccccacagccccctggtgctgaagagatgccacgtgagcacccaccagcacaactacgccgccccccccagcaccagaaaggactaccccgccgccaagagagtgaagctggacagcgtgagagtgctgagacagatcagcaacaacagaaagtgcaccagccccagaagcagcgacaccgaggagaacgtgaagagaagaacccacaacgtgctggagagacagagaagaaacgagctgaagagaagcttcttcgccctgagagaccagatccccgagctggagaacaacgagaaggcccccaaggtggtgatcctgaagaaggccaccgcctacatcctgagcgtgcaggccgaggagcagaagctgatcagcgaggaggacctgctgagaaagagaagagagcagctgaagcacaagctggagcagctgagaaacagctgcgcctag

SEQ ID NO: 128987 - DNA, 774 bp, Artificial Sequence
  derived and/or modified sequence
atgcctctgaacgtttcttttaccaaccgaaactacgacctggactatgacagtgtgcaaccttatttctattgcgacgaagaagaaaatttctaccagcagcaacagcagagtgagttgcagccgccagctcctagcgaagacatctggaagaagttcgagctgctccccacgcctcccctttcgcccagcaggaggtctggcctctgcagtcccagctatgtggctgtcaccccattcagtctgaggggcgacaatgatggaggcggcggctcatttagtactgccgaccagttggagatggtcactgaactattagggggagacatggttaatcagtcctttatctgtgatcccgatgacgagactttcataaaaaacattataatccaggattgcatgtggtccggattttctgccgccgctaagctggtgagtgaaaaactagcatcatatcaagccgctcgcaaggacagtggctcgcctaatcccgcacgcgggcacagcgtatgctctacttcttcgctgtatctgcaggatttgagcgcggccgccagtgaatgtatcgacccctcagtggtgttcccttatcctctgaatgatagcagttcccccaagagctgcgcaagtcaagactctagcgcattttcaccctcatcggatagcctgctgtcctcgaccgagtctagcccccagggctcccccgaacccttggtgctccacgaggagactccccctaccacatcctctgattcaggagggacaaggcggtag

SEQ ID NO: 128988 - DNA, 1365 bp, Artificial Sequence
  derived and/or modified sequence
ttagattttttcagagtggtggagaaccagcagccccctgcaaccatgccacttaatgtatcgttcactaatcgcaactatgacttggactacgactctgtccagccttacttctattgcgatgaggaggaaaatttctatcagcagcagcagcaaagtgaactccagcccccggcccccagcgaagatatttggaaaaagttcgagctgctgccaactcccccattgtcgccttctcggcggagcggcctttgctcgcctagctatgtggcagttacacctttctcattgagaggagataatgatggcgggggcggctccttttcaacagctgatcagctggagatggtgactgaactgcttgggggcgacatggtgaaccagagttttatctgcgatcctgatgacgagacattcattaaaaacatcataatccaggattgcatgtggtctggtttctcagccgccgctaagttagtctccgaaaaactcgcctcctaccaggccgcccggaaagacagcggctccccaaatcctgcgagggggcattccgtctgctctacgtcctcactgtacctgcaggatctctcagctgccgcaagtgaatgcattgacccatccgtcgtttttccatatcccttgaacgactcatccagccccaagtcatgtgcctcacaggactcttctgcattctccccctcctccgatagtctgctgtcttccaccgagtccagtccgcagggctctccagagccattggtcctgcacgaggagaccccacccacaacgtccagcgattcagaggaggaacaggaagatgaggaagaaatcgatgtcgtgtcggtggagaaacgtcaggcccccggcaagaggtcggagtccggatcgccgtctgccggtgggcactccaaaccgccccattctcccctggtcctgaagcgttgccatgtgtctacccaccaacataattatgccgcacccccctcaacccggaaggactaccctgccgctaagcgggtgaaacttgacagcgtgcgagtgctgcgccagatctccaacaacagaaagtgcacttccccccgaagcagcgatacggaagagaacgtgaagcggcggacacataatgtgctggagcgccagagacgaaatgagcttaagaggtcttttttcgccctccgggaccagatcccggaacttgaaaacaacgagaaggctcctaaagtggtgatcctgaagaaagccactgcctacatcctgagcgtccaggccgaagagcagaagttaatatcagaggaggacctgctcagaaaacggagggagcagctgaaacacaaactcgaacagctgagaaattcttgtgcgtag

SEQ ID NO: 128989 - DNA, 1263 bp, Artificial Sequence
  derived and/or modified sequence
atgccactcaatgttagttttaccaatagaaattatgacttggactacgatagcgttcaaccctacttttattgcgacgaggaggacatttggaaaaagtttgaacttttacccacgccacctttaagcccgtctcggcggtctggattgtgttcgccttcatacgtcgcagtaacacccttcagtcttaggggtgacaacgatgggggcggtggcagtttctccacagcggaccagctggagatggtgacggaactactcggcggggacatggtcaaccaatcttttatctgcgatccagacgatgagacatttattaagaacattatcatccaagattgcatgtggagcggattcagcgcagccgccaagctggtgtcagagaaactggcatcttaccaagccgcccgcaaagatagcggcagccccaaccctgcgagaggccactctgtgtgctccacctctagtctatatcttcaggatctttcagccgccgcaagtgagtgcattgatcctagcgttgtatttccctaccccctgaacgactcatcatccccaaagtcgtgcgcctcacaggatagttctgctttcagtccatcatctgattctcttctctccagtaccgagagttctccacagggcagccctgagccactggtgctacacgaggaaaccccccctacgacgagctccgatagcgaggaggaacaggaagatgaagaggaaatagatgtggtgagcgtggaaaaacgacaggcccccggtaagaggagtgagtctgggagtccttcagccggtggccactccaaaccaccccatagtccactggtcctaaaaaggtgccatgtgtcgacccatcaacataattatgccgcaccacccagcacacgcaaggattacccagccgcgaaaagagttaaactggattctgtcagggtcttaagacagataagcaacaataggaaatgtactagcccacgcagttccgacacagaggaaaatgtcaagcggcgaacccataacgtactcgagagacagcgtcgcaatgagctcaaacggtctttcttcgcattgcgagatcagatccctgaattggagaacaacgagaaagcccccaaagtggttattctaaaaaaggcaacagcttacattctcagcgtacaagcagaggaacagaagttgattagcgaggaagacctgttgaggaaacgtcgtgagcagcttaagcacaaactcgagcagttgcggaattcatgcgcttag

SEQ ID NO: 128990 - DNA, 1362 bp, Artificial Sequence
  derived and/or modified sequence
cttgatttctttcgagtagtagagaaccagcccccagcaaccatgcccctgaatgttagctttacaaacagaaactacgatctggactatgacagcgtccagccatacttctactgcgatgaagaggaaaatttctaccaacagcagcagcagagtgagcttcagcccccagccccgtctgaggacatctggaagaagttcgagctcctgcccactcccccgctaagtccgagccgcaggagtggactgtgttctcccagctacgtagccgtgacacccttctccctgagaggagataatgatggaggaggtggcagcttcagcactgcagatcaattagagatggtgactgaattactgggtggggacatggttaatcagtcttttatttgcgatccagacgatgagacgttcataaaaaatattatcattcaggactgtatgtggagcggcttttctgcggccgcaaagctggtctctgaaaaactcgcatcataccaggcagcaaggaaagatagcggcagccccaaccccgcaagaggccattcagtgtgctcaacctctagcctgtacttacaggatctgagtgcagctgcatccgaatgcattgacccttcggtagtgttcccgtatccactcaatgatagctcctctcctaagtcatgcgcatcgcaggattcttctgccttttctccttcctcagattctcttctttcctcaaccgaaagttctccccagggctcacccgaacccctcgtactgcacgaagaaactcctccaacgacaagttccgactccgaggaggaacaggaggacgaggaggaaatcgacgtagtctccgtcgagaaacggcaggcccccggaaagcggtctgagtccgggagcccgtccgccgggggacacagcaaaccccctcatagccccttagtcctgaaaaggtgccatgtctccacacatcagcacaattacgccgctcccccgtccacccgaaaagactatccagccgccaaacgtgtgaagctcgattcggttcgcgtgctgcgccaaatttctaataaccgtaaatgcactagccccaggtcctccgatactgaagagaacgttaaaaggcggacacataatgtcctcgagaggcagagacgcaacgagctgaagcggtcattcttcgctctgagggaccaaattccggagctagagaacaatgagaaggcccccaaggtcgttatattgaagaaggcgactgcatatattttgagtgtgcaggccgaggaacagaagctgatcagcgaagaagaccttctccggaagcggcgggaacagctgaagcataagctagagcagctgagaaattcatgtgcctag

SEQ ID NO: 128991 - DNA, 774 bp, Artificial Sequence
  derived and/or modified sequence
atgcccctgaatgtgtccttcaccaacagaaattatgacctggactatgacagcgtgcagccctacttctactgtgatgaggaggagaacttctaccagcagcagcagcagagcgagctgcagcccccagcccccagcgaggacatctggaagaagtttgagctgctgcccaccccacccctgagccccagcagaagaagtggcctgtgcagccccagctatgtggccgtgacccccttcagcctgcggggggacaatgatggcggcggcggcagcttcagcacagctgaccagctggagatggtgacagagctgctgggcggggacatggtgaaccagagcttcatctgtgaccctgatgatgagaccttcatcaagaacatcatcatccaggactgcatgtggagcggcttctctgctgctgccaagctggtgtctgagaagctggccagctaccaggccgccaggaaggacagcggcagccccaacccagcccggggccacagcgtgtgcagcaccagcagcctgtacctgcaggacctgtctgctgctgcctctgaatgtattgaccccagcgtggtgttcccctaccccctgaatgacagcagcagccccaagagctgtgccagccaggacagcagcgccttcagccccagcagtgacagcctgctgagcagcacagagagcagcccccagggcagccctgagcccctggtgctgcacgaggagaccccacccaccaccagcagtgacagcggcggcaccaggaggtag

SEQ ID NO: 128992 - DNA, 1365 bp, Artificial Sequence
  derived and/or modified sequence
ctggacttcttccgggtggtggagaaccagcagcccccagccaccatgcccctgaatgtgtccttcaccaacagaaattatgacctggactatgattctgtgcagccctacttctactgtgatgaggaggagaacttctaccagcagcagcagcagagcgagctgcagcccccagcccccagcgaggacatctggaagaagtttgagctgctgcccaccccacccctgagccccagccgccgcagcggcctgtgcagccccagctatgtggccgtgacccccttcagcctgcggggggacaatgatggcggcggcggcagcttcagcacagctgaccagctggagatggtgacagagctgctgggcggggacatggtgaaccagagcttcatctgtgaccctgatgatgagaccttcatcaagaacatcatcatccaggactgcatgtggagcggcttctctgctgctgccaagctggtgtctgagaagctggccagctaccaggccgccaggaaggacagcggcagccccaacccagcccggggccacagcgtgtgcagcaccagcagcctgtacctgcaggacctgtctgctgctgccagcgagtgcatcgaccccagcgtggtgttcccctaccccctgaatgacagcagcagccccaagagctgtgccagccaggacagcagcgccttcagccccagcagtgacagcctgctgagcagcacagagagcagcccccagggcagccctgagcccctggtgctgcacgaggagaccccacccaccaccagcagtgacagcgaggaggagcaggaggatgaggaggagattgatgtggtgtctgtggagaagaggcaggcccctgggaagaggtctgagagcggcagccccagcgctgggggccacagcaagccaccccacagccccctggtgctgaagcgctgccacgtgtccacccaccagcacaactatgctgccccacccagcaccaggaaggactacccagctgccaagagggtgaagctggacagcgtgcgggtgctgcggcagatcagcaacaacaggaagtgcaccagccccaggagcagtgacacagaagaaaatgtgaagaggaggacccacaacgtgctggagcggcagaggagaaatgagctgaagaggagcttctttgccctgcgggaccagatccctgagctggagaacaatgagaaggcccccaaggtggtgatcctgaagaaggccacagcctacatcctgtctgtgcaggccgaggagcagaagctgatcagcgaggaggacctgctgaggaagaggcgggagcagctgaagcacaagctggagcagctgaggaacagctgtgcctag

SEQ ID NO: 128993 - DNA, 1263 bp, Artificial Sequence
  derived and/or modified sequence
atgcccctgaatgtgtccttcaccaacagaaattatgacctggactatgacagcgtgcagccctacttctactgtgatgaggaggacatctggaagaagtttgagctgctgcccaccccacccctgagccccagccgccgcagcggcctgtgcagccccagctatgtggccgtgacccccttcagcctgcggggggacaatgatggcggcggcggcagcttcagcacagctgaccagctggagatggtgacagagctgctgggcggggacatggtgaaccagagcttcatctgtgaccctgatgatgagaccttcatcaagaacatcatcatccaggactgcatgtggagcggcttctctgctgctgccaagctggtgtctgagaagctggccagctaccaggccgccaggaaggacagcggcagccccaacccagcccggggccacagcgtgtgcagcaccagcagcctgtacctgcaggacctgtctgctgctgccagcgagtgcatcgaccccagcgtggtgttcccctaccccctgaatgacagcagcagccccaagagctgtgccagccaggacagcagcgccttcagccccagcagtgacagcctgctgagcagcacagagagcagcccccagggcagccctgagcccctggtgctgcacgaggagaccccacccaccaccagcagtgacagcgaggaggagcaggaggatgaggaggagattgatgtggtgtctgtggagaagaggcaggcccctgggaagaggtctgagagcggcagccccagcgctgggggccacagcaagccaccccacagccccctggtgctgaagcgctgccacgtgtccacccaccagcacaactatgctgccccacccagcaccaggaaggactacccagctgccaagagggtgaagctggacagcgtgcgggtgctgcggcagatcagcaacaacaggaagtgcaccagccccaggagcagtgacacagaagaaaatgtgaagaggaggacccacaacgtgctggagcggcagaggagaaatgagctgaagaggagcttctttgccctgcgggaccagatccctgagctggagaacaatgagaaggcccccaaggtggtgatcctgaagaaggccacagcctacatcctgtctgtgcaggccgaggagcagaagctgatcagcgaggaggacctgctgaggaagaggcgggagcagctgaagcacaagctggagcagctgaggaacagctgtgcctag

SEQ ID NO: 128994 - DNA, 1362 bp, Artificial Sequence
  derived and/or modified sequence
ctggacttcttccgggtggtggagaaccagcccccagccaccatgcccctgaatgtgtccttcaccaacagaaattatgacctggactatgacagcgtgcagccctacttctactgtgatgaggaggagaacttctaccagcagcagcagcagagcgagctgcagcccccagcccccagcgaggacatctggaagaagtttgagctgctgcccaccccacccctgagccccagcagaagaagtggcctgtgcagccccagctatgtggccgtgacccccttcagcctgcggggggacaatgatggcggcggcggcagcttcagcacagctgaccagctggagatggtgacagagctgctgggcggggacatggtgaaccagagcttcatctgtgaccctgatgatgagaccttcatcaagaacatcatcatccaggactgcatgtggagcggcttctctgctgctgccaagctggtgtctgagaagctggccagctaccaggccgccaggaaggacagcggcagccccaacccagcccggggccacagcgtgtgcagcaccagcagcctgtacctgcaggacctgtctgctgctgcctctgaatgtattgaccccagcgtggtgttcccctaccccctgaatgacagcagcagccccaagagctgtgccagccaggacagcagcgccttcagccccagcagtgacagcctgctgagcagcacagagagcagcccccagggcagccctgagcccctggtgctgcacgaggagaccccacccaccaccagcagtgacagcgaggaggagcaggaggatgaggaggagattgatgtggtgtctgtggagaagaggcaggcccctgggaagaggtctgagagcggcagccccagcgctgggggccacagcaagccaccccacagccccctggtgctgaagcgctgccacgtgtccacccaccagcacaactatgctgccccacccagcaccaggaaggactacccagctgccaagagggtgaagctggacagcgtgcgggtgctgcggcagatcagcaacaacaggaagtgcaccagccccaggagcagtgacacagaggagaatgtgaagaggaggacccacaacgtgctggagcggcagaggagaaatgagctgaagaggagcttctttgccctgcgggaccagatccctgagctggagaacaatgagaaggcccccaaggtggtgatcctgaagaaggccacagcctacatcctgtctgtgcaggccgaggagcagaagctgatcagcgaggaggacctgctgaggaagagaagagagcagctgaagcacaagctggagcagctgaggaacagctgtgcctag

SEQ ID NO: 128995 - DNA, 774 bp, Artificial Sequence
  derived and/or modified sequence
atgcccctgaacgtgagcttcaccaaccggaactacgacctggactacgactccgttcagccttacttctattgcgatgaggaggagaatttttatcagcagcagcagcagtccgagctccagcctcccgctccgagcgaagacatctggaagaagtttgaactcttaccgacccccccgctttccccctcaagacggtcggggctttgtagcccgagctatgtcgcagtgacccctttttctcttaggggagataatgacggcgggggaggcagcttttctaccgctgatcaacttgagatggttacagaacttctcggcggcgacatggtcaaccagtccttcatctgtgatccagatgacgaaaccttcataaaaaacatcataatccaggattgtatgtggtcaggattctctgccgccgcaaagctggtgtcagagaaacttgctagctatcaggctgccagaaaggactctgggtctccaaacccggcccgaggtcatagcgtgtgttccacaagttcactgtatctccaagatctgtccgccgcggcgagcgagtgcattgacccatcagtagtgttcccctaccctctgaacgactcctcatccccgaagagctgtgctagtcaagactcctcagcgttcagccctagttcagatagtctgctctctagtacagagtcaagcccgcagggtagtccggagcccttggtgcttcacgaggagacacccccaacaacatcctctgacagtggtggtacaagaaggtag

SEQ ID NO: 128996 - DNA, 1365 bp, Artificial Sequence
  derived and/or modified sequence
ctggacttcttccgggtggtggagaaccagcagccccccgccaccatgccgctgaatgtgtccttcaccaacagaaactacgatctggactatgactccgtgcaaccctacttttactgcgatgaggaagaaaatttctaccagcaacagcaacaaagcgagctacaaccaccagccccatcagaagatatctggaagaagttcgagctgctccccaccccacctttgagcccttctaggcggtctggcttgtgctcaccaagctatgtcgcagtcacccctttttctctgcgaggagataacgatggcgggggaggctcgttcagtaccgccgaccaattagaaatggtgacagagttactggggggggatatggtcaaccagagctttatatgtgatcctgatgacgagaccttcataaagaacatcattatccaggattgtatgtggtccggcttctccgctgcagctaaactagtgtctgagaaactcgcatcttaccaggctgcccggaaggattcaggatcacctaacccagccagaggccactcagtatgcagtacatcaagcctctaccttcaggacctctctgcagccgcatctgaatgtatcgacccgagcgtggttttcccttacccacttaacgatagctccagtcctaagtcatgcgcctcgcaggactccagcgctttttccccgtcctctgacagcctcctgagtagtacagaatccagcccacaaggcagtcccgagcctctggtattacacgaggaaactcctccgactacctcaagcgattctgaggaagagcaggaagatgaagaggagattgacgtggtgagcgtggaaaagaggcaagcccctgggaagcggagcgagagcggatcaccttcagcagggggccactccaaaccaccccactctccgttggtgctgaagcgctgccacgtgagcacgcaccaacacaactatgccgccccaccctccacgcgaaaagattatccagccgccaagcgggtgaagctggactccgtaagagttctgaggcaaatctccaacaaccgtaagtgtacaagccccaggagcagcgacacagaggagaacgtgaagcgcagaactcacaatgtgctggagcgacagagaaggaacgaactgaaacgctcattcttcgcccttcgcgatcagatcccagaattagaaaacaatgaaaaggctcctaaagtagtgatcctcaaaaaggcgacagcctatatcttgagtgtgcaggccgaagagcagaaattgatatctgaggaggacctgttaaggaagcggagagagcaactgaagcacaaactggagcaattacgcaactcctgcgcatag

SEQ ID NO: 128997 - DNA, 1263 bp, Artificial Sequence
  derived and/or modified sequence
atgcccctgaacgtgagcttcaccaaccggaactacgacctggactacgattctgtccagccttacttctattgtgatgaggaggatatctggaagaaattcgagctgctgcctacaccccctctctctccgtcacgccgttcagggctctgcagccccagctacgtggcagtcactcccttctctctccggggagacaatgatggagggggcggcagcttcagcaccgcggatcagctcgagatggttaccgaactcctcggaggtgatatggtgaaccagtcgttcatttgcgatcccgatgacgaaacattcattaaaaacattatcatccaggattgtatgtggagtgggttcagtgcggctgctaaattggtctctgagaaactcgcctcttaccaggcagcacgcaaggactctggaagccctaatcccgctcggggccacagtgtgtgcagcacctcttctctatatttgcaagatctgtcagctgctgccagcgagtgtattgaccctagtgtggtgttcccctacccactgaacgactccagctcccctaaatcctgtgcctcacaggacagctccgcgttctcccctagcagcgactctttgttgtcctctacagaaagcagcccccaaggcagtcctgagcccctggttctacacgaggagaccccccccacaacttcttccgacagcgaagaagaacaggaagatgaggaggagatagacgtcgtgagtgtagaaaagcggcaggcgccgggaaagaggtcagaatccgggagcccctccgcgggtggccactcaaaacctccccattctcccctggttcttaagaggtgccacgtctcgacacatcagcacaattacgctgcaccacctagtacccgcaaagattacccagccgccaaacgagttaagctggactccgtgcgagtgcttcggcagatctcgaataaccggaagtgtacttccccgagatctagtgatactgaggaaaatgtcaagagaaggacacataatgtgctcgagagacagcgtagaaatgaactgaaaagatccttctttgctttaagggaccagatcccagagctcgagaacaacgagaaggctcccaaagtggttatcctcaagaaggccaccgcttacattttgtcagtgcaggccgaagagcaaaagttgatttccgaggaagacctgctgcgtaagagaagagagcagctgaaacacaaactcgaacaacttcgaaacagttgcgcttag

SEQ ID NO: 128998 - DNA, 1362 bp, Artificial Sequence
  derived and/or modified sequence
ctggacttcttccgggtggtggagaaccagccccccgccaccatgcctctgaatgtgtcctttacaaaccgcaactatgatctggattatgattcggtgcagccctacttttactgtgacgaggaggagaacttttaccagcagcagcagcagtccgaactgcagccccctgctccctctgaggacatttggaaaaaattcgaactgctcccaaccccccccctctctccttcacgaaggtctggactgtgcagtccttcttatgttgctgtaactccattttcactccgaggcgacaacgacggaggcggtggtagttttagcacagcggatcagctggaaatggtgactgaattgctgggcggcgacatggtgaaccagagttttatctgcgatccagacgatgaaacctttattaaaaatatcatcatccaagactgcatgtggtctggcttcagcgccgccgcgaaactagtttcagagaagttagcgtcttaccaagccgcgaggaaggattccgggtcaccaaaccctgcccgcggacactccgtctgtagcacaagtagtttgtacctccaggatctgtctgccgccgcgagcgagtgtatcgatccatctgtggtgtttccttaccctctcaatgatagtagtagccccaaatcctgcgccagtcaggattcaagcgcattttctccatcctcagactcactcctgagttcgacggaaagctccccgcagggaagtcctgagcctctggtcctgcacgaagagacacccccaactacgagctctgacagtgaggaagagcaagaggacgaggaagagattgatgtggtgtcagtcgagaagaggcaggccccaggcaagaggtcagagtcagggagtcctagcgcaggaggtcattccaagccaccccactctccgcttgtactcaagagatgccatgtttctacacaccagcataattacgccgcccctccctccacgcggaaagattaccccgccgcaaaacgcgtcaagctcgattcagtaagagtcctccggcagattagtaataacagaaaatgcacctcgccacgatcctctgacactgaagaaaacgtaaaaagacgcacgcacaatgtcctggaacgacagcgacgtaacgagctgaaacggtcgttttttgcattgagagaccaaatccctgagctcgagaataacgaaaaggcccccaaagtcgttattctcaagaaggctaccgcttatatcctgtccgtgcaagcagaagaacaaaagttaatttctgaggaggatctcctccgtaagaggagagaacagttgaagcacaagcttgagcagctgcggaactcatgcgcatag

SEQ ID NO: 128999 - DNA, 774 bp, Artificial Sequence
  derived and/or modified sequence
atgcctctgaatgtcagctttaccaaccgcaattacgacttggattacgatagtgttcagccctatttctattgcgacgaagaagaaaacttttatcagcagcagcagcaatcagagttacagccccctgccccatcagaggatatatggaaaaaattcgagctgcttccgacgcctcccctgtccccatcccggagatccggcctgtgctctcccagctatgtagccgtaacgcctttttcgctgaggggggataacgatgggggtggcggttccttttctaccgcggatcagttggagatggtcactgaattgcttggcggagacatggttaatcagagctttatttgcgacccagatgatgaaacatttatcaagaatatcattatccaggattgcatgtggagcggattttccgctgccgctaagcttgtctcagaaaagctggccagttatcaggctgccagaaaggactcaggtagcccaaatcctgctcgtggacactccgtctgttcaacttcttctctgtacctgcaggacctgtcagcagccgctagcgaatgcattgacccaagtgtggtctttccttaccccctgaacgacagctcttccccaaagagctgtgcatctcaggatagctctgctttcagtccatcgagcgacagcctgctgtcatctaccgaaagctccccacaagggtcgcccgagccgctggtactgcatgaggaaacccccccaacaacaagctctgactccgggggaacacgtcgatag

SEQ ID NO: 129000 - DNA, 1365 bp, Artificial Sequence
  derived and/or modified sequence
cttgattttttcagggtggtcgaaaatcagcagcctcctgctactatgccactgaacgtgtccttcactaaccgtaattacgatttggactatgattcagtccagccttacttctactgtgatgaagaggagaacttttatcaacagcagcagcagtcagagctgcaacccccagcgccttccgaagacatttggaaaaaattcgagttactgcccaccccacccttatccccatctaggcgtagcgggctctgttctccatcctacgttgcggtgacccctttctccctacgtggagacaacgatgggggtgggggaagcttctcaactgctgaccagcttgaaatggttacagagctgcttgggggagatatggtgaaccaatcctttatttgcgaccccgatgacgagaccttcattaagaatatcattattcaggactgcatgtggtcagggttcagtgcggctgcaaagcttgtgagcgagaaactggcttcctaccaagcagctcgtaaggattcaggctcacccaacccggctcgcggacattctgtgtgctccacatcttccctctatttacaggacctgtctgctgcagcgtccgaatgtattgatccatccgtcgtattcccctaccctttaaacgacagctcttcacccaagagctgcgcgagtcaagatagttctgcttttagccctagctccgattctctgttgtcctccaccgagtcctcccctcaggggagcccggaaccgttagttctgcacgaggaaaccccgccaacaacctcttccgactctgaggaggagcaagaagatgaagaggaaatcgatgtggtgtccgtagaaaaaagacaggcccctggtaagagatctgagtccggttcgccttcagcagggggtcactctaaaccaccacacagtcctctggttctgaaacgttgtcatgtgtccactcaccagcacaactacgctgcacctccatcaacccgaaaggactaccctgctgctaaacgtgtcaagttggactcagtgagagttctccgtcagatctccaacaacaggaagtgcacttcacctagatccagcgacacagaagagaacgtcaaaagacggactcataacgtcctcgagcgccagagacgaaatgaattgaaaaggtcctttttcgcactccgtgaccagattccagaacttgaaaataatgagaaagcacccaaggtcgttatcctgaaaaaagctacggcttacattctgtcagttcaggctgaggagcaaaaattgattagtgaggaagacttactgagaaagcggagagagcaactcaaacacaaactcgaacagctcagaaactcctgtgcctag

SEQ ID NO: 129001 - DNA, 1263 bp, Artificial Sequence
  derived and/or modified sequence
atgcctctgaacgtgtctttcacaaaccgcaattacgacctggactacgacagtgtccagccgtacttctattgcgatgaggaagacatctggaagaagttcgagctcctgcccactcccccacttagcccctcccgccgatcgggcctgtgcagtcctagttacgtggctgtcactccgttttcactcaggggggacaacgacggaggcggaggttctttctcaaccgccgatcagctcgaaatggtcacagagctgctggggggagacatggtgaatcaaagtttcatttgcgatccggacgacgaaacattcataaaaaatatcatcattcaagactgcatgtggtctggatttagcgccgcagccaaattggtcagcgaaaaactcgcgtcataccaggcggctcggaaagactccgggtcccctaatcctgcaaggggacactctgtttgctctacctcaagcctgtacctgcaggatttatcagccgctgctagtgaatgcatcgatccctctgtcgtgttcccttaccccctgaacgactcaagctcccctaaatcttgtgcttctcaggattcctctgcttttagcccaagttccgacagcctgctgagctccactgaatcatcaccccagggctcccctgagccgttggtgctgcatgaggagacccctccgactacctcatcagattcagaagaagagcaagaagacgaggaagagatcgatgtggtctccgtggagaagcggcaagcacctggtaagaggagcgaaagcggctcgcccagtgccggtggccacagtaagccacctcacagtcccctggtgctaaagcggtgccatgtgtcaacacatcaacataactacgccgcaccgccttctacaaggaaagactaccccgcagcgaagagagtgaagttggattctgtcagagtgctgcgccagatctccaataaccgaaagtgcactagccccaggtcctccgatacggaggaaaacgtaaagaggagaacacataatgtactagagcgacagagaaggaacgagctaaaacgcagctttttcgcactgagagatcagattcccgagcttgagaacaatgaaaaggcacccaaagttgttatcttgaaaaaggccaccgcttacatcctgtcagttcaggcggaagaacagaagctgatttccgaagaagacctattgcgtaaacggagggagcagcttaaacacaaattggagcagttgcggaatagctgtgcatag

SEQ ID NO: 129002 - DNA, 1362 bp, Artificial Sequence
  derived and/or modified sequence
ctggacttcttccgagtagtggaaaaccagccacccgctaccatgcccctgaatgtctcattcacaaacaggaactacgacctggattacgactccgtgcagccatatttttactgcgacgaagaggaaaacttctatcagcaacaacagcagtctgaattgcaaccaccagccccaagcgaggatatttggaaaaagttcgagctgttgcctaccccgcctttgtccccatctcgtaggagcggtctttgctccccctcatacgtggcagtcacacctttctcattgagaggggataatgacggcggaggtggatctttttcgaccgccgatcagctggagatggtgactgaactattggggggagacatggtcaaccagtcattcatttgcgaccccgatgatgaaaccttcatcaagaacatcatcattcaagattgtatgtggagcgggttctcagcagccgcaaagctcgtcagtgaaaaactcgcctcctaccaggctgcgcgtaaggactctggttcccccaacccagccagaggacatagcgtgtgtagtaccagctccctataccttcaggacctttccgcagccgcatccgaatgcatagatccatctgtcgtattcccctacccgctgaatgattcctcttctcctaaatcttgcgcgagccaggacagtagcgcctttagcccttcctccgacagcttactgagtagcaccgaatcttcgccacagggctctcctgaaccattggtcctgcacgaagagacccctccaacaacctcatcagattcggaggaagagcaggaggacgaggaagaaattgacgtggtgagcgtcgaaaagaggcaagctcctggaaagagatctgagtcaggcagcccctctgcaggcggacacagcaagccacctcactcaccgctggtcctcaagagatgtcacgtatcaacccaccaacataactacgccgcacctcctagcactcggaaggactatccagccgctaagagggtgaaactcgacagtgtaagggtgctacggcaaatctccaacaaccgcaagtgcacgagcccacggagctctgacacggaggaaaacgttaaaagacggacacataacgtgttggaaagacagcgaaggaatgagctgaaacggtccttctttgctctccgtgatcagattccagagctcgaaaataatgaaaaggctcctaaggttgtgattttgaaaaaggccactgcgtatatcctctcagtccaagctgaggagcagaaactgatctccgaagaggatcttttgagaaagcgcagggaacagctgaaacataaactcgagcagcttcgcaatagttgtgcctag

SEQ ID NO: 129003 - DNA, 2042 bp, Artificial Sequence
  derived and/or modified sequence
ggagtttattcataacgcgctctccaagtatacgtggcaatgcgttgctgggttattttaatcattctaggcatcgttttcctccttatgcctctatcattcctccctatctacactaacatcccacgctctgaacgcgcgcccattaatacccttctttcctccactctccctgggactcttgatcaaagcgcggccctttccccagccttagcgaggcgccctgcagcctggtacgcgcgtggcgtggcggtgggcgcgcagtgcgttctcggtgtggagggcagctgttccgcctgcgatgatttatactcacaggacaaggatgcggtttgtcaaacagtactgctacggaggagcagcagagaaagggagagggtttgagagggagcaaaagaaaatggtaggcgcgcgtagttaattcatgcggctctcttactctgtttacatcctagagctagagtgctcggctgcccggctgagtctcctccccaccttccccaccctccccaccctccccataagcgcccctcccgggttcccaaagcagagggcgtgggggaaaagaaaaaagatcctctctcgctaatctccgcccaccggccctttataatgcgagggtctggacggctgaggacccccgagctgtgctgctcgcggccgccaccgccgggccccggccgtccctggctcccctcctgcctcgagaagggcagggcttctcagaggcttggcgggaaaaagaacggagggagggatcgcgctgagtataaaagccggttttcggggctttatctaactcgctgtagtaattccagcgagaggcagagggagcgagcgggcggccggctagggtggaagagccgggcgagcagagctgcgctgcgggcgtcctgggaagggagatccggagcgaatagggggcttcgcctctggcccagccctcccgctgatcccccagccagcggtccgcaacccttgccgcatccacgaaactttgcccatagcagcgggcgggcactttgcactggaacttacaacacccgagcaaggacgcgactctcccgacgcggggaggctattctgcccatttggggacacttccccgccgctgccaggacccgcttctctgaaaggctctccttgcagctgcttagacgctggatttttttcgggtagtggaaaaccagcagcctcccgcgacgatgcccctcaacgttagcttcaccaacaggaactatgacctcgactacgactcggtgcagccgtatttctactgcgacgaggaggagaacttctaccagcagcagcagcagagcgagctgcagcccccggcgcccagcgaggatatctggaagaaattcgagctgctgcccaccccgcccctgtcccctagccgccgctccgggctctgctcgccctcctacgttgcggtcacacccttctcccttcggggagacaacgacggcggtggcgggagcttctccacggccgaccagctggagatggtgaccgagctgctgggaggagacatggtgaaccagagtttcatctgcgacccggacgacgagaccttcatcaaaaacatcatcatccaggactgtatgtggagcggcttctcggccgccgccaagctcgtctcagagaagctggcctcctaccaggctgcgcgcaaagacagcggcagcccgaaccccgcccgcggccacagcgtctgctccacctccagcttgtacctgcaggatctgagcgccgccgcctcagagtgcatcgacccctcggtggtcttcccctaccctctcaacgacagcagctcgcccaagtcctgcgcctcgcaagactccagcgccttctctccgtcctcggattctctgctctcctcgacggagtcctccccgcagggcagccccgagcccctggtgctccatgaggagacaccgcccaccaccagcagcgactctggaggaacaagaagatgaggaagaaatcgatgttgtttctgtggaaaagaggcaggctcctggcaaaaggtcagagtctgg

SEQ ID NO: 129004 - DNA, 2345 bp, Artificial Sequence
  derived and/or modified sequence
ctgctcgcggccgccaccgccgggccccggccgtccctggctcccctcctgcctcgagaagggcagggcttctcagaggcttggcgggaaaaagaacggagggagggatcgcgctgagtataaaagccggttttcggggctttatctaactcgctgtagtaattccagcgagaggcagagggagcgagcgggcggccggctagggtggaagagccgggcgagcagagctgcgctgcgggcgtcctgggaagggagatccggagcgaatagggggcttcgcctctggcccagccctcccgctgatcccccagccagcggtccgcaacccttgccgcatccacgaaactttgcccatagcagcgggcgggcactttgcactggaacttacaacacccgagcaaggacgcgactctcccgacgcggggaggctattctgcccatttggggacacttccccgccgctgccaggacccgcttctctgaaaggctctccttgcagctgcttagacgctggatttttttcgggtagtggaaaaccagcagcctcccgcgacgatgcccctcaacgttagcttcaccaacaggaactatgacctcgactacgactcggtgcagccgtatttctactgcgacgaggaggagaacttctaccagcagcagcagcagagcgagctgcagcccccggcgcccagcgaggatatctggaagaaattcgagctgctgcccaccccgcccctgtcccctagccgccgctccgggctctgctcgccctcctacgttgcggtcacacccttctcccttcggggagacaacgacggcggtggcgggagcttctccacggccgaccagctggagatggtgaccgagctgctgggaggagacatggtgaaccagagtttcatctgcgacccggacgacgagaccttcatcaaaaacatcatcatccaggactgtatgtggagcggcttctcggccgccgccaagctcgtctcagagaagctggcctcctaccaggctgcgcgcaaagacagcggcagcccgaaccccgcccgcggccacagcgtctgctccacctccagcttgtacctgcaggatctgagcgccgccgcctcagagtgcatcgacccctcggtggtcttcccctaccctctcaacgacagcagctcgcccaagtcctgcgcctcgcaagactccagcgccttctctccgtcctcggattctctgctctcctcgacggagtcctccccgcagggcagccccgagcccctggtgctccatgaggagacaccgcccaccaccagcagcgactctgaggaggaacaagaagatgaggaagaaatcgatgttgtttctgtggaaaagaggcaggctcctggcaaaaggtcagagtctggatcaccttctgctggaggccacagcaaacctcctcacagcccactggtcctcaagaggtgccacgtctccacacatcagcacaactacgcagcgcctccctccactcggaaggactatcctgctgccaagagggtcaagttggacagtgtcagagtcctgagacagatcagcaacaaccgaaaatgcaccagccccaggtcctcggacaccgaggagaatgtcaagaggcgaacacacaacgtcttggagcgccagaggaggaacgagctaaaacggagcttttttgccctgcgtgaccagatcccggagttggaaaacaatgaaaaggcccccaaggtagttatccttaaaaaagccacagcatacatcctgtccgtccaagcagaggagcaaaagctcatttctgaagaggacttgttgcggaaacgacgagaacagttgaaacacaaacttgaacagctacggaactcttgtgcgtaaggaaaagtaaggaaaacgattccttctaacagaaatgtcctgagcaatcacctatgaacttgtttcaaatgcatgatcaaatgcaacctcacaaccttggctgagtcttgagactgaaagatttagccataatgtaaactgcctcaaattggactttgggcataaaagaacttttttatgcttaccatcttttttttttctttaacagatttgtatttaagaattgtttttaaaaaattttaagatttacacaatgtttctctgtaaatattgccattaaatgtaaataactttaataaaacgtttatagcagttacacagaatttcaatcctagtatatagtacctagtattataggtactataaaccctaattttttttatttaagtacattttgctttttaaagttgatttttttctattgtttttagaaaaaataaaataactggcaaatatatcattgagccaaa

SEQ ID NO: 129005 - DNA, 1893 bp, Artificial Sequence
  derived and/or modified sequence
aactcgctgtagtaattccagcgagaggcagagggagcgagcgggcggccggctagggtggaagagccgggcgagcagagctgcgctgcgggcgtcctgggaagggagatccggagcgaatagggggcttcgcctctggcccagccctcccgctgatcccccagccagcggtccgcaacccttgccgcatccacgaaactttgcccatagcagcgggcgggcactttgcactggaacttacaacacccgagcaaggacgcgactctcccgacgcggggaggctattctgcccatttggggacacttccccgccgctgccaggacccgcttctctgaaaggctctccttgcagctgcttagacgctggatttttttcgggtagtggaaaaccagcagcctcccgcgacgatgcccctcaacgttagcttcaccaacaggaactatgacctcgactacgactcggtgcagccgtatttctactgcgacgaggaggatatctggaagaaattcgagctgctgcccaccccgcccctgtcccctagccgccgctccgggctctgctcgccctcctacgttgcggtcacacccttctcccttcggggagacaacgacggcggtggcgggagcttctccacggccgaccagctggagatggtgaccgagctgctgggaggagacatggtgaaccagagtttcatctgcgacccggacgacgagaccttcatcaaaaacatcatcatccaggactgtatgtggagcggcttctcggccgccgccaagctcgtctcagagaagctggcctcctaccaggctgcgcgcaaagacagcggcagcccgaaccccgcccgcggccacagcgtctgctccacctccagcttgtacctgcaggatctgagcgccgccgcctcagagtgcatcgacccctcggtggtcttcccctaccctctcaacgacagcagctcgcccaagtcctgcgcctcgcaagactccagcgccttctctccgtcctcggattctctgctctcctcgacggagtcctccccgcagggcagccccgagcccctggtgctccatgaggagacaccgcccaccaccagcagcgactctgaggaggaacaagaagatgaggaagaaatcgatgttgtttctgtggaaaagaggcaggctcctggcaaaaggtcagagtctggatcaccttctgctggaggccacagcaaacctcctcacagcccactggtcctcaagaggtgccacgtctccacacatcagcacaactacgcagcgcctccctccactcggaaggactatcctgctgccaagagggtcaagttggacagtgtcagagtcctgagacagatcagcaacaaccgaaaatgcaccagccccaggtcctcggacaccgaggagaatgtcaagaggcgaacacacaacgtcttggagcgccagaggaggaacgagctaaaacggagcttttttgccctgcgtgaccagatcccggagttggaaaacaatgaaaaggcccccaaggtagttatccttaaaaaagccacagcatacatcctgtccgtccaagcagaggagcaaaagctcatttctgaagaggacttgttgcggaaacgacgagaacagttgaaacacaaacttgaacagctacggaactcttgtgcgtaaggaaaagtaaggaaaacgattccttctaacagaaatgtcctgagcaatcacctatgaacttgtttcaaatgcatgatcaaatgcaacctcacaaccttggctgagtcttgagactgaaagatttagccataatgtaaactgcctcaaattggactttgggcataaaagaacttttttatgcttaccatcttttttttttctttaacagatttgtatttaaga

SEQ ID NO: 129006 - DNA, 2150 bp, Artificial Sequence
  derived and/or modified sequence
gggctttatctaactcgctgtagtaattccagcgagaggcagagggagcgagcgggcggccggctagggtggaagagccgggcgagcagagctgcgctgcgggcgtcctgggaagggagatccggagcgaatagggggcttcgcctctggcccagccctcccgctgatcccccagccagcggtccgcaacccttgccgcatccacgaaactttgcccatagcagcgggcgggcactttgcactggaacttacaacacccgagcaaggacgcgactctcccgacgcggggaggctattctgcccatttggggacacttccccgccgctgccaggacccgcttctctgaaaggctctccttgcagctgcttagacgctggatttttttcgggtagtggaaaaccagcctcccgcgacgatgcccctcaacgttagcttcaccaacaggaactatgacctcgactacgactcggtgcagccgtatttctactgcgacgaggaggagaacttctaccagcagcagcagcagagcgagctgcagcccccggcgcccagcgaggatatctggaagaaattcgagctgctgcccaccccgcccctgtcccctagccgccgctccgggctctgctcgccctcctacgttgcggtcacacccttctcccttcggggagacaacgacggcggtggcgggagcttctccacggccgaccagctggagatggtgaccgagctgctgggaggagacatggtgaaccagagtttcatctgcgacccggacgacgagaccttcatcaaaaacatcatcatccaggactgtatgtggagcggcttctcggccgccgccaagctcgtctcagagaagctggcctcctaccaggctgcgcgcaaagacagcggcagcccgaaccccgcccgcggccacagcgtctgctccacctccagcttgtacctgcaggatctgagcgccgccgcctcagagtgcatcgacccctcggtggtcttcccctaccctctcaacgacagcagctcgcccaagtcctgcgcctcgcaagactccagcgccttctctccgtcctcggattctctgctctcctcgacggagtcctccccgcagggcagccccgagcccctggtgctccatgaggagacaccgcccaccaccagcagcgactctgaggaggaacaagaagatgaggaagaaatcgatgttgtttctgtggaaaagaggcaggctcctggcaaaaggtcagagtctggatcaccttctgctggaggccacagcaaacctcctcacagcccactggtcctcaagaggtgccacgtctccacacatcagcacaactacgcagcgcctccctccactcggaaggactatcctgctgccaagagggtcaagttggacagtgtcagagtcctgagacagatcagcaacaaccgaaaatgcaccagccccaggtcctcggacaccgaggagaatgtcaagaggcgaacacacaacgtcttggagcgccagaggaggaacgagctaaaacggagcttttttgccctgcgtgaccagatcccggagttggaaaacaatgaaaaggcccccaaggtagttatccttaaaaaagccacagcatacatcctgtccgtccaagcagaggagcaaaagctcatttctgaagaggacttgttgcggaaacgacgagaacagttgaaacacaaacttgaacagctacggaactcttgtgcgtaaggaaaagtaaggaaaacgattccttctaacagaaatgtcctgagcaatcacctatgaacttgtttcaaatgcatgatcaaatgcaacctcacaaccttggctgagtcttgagactgaaagatttagccataatgtaaactgcctcaaattggactttgggcataaaagaacttttttatgcttaccatcttttttttttctttaacagatttgtatttaagaattgtttttaaaaaattttaagatttacacaatgtttctctgtaaatattgccattaaatgtaaataactttaataaaacgtttatagcagttacacagaatttcaatcctagtatatagtacctagtattataggtactataaaccctaattttttttatttaagtacattttgctttttaaagttgattt

SEQ ID NO: 129007 - DNA, 1317 bp, Artificial Sequence
  derived and/or modified sequence
atgcccctcaacgttagcttcaccaacaggaactatgacctcgactacgactcggtgcagccgtatttctactgcgacgaggaggagaacttctaccagcagcagcagcagagcgagctgcagcccccggcgcccagcgaggatatctggaagaaattcgagctgctgcccaccccgcccctgtcccctagccgccgctccgggctctgctcgccctcctacgttgcggtcacacccttctcccttcggggagacaacgacggcggtggcgggagcttctccacggccgaccagctggagatggtgaccgagctgctgggaggagacatggtgaaccagagtttcatctgcgacccggacgacgagaccttcatcaaaaacatcatcatccaggactgtatgtggagcggcttctcggccgccgccaagctcgtctcagagaagctggcctcctaccaggctgcgcgcaaagacagcggcagcccgaaccccgcccgcggccacagcgtctgctccacctccagcttgtacctgcaggatctgagcgccgccgcctcagagtgcatcgacccctcggtggtcttcccctaccctctcaacgacagcagctcgcccaagtcctgcgcctcgcaagactccagcgccttctctccgtcctcggattctctgctctcctcgacggagtcctccccgcagggcagccccgagcccctggtgctccatgaggagacaccgcccaccaccagcagcgactctgaggaggaacaagaagatgaggaagaaatcgatgttgtttctgtggaaaagaggcaggctcctggcaaaaggtcagagtctggatcaccttctgctggaggccacagcaaacctcctcacagcccactggtcctcaagaggtgccacgtctccacacatcagcacaactacgcagcgcctccctccactcggaaggactatcctgctgccaagagggtcaagttggacagtgtcagagtcctgagacagatcagcaacaaccgaaaatgcaccagccccaggtcctcggacaccgaggagaatgtcaagaggcgaacacacaacgtcttggagcgccagaggaggaacgagctaaaacggagcttttttgccctgcgtgaccagatcccggagttggaaaacaatgaaaaggcccccaaggtagttatccttaaaaaagccacagcatacatcctgtccgtccaagcagaggagcaaaagctcatttctgaagaggacttgttgcggaaacgacgagaacagttgaaacacaaacttgaacagctacggaactcttgtgcg

SEQ ID NO: 129008 - DNA, 1534 bp, Artificial Sequence
  derived and/or modified sequence
tcaagcttttggaccctcgtacagaagctaatacgactcactatagggaaataagagagaaaagaagagtaagaagaaatataagagccaccatgcccctcaacgttagcttcaccaacaggaactatgacctcgactacgactcggtgcagccgtatttctactgcgacgaggaggagaacttctaccagcagcagcagcagagcgagctgcagcccccggcgcccagcgaggatatctggaagaaattcgagctgctgcccaccccgcccctgtcccctagccgccgctccgggctctgctcgccctcctacgttgcggtcacacccttctcccttcggggagacaacgacggcggtggcgggagcttctccacggccgaccagctggagatggtgaccgagctgctgggaggagacatggtgaaccagagtttcatctgcgacccggacgacgagaccttcatcaaaaacatcatcatccaggactgtatgtggagcggcttctcggccgccgccaagctcgtctcagagaagctggcctcctaccaggctgcgcgcaaagacagcggcagcccgaaccccgcccgcggccacagcgtctgctccacctccagcttgtacctgcaggatctgagcgccgccgcctcagagtgcatcgacccctcggtggtcttcccctaccctctcaacgacagcagctcgcccaagtcctgcgcctcgcaagactccagcgccttctctccgtcctcggattctctgctctcctcgacggagtcctccccgcagggcagccccgagcccctggtgctccatgaggagacaccgcccaccaccagcagcgactctgaggaggaacaagaagatgaggaagaaatcgatgttgtttctgtggaaaagaggcaggctcctggcaaaaggtcagagtctggatcaccttctgctggaggccacagcaaacctcctcacagcccactggtcctcaagaggtgccacgtctccacacatcagcacaactacgcagcgcctccctccactcggaaggactatcctgctgccaagagggtcaagttggacagtgtcagagtcctgagacagatcagcaacaaccgaaaatgcaccagccccaggtcctcggacaccgaggagaatgtcaagaggcgaacacacaacgtcttggagcgccagaggaggaacgagctaaaacggagcttttttgccctgcgtgaccagatcccggagttggaaaacaatgaaaaggcccccaaggtagttatccttaaaaaagccacagcatacatcctgtccgtccaagcagaggagcaaaagctcatttctgaagaggacttgttgcggaaacgacgagaacagttgaaacacaaacttgaacagctacggaactcttgtgcgtgataataggctggagcctcggtggccatgcttcttgccccttgggcctccccccagcccctcctccccttcctgcacccgtacccccgtggtctttgaataaagtctgagtgggcggctctaga

SEQ ID NO: 129009 - DNA, 1506 bp, Artificial Sequence
  derived and/or modified sequence
taatacgactcactatagggaaataagagagaaaagaagagtaagaagaaatataagagccaccatgcccctcaacgttagcttcaccaacaggaactatgacctcgactacgactcggtgcagccgtatttctactgcgacgaggaggagaacttctaccagcagcagcagcagagcgagctgcagcccccggcgcccagcgaggatatctggaagaaattcgagctgctgcccaccccgcccctgtcccctagccgccgctccgggctctgctcgccctcctacgttgcggtcacacccttctcccttcggggagacaacgacggcggtggcgggagcttctccacggccgaccagctggagatggtgaccgagctgctgggaggagacatggtgaaccagagtttcatctgcgacccggacgacgagaccttcatcaaaaacatcatcatccaggactgtatgtggagcggcttctcggccgccgccaagctcgtctcagagaagctggcctcctaccaggctgcgcgcaaagacagcggcagcccgaaccccgcccgcggccacagcgtctgctccacctccagcttgtacctgcaggatctgagcgccgccgcctcagagtgcatcgacccctcggtggtcttcccctaccctctcaacgacagcagctcgcccaagtcctgcgcctcgcaagactccagcgccttctctccgtcctcggattctctgctctcctcgacggagtcctccccgcagggcagccccgagcccctggtgctccatgaggagacaccgcccaccaccagcagcgactctgaggaggaacaagaagatgaggaagaaatcgatgttgtttctgtggaaaagaggcaggctcctggcaaaaggtcagagtctggatcaccttctgctggaggccacagcaaacctcctcacagcccactggtcctcaagaggtgccacgtctccacacatcagcacaactacgcagcgcctccctccactcggaaggactatcctgctgccaagagggtcaagttggacagtgtcagagtcctgagacagatcagcaacaaccgaaaatgcaccagccccaggtcctcggacaccgaggagaatgtcaagaggcgaacacacaacgtcttggagcgccagaggaggaacgagctaaaacggagcttttttgccctgcgtgaccagatcccggagttggaaaacaatgaaaaggcccccaaggtagttatccttaaaaaagccacagcatacatcctgtccgtccaagcagagactcaaaagctcatttctgaaattgacttgttgcggaaacaaaatgaacagttgaaacacaaacttgaacagctacggaactcttgtgcgtgataataggctggagcctcggtggccatgcttcttgccccttgggcctccccccagcccctcctccccttcctgcacccgtacccccgtggtctttgaataaagtctgagtgggcggctctaga

SEQ ID NO: 129010 - DNA, 436 bp, Artificial Sequence
  derived and/or modified sequence
gggaaataagagagaaaagaagagtaagaagaaatataagagccaccatgaccgaagaaaacgtcaagagaagaacccataatgtcctcgagcgccagcggcgcaatgagctcaagcgcagcttctttgcactcagggaccaaattccagagttggagaacaacgaaaaggccccgaaggtggtgatccttaagaaggcgactgcctacatcctgtcggtgcaggctgagactcaaaagctgatctccgaaatcgatctgctccggaaacagaacgaacaactgaaacacaaactggaacagctgcggaattcatgctgataataggctggagcctcggtggccatgcttcttgccccttgggcctccccccagcccctcctccccttcctgcacccgtacccccgtggtctttgaataaagtctgagtgggcggc

SEQ ID NO: 129011 - DNA, 1483 bp, Artificial Sequence
  derived and/or modified sequence
gggaaataagagagaaaagaagagtaagaagaaatataagagccaccatgcccctcaacgttagcttcaccaacaggaactatgacctcgactacgactcggtgcagccgtatttctactgcgacgaggaggagaacttctaccagcagcagcagcagagcgagctgcagcccccggcgcccagcgaggatatctggaagaaattcgagctgctgcccaccccgcccctgtcccctagccgccgctccgggctctgctcgccctcctacgttgcggtcacacccttctcccttcggggagacaacgacggcggtggcgggagcttctccacggccgaccagctggagatggtgaccgagctgctgggaggagacatggtgaaccagagtttcatctgcgacccggacgacgagaccttcatcaaaaacatcatcatccaggactgtatgtggagcggcttctcggccgccgccaagctcgtctcagagaagctggcctcctaccaggctgcgcgcaaagacagcggcagcccgaaccccgcccgcggccacagcgtctgctccacctccagcttgtacctgcaggatctgagcgccgccgcctcagagtgcatcgacccctcggtggtcttcccctaccctctcaacgacagcagctcgcccaagtcctgcgcctcgcaagactccagcgccttctctccgtcctcggattctctgctctcctcgacggagtcctccccgcagggcagccccgagcccctggtgctccatgaggagacaccgcccaccaccagcagcgactctgaggaggaacaagaagatgaggaagaaatcgatgttgtttctgtggaaaagaggcaggctcctggcaaaaggtcagagtctggatcaccttctgctggaggccacagcaaacctcctcacagcccactggtcctcaagaggtgccacgtctccacacatcagcacaactacgcagcgcctccctccactcggaaggactatcctgctgccaagagggtcaagttggacagtgtcagagtcctgagacagatcagcaacaaccgaaaatgcaccagccccaggtcctcggacaccgaggagaatgtcaagaggcgaacacacaacgtcttggagcgccagaggaggaacgagctaaaacggagcttttttgccctgcgtgaccagatcccggagttggaaaacaatgaaaaggcccccaaggtagttatccttaaaaaagccacagcatacatcctgtccgtccaagcagaggagcaaaagctcatttctgaagaggacttgttgcggaaacgacgagaacagttgaaacacaaacttgaacagctacggaactcttgtgcgtgataataggctggagcctcggtggccatgcttcttgccccttgggcctccccccagcccctcctccccttcctgcacccgtacccccgtggtctttgaataaagtctgagtgggcggc

SEQ ID NO: 129012 - DNA, 439 bp, Artificial Sequence
  derived and/or modified sequence
gggaaataagagagaaaagaagagtaagaagaaatataagagccaccatgaccgaagaaaacgtcaagagaagaacccataatgtcctcgagcgccagcggcgcaatgagctcaagcgcagcttctttgcactcagggaccaaattccagagttggagaacaacgaaaaggccccgaaggtggtgatccttaagaaggcgactgcctacatcctgtcggtgcaggctgagactcaaaagctgatctccgaaatcgatctgctccggaaacagaacgaacaactgaaacacaaactggaacagctgcggaattcatgcgcgtgataataggctggagcctcggtggccatgcttcttgccccttgggcctccccccagcccctcctccccttcctgcacccgtacccccgtggtctttgaataaagtctgagtgggcggc

SEQ ID NO: 129013 - DNA, 439 bp, Artificial Sequence
  derived and/or modified sequence
gggaaataagagagaaaagaagagtaagaagaaatataagagccaccatgaccgaagaaaacgtcaagagaagaacccataatgtcctcgagcgccagcggcgcaatgagctcaagcgcagcttctttgcactcagggaccaaattccagagttggagaacaacgaaaaggccccgaaggtggtgatccttaagaaggcgactgcctacatcctgtcggtgcaggctgagaatcaaaagctgatctccgaaatcgatctgctccggaaacagaacgaacaactgaaacacaaactggaacagctgcggaattcatgcgcgtgataataggctggagcctcggtggccatgcttcttgccccttgggcctccccccagcccctcctccccttcctgcacccgtacccccgtggtctttgaataaagtctgagtgggcggc

SEQ ID NO: 129014 - RNA, 1483 nt, Artificial Sequence
  derived and/or modified sequence
gggaaauaagagagaaaagaagaguaagaagaaauauaagagccaccaugccccucaacguuagcuucaccaacaggaacuaugaccucgacuacgacucggugcagccguauuucuacugcgacgaggaggagaacuucuaccagcagcagcagcagagcgagcugcagcccccggcgcccagcgaggauaucuggaagaaauucgagcugcugcccaccccgccccuguccccuagccgccgcuccgggcucugcucgcccuccuacguugcggucacacccuucucccuucggggagacaacgacggcgguggcgggagcuucuccacggccgaccagcuggagauggugaccgagcugcugggaggagacauggugaaccagaguuucaucugcgacccggacgacgagaccuucaucaaaaacaucaucauccaggacuguauguggagcggcuucucggccgccgccaagcucgucucagagaagcuggccuccuaccaggcugcgcgcaaagacagcggcagcccgaaccccgcccgcggccacagcgucugcuccaccuccagcuuguaccugcaggaucugagcgccgccgccucagagugcaucgaccccucgguggucuuccccuacccucucaacgacagcagcucgcccaaguccugcgccucgcaagacuccagcgccuucucuccguccucggauucucugcucuccucgacggaguccuccccgcagggcagccccgagccccuggugcuccaugaggagacaccgcccaccaccagcagcgacucugaggaggaacaagaagaugaggaagaaaucgauguuguuucuguggaaaagaggcaggcuccuggcaaaaggucagagucuggaucaccuucugcuggaggccacagcaaaccuccucacagcccacugguccucaagaggugccacgucuccacacaucagcacaacuacgcagcgccucccuccacucggaaggacuauccugcugccaagagggucaaguuggacagugucagaguccugagacagaucagcaacaaccgaaaaugcaccagccccagguccucggacaccgaggagaaugucaagaggcgaacacacaacgucuuggagcgccagaggaggaacgagcuaaaacggagcuuuuuugcccugcgugaccagaucccggaguuggaaaacaaugaaaaggcccccaagguaguuauccuuaaaaaagccacagcauacauccuguccguccaagcagagacucaaaagcucauuucugaaauugacuuguugcggaaacaaaaugaacaguugaaacacaaacuugaacagcuacggaacucuugugcgugauaauaggcuggagccucgguggccaugcuucuugccccuugggccuccccccagccccuccuccccuuccugcacccguacccccguggucuuugaauaaagucugagugggcggc

SEQ ID NO: 129015 - RNA, 1317 nt, Artificial Sequence
  derived and/or modified sequence
augccccucaacguuagcuucaccaacaggaacuaugaccucgacuacgacucggugcagccguauuucuacugcgacgaggaggagaacuucuaccagcagcagcagcagagcgagcugcagcccccggcgcccagcgaggauaucuggaagaaauucgagcugcugcccaccccgccccuguccccuagccgccgcuccgggcucugcucgcccuccuacguugcggucacacccuucucccuucggggagacaacgacggcgguggcgggagcuucuccacggccgaccagcuggagauggugaccgagcugcugggaggagacauggugaaccagaguuucaucugcgacccggacgacgagaccuucaucaaaaacaucaucauccaggacuguauguggagcggcuucucggccgccgccaagcucgucucagagaagcuggccuccuaccaggcugcgcgcaaagacagcggcagcccgaaccccgcccgcggccacagcgucugcuccaccuccagcuuguaccugcaggaucugagcgccgccgccucagagugcaucgaccccucgguggucuuccccuacccucucaacgacagcagcucgcccaaguccugcgccucgcaagacuccagcgccuucucuccguccucggauucucugcucuccucgacggaguccuccccgcagggcagccccgagccccuggugcuccaugaggagacaccgcccaccaccagcagcgacucugaggaggaacaagaagaugaggaagaaaucgauguuguuucuguggaaaagaggcaggcuccuggcaaaaggucagagucuggaucaccuucugcuggaggccacagcaaaccuccucacagcccacugguccucaagaggugccacgucuccacacaucagcacaacuacgcagcgccucccuccacucggaaggacuauccugcugccaagagggucaaguuggacagugucagaguccugagacagaucagcaacaaccgaaaaugcaccagccccagguccucggacaccgaggagaaugucaagaggcgaacacacaacgucuuggagcgccagaggaggaacgagcuaaaacggagcuuuuuugcccugcgugaccagaucccggaguuggaaaacaaugaaaaggcccccaagguaguuauccuuaaaaaagccacagcauacauccuguccguccaagcagaggagcaaaagcucauuucugaagaggacuuguugcggaaacgacgagaacaguugaaacacaaacuugaacagcuacggaacucuugugcg

SEQ ID NO: 129016 - protein, 309 aa, Artificial Sequence
  derived and/or modified sequence
MRPDRAEAPGPPAMAAGGPGAGSAAPVSSTSSLPLAALNMRVRRRLSLFLNVRTQVAADWTALAEEMDFEYLEIRQLETQADPTGRLLDAWQGRPGASVGRLLELLTKLGRDDVLLELGPSIEEDCQKYILKQQQEEAEKPLQVAAVDSSVPRTAELAGITTLDDPLGHMPERFDAFICYCPSDIQFVQEMIRQLEQTNYRLKLCVSDRDVLPGTCVWSIASELIEKRCRRMVVVVSDDYLQSKECDFQTKFALSLSPGAHQKRLIPIKYKAMKKEFPSILRFITVCDYTNPCTKSWFWTRLAKALSLP

SEQ ID NO: 129017 - protein, 285 aa, Artificial Sequence
  derived and/or modified sequence
MAAGGPGAGSAAPVSSTSSLPLAALNMRVRRRLSLFLNVRTQVAADWTALAEEMDFEYLEIRQLETQADPTGASVGRLLELLTKLGRDDVLLELGPSIEEDCQKYILKQQQEEAEKPLQVAAVDSSVPRTAELAGITTLDDPLGHMPERFDAFICYCPSDIQFVQEMIRQLEQTNYRLKLCVSDRDVLPGTCVWSIASELIEKRCRRMVVVVSDDYLQSKECDFQTKFALSLSPGAHQKRLIPIKYKAMKKEFPSILRFITVCDYTNPCTKSWFWTRLAKALSLP

SEQ ID NO: 129018 - protein, 169 aa, Artificial Sequence
  derived and/or modified sequence
MAAGGPGAGSAAPVSSTSSLPLAALNMRVRRRLSLFLNVRTQVAADWTALAEEMDFEYLEIRQLETQADPTGRLLDAWQGRPGASVGRLLELLTKLGRDDVLLELGPSIEEDCQKYILKQQQEEAEKPLQVAAVDSSVPPHLMTPWGICLSVSMPSSAIAPATSSLCRR

SEQ ID NO: 129019 - DNA, 930 bp, Artificial Sequence
  derived and/or modified sequence
atgagacccgacagagccgaggcccccggcccccccgccatggccgccggcggccccggcgccggcagcgccgcccccgtgagcagcaccagcagcctgcccctggccgccctgaacatgagagtgagaagaagactgagcctgttcctgaacgtgagaacccaggtggccgccgactggaccgccctggccgaggagatggacttcgagtacctggagatcagacagctggagacccaggccgaccccaccggcagactgctggacgcctggcagggcagacccggcgccagcgtgggcagactgctggagctgctgaccaagctgggcagagacgacgtgctgctggagctgggccccagcatcgaggaggactgccagaagtacatcctgaagcagcagcaggaggaggccgagaagcccctgcaggtggccgccgtggacagcagcgtgcccagaaccgccgagctggccggcatcaccaccctggacgaccccctgggccacatgcccgagagattcgacgccttcatctgctactgccccagcgacatccagttcgtgcaggagatgatcagacagctggagcagaccaactacagactgaagctgtgcgtgagcgacagagacgtgctgcccggcacctgcgtgtggagcatcgccagcgagctgatcgagaagagatgcagaagaatggtggtggtggtgagcgacgactacctgcagagcaaggagtgcgacttccagaccaagttcgccctgagcctgagccccggcgcccaccagaagagactgatccccatcaagtacaaggccatgaagaaggagttccccagcatcctgagattcatcaccgtgtgcgactacaccaacccctgcaccaagagctggttctggaccagactggccaaggccctgagcctgccctag

SEQ ID NO: 129020 - DNA, 858 bp, Artificial Sequence
  derived and/or modified sequence
atggccgccggcggccccggcgccggcagcgccgcccccgtgagcagcaccagcagcctgcccctggccgccctgaacatgagagtgagaagaagactgagcctgttcctgaacgtgagaacccaggtggccgccgactggaccgccctggccgaggagatggacttcgagtacctggagatcagacagctggagacccaggccgaccccaccggcgccagcgtgggcagactgctggagctgctgaccaagctgggcagagacgacgtgctgctggagctgggccccagcatcgaggaggactgccagaagtacatcctgaagcagcagcaggaggaggccgagaagcccctgcaggtggccgccgtggacagcagcgtgcccagaaccgccgagctggccggcatcaccaccctggacgaccccctgggccacatgcccgagagattcgacgccttcatctgctactgccccagcgacatccagttcgtgcaggagatgatcagacagctggagcagaccaactacagactgaagctgtgcgtgagcgacagagacgtgctgcccggcacctgcgtgtggagcatcgccagcgagctgatcgagaagagatgcagaagaatggtggtggtggtgagcgacgactacctgcagagcaaggagtgcgacttccagaccaagttcgccctgagcctgagccccggcgcccaccagaagagactgatccccatcaagtacaaggccatgaagaaggagttccccagcatcctgagattcatcaccgtgtgcgactacaccaacccctgcaccaagagctggttctggaccagactggccaaggccctgagcctgccctag

SEQ ID NO: 129021 - DNA, 930 bp, Artificial Sequence
  derived and/or modified sequence
atgcgtcccgatagggctgaggcccccggtccccccgcaatggccgccgggggccccggtgctggctcagcagccccggtcagtagtacctccagcctacccctagcagccctgaacatgcgggttcgtaggagactgtctctgttccttaacgttagaacacaggtggctgcagactggaccgccttggctgaggaaatggattttgagtatctcgaaatcaggcagctcgagacccaggccgacccaaccggccgattgctggacgcatggcagggccggcctggagccagcgttggccgcctgctggaacttctgacgaaactgggccgcgatgatgtcttgttagagctgggaccgtccatcgaagaagactgtcagaagtatatcttgaaacagcaacaagaagaagctgagaaaccccttcaggtggccgctgtggactcatccgtcccccgaaccgccgagctcgccggaattactaccttggacgaccctttaggtcatatgccagaacggttcgatgcattcatctgttattgcccctcagacattcagtttgttcaggaaatgattcgacagctcgagcaaacaaactacaggttgaaactgtgcgtcagcgaccgtgatgtcctgccggggacatgcgtttggagcatcgcgtctgaactgatcgagaagcgatgccgacgtatggtggtcgtagtatctgacgattatctgcagagtaaggaatgcgacttccagacgaagtttgcactgagcctctcgccaggggcgcatcagaagcgcttaatacctatcaagtacaaagcaatgaaaaaagagttcccctccattctccggtttataacggtatgcgattatacaaatccgtgcaccaagagctggttttggacccgacttgctaaagcactgtccctcccgtag

SEQ ID NO: 129022 - DNA, 858 bp, Artificial Sequence
  derived and/or modified sequence
atggccgctggcgggcctggagccggctcagcagctcccgtgagctctacttcctcactaccattggcggctttgaacatgcgcgtgaggcgccgactctcccttttcctcaacgtgagaacacaagtggccgccgattggacagcccttgccgaagaaatggactttgaatacctagagattaggcagctcgagactcaggccgaccccactggcgcatcagttggtagactgctggagttactcactaagctggggcgcgacgacgtgctgctggaactgggtcccagtatcgaggaagattgtcaaaaatacatcttgaagcagcagcaggaagaggccgaaaaaccactccaggttgcagcagttgatagttctgtgccgcgaaccgcagagctagcagggatcactacactcgacgaccctctgggacacatgccagaacgctttgacgctttcatctgttactgcccgagcgatatccagtttgtgcaagaaatgatccggcagttggagcagactaactaccgcttgaagctgtgcgtatccgaccgcgatgtgctcccaggcacttgtgtttggagtatagcctccgagttgatcgagaagaggtgccggcggatggtcgtggtagtgagcgacgactacctacagtctaaagaatgtgatttccagactaagtttgctctttctctttcaccaggcgctcaccagaagcgcctgatcccaattaaatataaagccatgaagaaagagtttccttccattcttcgatttatcaccgtttgcgattatacaaatccatgtaccaagtcttggttttggacgcggcttgctaaggcactgtctctgccttag

SEQ ID NO: 129023 - DNA, 930 bp, Artificial Sequence
  derived and/or modified sequence
atgaggccagacagagctgaggcccctggccccccagccatggccgccggcggccctggagctggcagcgctgcccctgtgagcagcaccagcagcctgcccctggccgccctgaacatgagggtgagaagaaggctgagcctcttcctgaatgtgaggacccaggtggccgctgactggacagccctggccgaggagatggactttgagtacctggagatccggcagctggagacccaggccgaccccaccggccgcctgctggatgcctggcagggccggcctggggcctctgtgggccgcctgctggagctgctgaccaagctgggcagagatgatgtgctgctggagctgggccccagcattgaggaggactgccagaagtacatcctgaagcagcagcaggaggaggccgagaagcccctgcaggtggccgctgtggacagctctgtgcccaggacagctgagctggccggcatcaccaccctggatgaccccctgggccacatgcctgagagatttgatgccttcatctgctactgccccagcgacatccagtttgtgcaggagatgatccggcagctggagcagaccaactaccgcctgaagctgtgtgtgtctgacagagatgtgctgcccggcacctgtgtgtggagcatcgccagcgagctgattgagaagcgctgcaggaggatggtggtggtggtgtctgatgactacctgcagagcaaagaatgtgacttccagaccaagtttgccctgagcctgagccctggggcccaccagaagaggctcatccccatcaagtacaaggccatgaagaaggagttccccagcatcctgcgcttcatcaccgtgtgtgactacaccaacccctgcaccaagtcctggttctggacccggctggccaaggccctgagcctgccctag

SEQ ID NO: 129024 - DNA, 858 bp, Artificial Sequence
  derived and/or modified sequence
atggctgctgggggccctggggccggcagcgctgcccctgtgagcagcaccagcagcctgcccctggccgccctgaacatgagggtgagaagaaggctgagcctcttcctgaatgtgaggacccaggtggccgctgactggacagccctggccgaggagatggactttgagtacctggagatccggcagctggagacccaggccgaccccactggagcctctgtgggccgcctgctggagctgctgaccaagctgggcagagatgatgtgctgctggagctgggccccagcattgaggaggactgccagaagtacatcctgaagcagcagcaggaggaggccgagaagcccctgcaggtggccgctgtggacagctctgtgcccaggacagctgagctggccggcatcaccaccctggatgaccccctgggccacatgcctgagagatttgatgccttcatctgctactgccccagcgacatccagtttgtgcaggagatgatccggcagctggagcagaccaactaccgcctgaagctgtgtgtgtctgacagagatgtgctgcccggcacctgtgtgtggagcatcgccagcgagctgattgagaagcgctgcaggaggatggtggtggtggtgtctgatgactacctgcagagcaaagaatgtgacttccagaccaagtttgccctgagcctgagccctggggcccaccagaagaggctcatccccatcaagtacaaggccatgaagaaggagttccccagcatcctgcgcttcatcaccgtgtgtgactacaccaacccctgcaccaagtcctggttctggacccggctggccaaggccctgagcctgccctag

SEQ ID NO: 129025 - DNA, 930 bp, Artificial Sequence
  derived and/or modified sequence
atgcggcccgaccgggccgaggcccccggcccccccgccatggccgctgggggtccaggcgccggatccgccgccccggttagcagcactagctccctgcctctcgcagctctaaatatgcgagtgcggaggagactgtccctgttcctcaacgtgcgcacacaggtggctgcagactggacggccctggcagaagagatggacttcgagtatttagagatacgccaactagagacacaggccgaccccaccggtaggctgctcgatgcatggcaaggccggcctggcgcatccgtcgggcggctactcgagttgctgacaaagctgggaagggatgacgtgctgctggaactgggacctagcatagaggaagattgtcagaaatatatcttgaagcagcaacaggaagaggccgagaagccactgcaagtcgctgctgttgattcgtccgtgcctagaacagcggaattggccggtataaccaccctggacgatccattgggccatatgcccgagcggtttgacgcattcatttgctactgcccatctgatattcaattcgtgcaggaaatgatccggcaactggaacaaactaactataggttgaagttgtgcgtgtctgaccgtgacgtccttcccggaacttgtgtgtggtcaatcgcttctgagttaattgaaaagcggtgtcgaaggatggttgtggtagtgtcggatgactatctgcagagcaaggagtgtgacttccagaccaaattcgccctgagcctctctccaggggcccaccagaagaggctaattccgataaagtacaaggccatgaaaaaggagttcccttcaattctgcgtttcattaccgtgtgtgattatactaacccctgtaccaaaagctggttctggacaagattggcaaaggctctgagtttgccttag

SEQ ID NO: 129026 - DNA, 858 bp, Artificial Sequence
  derived and/or modified sequence
atggccgccggcggccccggcgccggcagcgccgcccccgtgagctctaccagcagtttgcctctggctgccctcaacatgcgtgtgcgacggcggcttagcttgttcctgaacgttcgtactcaggttgcagcagactggactgccctggcagaagagatggatttcgagtatcttgagatccgccagctagagacacaggctgacccaactggcgctagcgtcggtaggctattggagctgctaaccaaactggggcgagatgacgtcctcctcgagttaggacccagcatcgaggaagattgccagaaatatatcctgaaacagcagcaggaggaggccgagaaacctctgcaggttgcagcagtcgattcgtctgtcccgcggaccgccgagctggcaggtattactactctggatgatccgctcgggcatatgcccgaaagattcgacgccttcatatgctattgcccctctgacatccaattcgtgcaggagatgataagacagttggagcagaccaattacaggttaaagctttgtgtgtctgatagagatgtgctgcctggcacttgtgtgtggtccatagcctccgagttgatcgaaaagagatgcaggcgtatggttgtagttgtctccgacgattatttgcagagtaaagaatgtgatttccagactaaattcgccctgtctctcagccccggggcacaccagaagcggttaatccctataaaatataaggctatgaaaaaagaatttccatcaattttgcgatttatcaccgtgtgtgactacaccaacccgtgcacaaaaagctggttctggactcggctagccaaagccctgagcttgccttag

SEQ ID NO: 129027 - DNA, 2850 bp, Artificial Sequence
  derived and/or modified sequence
agattcctacttcttacgccccccacatcacccgcctcgagacctcaagggtagaggtgggcacccccgcctccgcacttttgctcggggctccagattgtagggcagggcggcgcttctcggaaagcgaaagccggcggggcggggcgggtgccgcaggagaaagaggaagcgctggcagacaatgcgacccgaccgcgctgaggctccaggaccgcccgccatggctgcaggaggtcccggcgcggggtctgcggccccggtctcctccacatcctcccttcccctggctgctctcaacatgcgagtgcggcgccgcctgtctctgttcttgaacgtgcggacacaggtggcggccgactggaccgcgctggcggaggagatggactttgagtacttggagatccggcaactggagacacaagcggaccccactggcaggctgctggacgcctggcagggacgccctggcgcctctgtaggccgactgctcgagctgcttaccaagctgggccgcgacgacgtgctgctggagctgggacccagcattgaggaggattgccaaaagtatatcttgaagcagcagcaggaggaggctgagaagcctttacaggtggccgctgtagacagcagtgtcccacggacagcagagctggcgggcatcaccacacttgatgaccccctggggcatatgcctgagcgtttcgatgccttcatctgctattgccccagcgacatccagtttgtgcaggagatgatccggcaactggaacagacaaactatcgactgaagttgtgtgtgtctgaccgcgatgtcctgcctggcacctgtgtctggtctattgctagtgagctcatcgaaaagaggtgccgccggatggtggtggttgtctctgatgattacctgcagagcaaggaatgtgacttccagaccaaatttgcactcagcctctctccaggtgcccatcagaagcgactgatccccatcaagtacaaggcaatgaagaaagagttccccagcatcctgaggttcatcactgtctgcgactacaccaacccctgcaccaaatcttggttctggactcgccttgccaaggccttgtccctgccctgaagactgttctgaggccctgggtgtgtgtgtatctgtctgcctgtccatgtacttctgccctgcctcctcctttcgttgtaggaggaatctgtgctctacttacctctcaattcctggagatgccaacttcacagacacgtctgcagcagctggacatcacatttcatgtcctgcatggaaccagtggctgtgagtggcatgtccacttgctggattatcagccaggacactatagaacaggaccagctgagactaagaaggaccagcagagccagctcagctctgagccattcacacatcttcaccctcagtttcctcacttgaggagtgggatggggagaacagagagtagctgtgtttgaatccctgtaggaaatggtgaagcatagctctgggtctcctgggggagaccaggcttggctgcgggagagctggctgttgctggactacatgctggccactgctgtgaccacgacactgctggggcagcttcttccacagtgatgcctactgatgcttcagtgcctctgcacaccgcccattccacttcctccttccccacagggcaggtggggaagcagtttggcccagcccaaggagaccccaccttgagccttatttcctaatgggtccacctctcatctgcatctttcacacctcccagcttctgcccaaccttcagcagtgacaagtccccaagagactcgcctgagcagcttgggctgcttttcatttccacctgtcaggatgcctgtggtcatgctctcagctccacctggcatgagaagggatcctggcctctggcatattcatcaagtatgagttctggggatgagtcactgtaatgatgtgagcagggagccttcctccctgggccacctgcagagagctttcccaccaactttgtaccttgattgccttacaaagttatttgtttacaaacagcgaccatataaaagcctcctgccccaaagcttgtgggcacatgggcacatacagactcacatacagacacacacatatatgtacagacatgtactctcacacacacaggcaccagcatacacacgtttttctaggtacagctcccaggaacagctaggtgggaaagtcccatcactgagggagcctaaccatgtccctgaacaaaaattgggcactcatctattccttttctcttgtgtccctactcattgaaaccaaactctggaaaggacccaatgtaccagtatttatacctctaatgaagcacagagagaggaagagagctgcttaaactcacacaacaatgaactgcagacacagctgttctctccctctctccttcccagagcaatttatactttaccctcaggctgtcctctggggagaaggtgccatggtcttaggtgtctgtgccccaggacagaccctaggaccctaaatccaatagaaaatgcatatctttgctccactttcagccaggctggagcaaggtaccttttcttaggatcttgggagggaatggatgcccctctctgcatgatcttgttgaggcatttagctgccatgcacctgtccccctttaatactgggcattttaaagccatctcaagaggcatcttctacatgttttgtacgcattaaaataatttcaaagatatctgagaaaagccgatatttgccattcttcctatatcctggaatatatcttgcatcctgagtttataataataaataatattctaccttggaaa

SEQ ID NO: 129028 - DNA, 1485 bp, Artificial Sequence
  derived and/or modified sequence
atggctgcaggaggtcccggcgcggggtctgcggccccggtctcctccacatcctcccttcccctggctgctctcaacatgcgagtgcggcgccgcctgtctctgttcttgaacgtgcggacacaggtggcggccgactggaccgcgctggcggaggagatggactttgagtacttggagatccggcaactggagacacaagcggaccccactggcgcctctgtaggccgactgctcgagctgcttaccaagctgggccgcgacgacgtgctgctggagctgggacccagcattgaggaggattgccaaaagtatatcttgaagcagcagcaggaggaggctgagaagcctttacaggtggccgctgtagacagcagtgtcccacggacagcagagctggcgggcatcaccacacttgatgaccccctggggcatatgcctgagcgtttcgatgccttcatctgctattgccccagcgacatccagtttgtgcaggagatgatccggcaactggaacagacaaactatcgactgaagttgtgtgtgtctgaccgcgatgtcctgcctggcacctgtgtctggtctattgctagtgagctcatcgaaaagaggtgccgccggatggtggtggttgtctctgatgattacctgcagagcaaggaatgtgacttccagaccaaatttgcactcagcctctctccaggtgcccatcagaagcgactgatccccatcaagtacaaggcaatgaagaaagagttccccagcatcctgaggttcatcactgtctgcgactacaccaacccctgcaccaaatcttggttctggactcgccttgccaaggccttgtccctgccctgaagactgttctgaggccctgggtgtgtgtgtatctgtctgcctgtccatgtacttctgccctgcctcctcctttcgttgtaggaggaatctgtgctctacttacctctcaattcctggagatgccaacttcacagacacgtctgcagcagctggacatcacatttcatgtcctgcatggaaccagtggctgtgagtggcatgtccacttgctggattatcagccaggacactatagaacaggaccagctgagactaagaaggaccagcagagccagctcagctctgagccattcacacatcttcaccctcagtttcctcacttgaggagtgggatggggagaacagagagtagctgtgtttgaatccctgtaggaaatggtgaagcatagctctgggtctcctgggggagaccaggcttggctgcgggagagctggctgttgctggactacatgctggccactgctgtgaccacgacactgctggggcagcttcttccacagtgatgcctactgatgcttcagtgcctctgcacaccgcccattccacttcctccttccccacagggcaggtggggaagcagtttggcccagcccaaggagaccccaccttgagccttatttcctaat

SEQ ID NO: 129029 - DNA, 2638 bp, Artificial Sequence
  derived and/or modified sequence
atgcgacccgaccgcgctgaggctccaggaccgcccgccatggctgcaggaggtcccggcgcggggtctgcggccccggtctcctccacatcctcccttcccctggctgctctcaacatgcgagtgcggcgccgcctgtctctgttcttgaacgtgcggacacaggtggcggccgactggaccgcgctggcggaggagatggactttgagtacttggagatccggcaactggagacacaagcggaccccactggcaggctgctggacgcctggcagggacgccctggcgcctctgtaggccgactgctcgagctgcttaccaagctgggccgcgacgacgtgctgctggagctgggacccagcattgaggaggattgccaaaagtatatcttgaagcagcagcaggaggaggctgagaagcctttacaggtggccgctgtagacagcagtgtcccaccacacttgatgaccccctggggcatatgcctgagcgtttcgatgccttcatctgctattgccccagcgacatccagtttgtgcaggagatgatccggcaactggaacagacaaactatcgactgaagttgtgtgtgtctgaccgcgatgtcctgcctggcacctgtgtctggtctattgctagtgagctcatcgaaaagaggtgccgccggatggtggtggttgtctctgatgattacctgcagagcaaggaatgtgacttccagaccaaatttgcactcagcctctctccaggtgcccatcagaagcgactgatccccatcaagtacaaggcaatgaagaaagagttccccagcatcctgaggttcatcactgtctgcgactacaccaacccctgcaccaaatcttggttctggactcgccttgccaaggccttgtccctgccctgaagactgttctgaggccctgggtgtgtgtgtatctgtctgcctgtccatgtacttctgccctgcctcctcctttcgttgtaggaggaatctgtgctctacttacctctcaattcctggagatgccaacttcacagacacgtctgcagcagctggacatcacatttcatgtcctgcatggaaccagtggctgtgagtggcatgtccacttgctggattatcagccaggacactatagaacaggaccagctgagactaagaaggaccagcagagccagctcagctctgagccattcacacatcttcaccctcagtttcctcacttgaggagtgggatggggagaacagagagtagctgtgtttgaatccctgtaggaaatggtgaagcatagctctgggtctcctgggggagaccaggcttggctgcgggagagctggctgttgctggactacatgctggccactgctgtgaccacgacactgctggggcagcttcttccacagtgatgcctactgatgcttcagtgcctctgcacaccgcccattccacttcctccttccccacagggcaggtggggaagcagtttggcccagcccaaggagaccccaccttgagccttatttcctaatgggtccacctctcatctgcatctttcacacctcccagcttctgcccaaccttcagcagtgacaagtccccaagagactcgcctgagcagcttgggctgcttttcatttccacctgtcaggatgcctgtggtcatgctctcagctccacctggcatgagaagggatcctggcctctggcatattcatcaagtatgagttctggggatgagtcactgtaatgatgtgagcagggagccttcctccctgggccacctgcagagagctttcccaccaactttgtaccttgattgccttacaaagttatttgtttacaaacagcgaccatataaaagcctcctgccccaaagcttgtgggcacatgggcacatacagactcacatacagacacacacatatatgtacagacatgtactctcacacacacaggcaccagcatacacacgtttttctaggtacagctcccaggaacagctaggtgggaaagtcccatcactgagggagcctaaccatgtccctgaacaaaaattgggcactcatctattccttttctcttgtgtccctactcattgaaaccaaactctggaaaggacccaatgtaccagtatttatacctctaatgaagcacagagagaggaagagagctgcttaaactcacacaacaatgaactgcagacacagctgttctctccctctctccttcccagagcaatttatactttaccctcaggctgtcctctggggagaaggtgccatggtcttaggtgtctgtgccccaggacagaccctaggaccctaaatccaatagaaaatgcatatctttgctccactttcagccaggctggagcaaggtaccttttcttaggatcttgggagggaatggatgcccctctctgcatgatcttgttgaggcatttagctgccatgcacctgtccccctttaatactgggcattttaaagccatctcaagaggcatcttctacatgttttgtacgcattaaaataatttcaaagatatctgagaaaagccgatatttgccattcttcctatatcctggaatatatcttgcatcctgagtttataataataaataatattctaccttgg

SEQ ID NO: 129030 - DNA, 930 bp, Artificial Sequence
  derived and/or modified sequence
atgagacccgaccgcgctgaagccccaggtcctccagcgatggcagccggtggtccaggcgcaggctctgcagccccagtctcaagtacttccagtctgcctcttgccgctctgaatatgcgggtgagaagacggttgagtctcttcctcaatgtcaggacccaggtcgccgctgattggaccgctttagcggaagagatggacttcgagtacttggagatcagacagctagagacccaggccgaccctactgggaggctgctggacgcttggcaggggagacctggagcctccgtggggaggcttctggagttactgaccaaactaggcagagatgatgtgctactggagctgggacctagcattgaggaagactgtcagaaatatattcttaagcaacagcaagaagaggctgagaagccactgcaagttgcagcggtcgacagtagcgtgcccagaacggccgagcttgctgggatcaccaccctggacgaccctctgggccatatgccggaacgtttcgacgccttcatttgctactgcccctccgatatccaattcgtccaggagatgatacggcagcttgagcagaccaactatcgtctgaagttgtgcgtttcggacagggatgttctgcctggaacgtgcgtctggagtatcgcctccgaacttattgaaaagagatgccggagaatggtcgttgtggtgagtgacgattatctgcagagtaaggaatgcgattttcaaacaaagttcgctctcagtctgagtccaggagcacaccagaagcgtctgattcccatcaagtataaggctatgaagaaggagtttccttctatcctgcgatttattactgtctgtgactacaccaacccttgcacaaaatcttggttctggactcgcctggccaaggctctatccctgccctag

SEQ ID NO: 129031 - DNA, 858 bp, Artificial Sequence
  derived and/or modified sequence
atggcagcaggtggccctggggctggctcagctgcccctgtgtcctccacctcctcattacctctcgccgctttaaatatgagggtccggagacgcctcagtctatttctgaatgtcagaacacaagttgcggcagattggacagccctcgccgaggaaatggatttcgagtaccttgaaatccggcaactggagactcaagccgatcctacaggtgcaagcgtgggccgtttgctcgagctgcttaccaagctcggacgcgatgacgttctgctcgagctcggccctagtatcgaagaggattgccaaaagtatatattaaagcaacagcaggaggaagcagaaaaacctctccaggtcgccgctgtggactcatccgttcctcggacagccgagctggccggaataactaccctggatgatccactcggccacatgccggaacgatttgacgcatttatttgttattgcccctccgatattcaatttgtgcaggagatgatcaggcagctggagcagactaactatcgactcaaactctgtgtttcagatcgggatgtgctgccagggacgtgtgtctggagtatcgcctcggagctgattgaaaaacgctgtcggagaatggtagtagtggtttcagacgactatcttcaatcaaaagagtgcgacttccaaacaaaattcgcgctcagcctgtcccctggagctcaccagaagcgtctgatccccatcaagtacaaggcaatgaagaaagagtttccgtccattctccgcttcattaccgtttgtgattacactaacccctgtacaaaatcatggttttggactcgcctggccaaggctctctctctgccatag

SEQ ID NO: 129032 - protein, 242 aa, Artificial Sequence
  derived and/or modified sequence
MMMDLFETGSYFFYLDGENVTLQPLEVAEGSPLYPGSDGTLSPCQDQMPPEAGSDSSGEEHVLAPPGLQPPHCPGQCLIWACKTCKRKSAPTDRRKAATLRERRRLKKINEAFEALKRRTVANPNQRLPKVEILRSAISYIERLQDLLHRLDQQEKMQELGVDPFSYRPKQENLEGADFLRTCSSQWPSVSDHSRGLVITAKEGGASIDSSASSSLRCLSSIVDSISSEERKLPCVEEVVEK

SEQ ID NO: 129033 - DNA, 1294 bp, Artificial Sequence
  derived and/or modified sequence
gtttttgagtccatcacccagttcagatcgagtcagaggccaaggaggagaacatgatgatggacctttttgaaactggctcctatttcttctacttggatggggaaaatgttactctgcagccattagaagtggcagaaggctctcctttgtatccagggagtgatggtaccttgtccccctgccaggaccaaatgcccccggaagcggggagcgacagcagcggagaggaacatgtcctggcgcccccgggcctgcagcctccacactgccccggccagtgtctgatctgggcttgcaagacctgcaagagaaaatctgcccccactgaccggcgaaaagccgccaccctgcgcgaaaggaggaggctaaagaaaatcaacgaggccttcgaggcactgaagcggcgaactgtggccaaccccaaccagaggctgcccaaggtggagattctgcggagcgccatcagctatattgagcggctgcaggacctgctgcaccggctggatcagcaggagaagatgcaggagctgggggtggaccccttcagctacagacccaaacaagaaaatcttgagggtgcggatttcctgcgcacctgcagctcccagtggccaagtgtttccgatcattccagggggctcgtgataacggctaaggaaggaggagcaagtattgattcgtcagcctcgagtagccttcgatgcctttcttccatcgtggacagtatttcctcggaggaacgcaaactcccctgcgtggaggaagtggtggagaagtaactgagcctgcgcttgagaccttctccacgcagcaggaagatcccaccgacccttcctggcctaatcctttagattaggtcacattacattaacatttaggaacccagaccgaaaagttgctgaaagggaaggagacacattcacaaagaaaagttgcgaaaattgcgaaatctgttgtgcacgctcaaatgaaaacgcctttcggctttgggcttttatttttttggaactgcgagtggcttaggtctagcctcattttgtttttgtttggttggttttatactatattaacttttattacggtgatccttttgtgccatgttcaaaagaagttcattcctgtctgaagtgggaaagttgcatttaatgttaggggtatttaatgtatttttgtaaatagtttagcactttctttttttacgtaaacctgaaatatattttaaatgtggaatgatgtatataaaatgtgcgaggatcctggtattgtaatattaaaaagaagtttctatatg

SEQ ID NO: 129034 - DNA, 729 bp, Artificial Sequence
  derived and/or modified sequence
atgatgatggatttgtttgagacgggtagctatttcttttatctggatggagagaatgtcacgctccagcccctggaggttgccgaaggatctcccttgtaccctggttccgatggtacactgagcccttgtcaggaccagatgccgccagaggccggctctgacagttccggagaagagcacgtgctcgcacccccgggcctccagccacctcactgccccggtcagtgtcttatctgggcatgcaaaacctgcaagaggaaatccgcacccacagaccggcgcaaagccgctacgctgagagaaaggcgcaggctgaaaaaaattaacgaggctttcgaagctcttaagcgtcggaccgttgcaaatccgaaccaacgcctccctaaggtggaaattctccgctccgctatctcttatattgagcggctgcaggatcttctgcatcgcctcgatcagcaggaaaagatgcaagaattgggcgtggatcctttttcttataggcctaagcaggaaaacctggaaggtgccgatttcctaaggacatgctcctcccagtggccctccgtttccgatcacagtagaggtctggttattactgccaaggaaggcggcgccagcatcgattcgtctgccagttctagtcttagatgcctttcctcgatcgtggatagtatcagtagcgaagagcggaagcttccctgtgtagaagaagtagtagagaaatag

SEQ ID NO: 129035 - DNA, 729 bp, Artificial Sequence
  derived and/or modified sequence
atgatgatggacctgtttgagaccggcagctacttcttctacctggatggagaaaatgtgaccctgcagcccctggaggtggccgagggcagccccctgtacccaggcagtgatggcaccctgagcccctgccaggaccagatgcctcctgaggccggcagtgacagcagtggagaggagcacgtgctggcccctcctggcctgcagcccccccactgccccggccagtgcctgatctgggcctgcaagacctgcaagaggaagagcgcccccacagacaggaggaaggccgccaccctgcgggagcggcggcggctgaagaagatcaatgaggcctttgaggccctgaagagaagaacagtggccaaccccaaccagaggctgcccaaggtggagatcctgcggagcgccatctcctacatcgagcggctgcaggacctgctgcaccggctggaccagcaggagaagatgcaggagctgggcgtggaccccttctcctaccggcccaagcaggagaacctggagggcgctgacttcctgcggacctgcagcagccagtggcccagcgtgtctgaccacagccggggcctggtgatcacagccaaggagggcggggccagcattgacagcagcgccagcagcagcctgcgctgcctgagcagcatcgtggacagcatcagcagcgaggagaggaagctgccctgtgtggaggaggtggtggagaagtag

SEQ ID NO: 129036 - DNA, 1465 bp, Artificial Sequence
  derived and/or modified sequence
agttttctttcaaactagatgttctagagagcactagctgcaatcacattgggagactgatgctccatgacagctaaaagttggattgagtttcaggagctactatatataaagctgggtcgacttatgtcactgcactaattaaatgccatctgggtggttcctctgggtttttgagtccatcacccagttcagatcgagtcagaggccaaggaggagaacatgatgatggacctttttgaaactggctcctatttcttctacttggatggggaaaatgttactctgcagccattagaagtggcagaaggctctcctttgtatccagggagtgatggtaccttgtccccctgccaggaccaaatgcccccggaagcggggagcgacagcagcggagaggaacatgtcctggcgcccccgggcctgcagcctccacactgccccggccagtgtctgatctgggcttgcaagacctgcaagagaaaatctgcccccactgaccggcgaaaagccgccaccctgcgcgaaaggaggaggctaaagaaaatcaacgaggccttcgaggcactgaagcggcgaactgtggccaaccccaaccagaggctgcccaaggtggagattctgcggagcgccatcagctatattgagcggctgcaggacctgctgcaccggctggatcagcaggagaagatgcaggagctgggggtggaccccttcagctacagacccaaacaagaaaatcttgagggtgcggatttcctgcgcacctgcagctcccagtggccaagtgtttccgatcattccagggggctcgtgataacggctaaggaaggaggagcaagtattgattcgtcagcctcgagtagccttcgatgcctttcttccatcgtggacagtatttcctcggaggaacgcaaactcccctgcgtggaggaagtggtggagaagtaactgagcctgcgcttgagaccttctccacgcagcaggaagatcccaccgacccttcctggcctaatcctttagattaggtcacattacattaacatttaggaacccagaccgaaaagttgctgaaagggaaggagacacattcacaaagaaacgttgcgaaaattgcgaaatctgttgtgcatgctcaaatgaaaacgcctttcggctttgggcttttatttttttggaactgcgagtggcttaggtctagcctcattttgtttttgtttggttggttttatactatattaacttttattacggtgatccttttgtgccatgttcaaaagaagttcattcctgtctaaagtgggaaagttgcatttaatgttaggggtatttaatgtatttttgtaaatagtttaacactttctttttttacgtaaacctgaaatatattttaaatgtggaatgatgtatataaaatgtgcgaggatcctggtattgtaatattaaaaagaagtttctatatgaa

SEQ ID NO: 129037 - DNA, 729 bp, Artificial Sequence
  derived and/or modified sequence
atgatgatggacctgttcgagaccggcagctacttcttctacctggatggggaaaatgtgacgctgcagcctcttgaagtggcggagggtagccccctctatcccggttccgacggcactcttagcccctgccaggaccagatgccgcccgaagctggttctgattcaagtggcgaggagcatgtgttggctccccctggacttcaacccccgcactgtcctggtcaatgcctgatatgggcatgcaagacgtgtaagaggaaaagcgctcctacggatagaagaaaagcggcaacattacgagaacgaagacggttaaagaagattaatgaggcttttgaggcacttaagaggcgtactgttgccaatccgaaccagcgtctgccaaaggtagagatcctacggagcgcaatctcttatatcgaaaggctgcaggatctcctgcacaggttagatcagcaagagaaaatgcaggaattgggcgtggatccttttagctaccgtcctaaacaggaaaaccttgagggagcggacttcttgagaacttgttcttctcaatggcccagcgtgagtgatcactcgagaggattggtgattaccgctaaagagggcggcgcctcgattgactcaagcgcgagctccagcctccgctgcctgagttctattgtggactccatttcctccgaggaacggaagcttccatgcgtagaggaggtggtggaaaaatag

SEQ ID NO: 129038 - DNA, 729 bp, Artificial Sequence
  derived and/or modified sequence
atgatgatggacctctttgaaacaggttcttacttcttctatctcgacggagaaaatgttactctccagccactggaggtagctgagggcagtcccctttatcctggctcagacggcactttgagcccatgtcaagatcaaatgcctcccgaagctgggtctgacagttccggcgaggaacacgtactggcacctcccggtctacaaccccctcattgcccgggtcaatgccttatttgggcctgtaaaacgtgcaaacgcaaaagtgctccaacagatcgtcgcaaggccgcaacactaagagagagaaggcgtctgaagaagattaatgaggcgttcgaagcattaaaacgaagaacagtagcaaaccctaaccagcgtctgcctaaagtggagattctacgatccgccataagttacatcgagcggctgcaagatctgttacaccggctcgatcagcaggagaagatgcaggagttgggggtagaccctttctcctacaggccaaagcaggaaaacctggagggagcagacttccttaggacatgctcctcccaatggccgagcgtttccgatcattctcgcggtctggtgattacagccaaagaagggggagcatctattgacagttcagccagcagcagtctgcggtgtttgagcagtatcgtagacagcatctcctccgaagaaagaaagcttccatgtgtggaagaggtggttgaaaagtag

SEQ ID NO: 129039 - DNA, 729 bp, Artificial Sequence
  derived and/or modified sequence
atgatgatggacctgttcgagaccggcagctacttcttctacctggacggcgagaacgtgaccctgcagcccctggaggtggccgagggcagccccctgtaccccggcagcgacggcaccctgagcccctgccaggaccagatgccccccgaggccggcagcgacagcagcggcgaggagcacgtgctggccccccccggcctgcagcccccccactgccccggccagtgcctgatctgggcctgcaagacctgcaagagaaagagcgcccccaccgacagaagaaaggccgccaccctgagagagagaagaagactgaagaagatcaacgaggccttcgaggccctgaagagaagaaccgtggccaaccccaaccagagactgcccaaggtggagatcctgagaagcgccatcagctacatcgagagactgcaggacctgctgcacagactggaccagcaggagaagatgcaggagctgggcgtggaccccttcagctacagacccaagcaggagaacctggagggcgccgacttcctgagaacctgcagcagccagtggcccagcgtgagcgaccacagcagaggcctggtgatcaccgccaaggagggcggcgccagcatcgacagcagcgccagcagcagcctgagatgcctgagcagcatcgtggacagcatcagcagcgaggagagaaagctgccctgcgtggaggaggtggtggagaagtag

SEQ ID NO: 129040 - protein, 1939 aa, Artificial Sequence
  derived and/or modified sequence
MTDAQMADFGAAAQYLRKSEKERLEAQTRPFDIRTECFVPDDKEEFVKAKILSREGGKVIAETENGKTVTVKEDQVLQQNPPKFDKIEDMAMLTFLHEPAVLFNLKERYAAWMIYTYSGLFCVTVNPYKWLPVYNAEVVAAYRGKKRSEAPPHIFSISDNAYQYMLTDRENQSILITGESGAGKTVNTKRVIQYFASIAAIGDRGKKDNANANKGTLEDQIIQANPALEAFGNAKTVRNDNSSRFGKFIRIHFGATGKLASADIETYLLEKSRVIFQLKAERNYHIFYQILSNKKPELLDMLLVTNNPYDYAFVSQGEVSVASIDDSEELMATDSAFDVLGFTSEEKAGVYKLTGAIMHYGNMKFKQKQREEQAEPDGTEDADKSAYLMGLNSADLLKGLCHPRVKVGNEYVTKGQSVQQVYYSIGALAKAVYEKMFNWMVTRINATLETKQPRQYFIGVLDIAGFEIFDFNSFEQLCINFTNEKLQQFFNHHMFVLEQEEYKKEGIEWTFIDFGMDLQACIDLIEKPMGIMSILEEECMFPKATDMTFKAKLYDNHLGKSNNFQKPRNIKGKQEAHFSLIHYAGTVDYNILGWLEKNKDPLNETVVALYQKSSLKLMATLFSSYATADTGDSGKSKGGKKKGSSFQTVSALHRENLNKLMTNLRTTHPHFVRCIIPNERKAPGVMDNPLVMHQLRCNGVLEGIRICRKGFPNRILYGDFRQRYRILNPVAIPEGQFIDSRKGTEKLLSSLDIDHNQYKFGHTKVFFKAGLLGLLEEMRDERLSRIITRMQAQARGQLMRIEFKKIVERRDALLVIQWNIRAFMGVKNWPWMKLYFKIKPLLKSAETEKEMATMKEEFGRIKETLEKSEARRKELEEKMVSLLQEKNDLQLQVQAEQDNLNDAEERCDQLIKNKIQLEAKVKEMNERLEDEEEMNAELTAKKRKLEDECSELKKDIDDLELTLAKVEKEKHATENKVKNLTEEMAGLDEIIAKLTKEKKALQEAHQQALDDLQVEEDKVNSLSKSKVKLEQQVDDLEGSLEQEKKVRMDLERAKRKLEGDLKLTQESIMDLENDKLQLEEKLKKKEFDINQQNSKIEDEQVLALQLQKKLKENQARIEELEEELEAERTARAKVEKLRSDLSRELEEISERLEEAGGATSVQIEMNKKREAEFQKMRRDLEEATLQHEATAAALRKKHADSVAELGEQIDNLQRVKQKLEKEKSEFKLELDDVTSNMEQIIKAKANLEKVSRTLEDQANEYRVKLEEAQRSLNDFTTQRAKLQTENGELARQLEEKEALISQLTRGKLSYTQQMEDLKRQLEEEGKAKNALAHALQSARHDCDLLREQYEEETEAKAELQRVLSKANSEVAQWRTKYETDAIQRTEELEEAKKKLAQRLQDAEEAVEAVNAKCSSLEKTKHRLQNEIEDLMVDVERSNAAAAALDKKQRNFDKILAEWKQKYEESQSELESSQKEARSLSTELFKLKNAYEESLEHLETFKRENKNLQEEISDLTEQLGEGGKNVHELEKVRKQLEVEKLELQSALEEAEASLEHEEGKILRAQLEFNQIKAEIERKLAEKDEEMEQAKRNHQRVVDSLQTSLDAETRSRNEVLRVKKKMEGDLNEMEIQLSHANRMAAEAQKQVKSLQSLLKDTQIQLDDAVRANDDLKENIAIVERRNNLLQAELEELRAVVEQTERSRKLAEQELIETSERVQLLHSQNTSLINQKKKMESDLTQLQSEVEEAVQECRNAEEKAKKAITDAAMMAEELKKEQDTSAHLERMKKNMEQTIKDLQHRLDEAEQIALKGGKKQLQKLEARVRELEGELEAEQKRNAESVKGMRKSERRIKELTYQTEEDKKNLLRLQDLVDKLQLKVKAYKRQAEEAEEQANTNLSKFRKVQHELDEAEERADIAESQVNKLRAKSRDIGAKQKMHDEE

SEQ ID NO: 129041 - DNA, 5820 bp, Artificial Sequence
  derived and/or modified sequence
atgacagatgcacagatggctgatttcggcgccgcagctcaatacctccgcaagagcgaaaaggagcgcttagaggcacagacacgcccattcgacatcagaaccgagtgttttgtgccagacgataaggaagagttcgttaaagctaaaattctgtctcgcgaaggtggcaaggtcattgccgaaaccgagaacgggaagacagtcacggttaaggaagaccaggttctccaacaaaaccccccaaagttcgataaaatcgaggacatggcaatgctcacattccttcacgaaccagccgtgctctttaacttaaaagagagatatgcagcatggatgatctatacttattccggactcttttgtgtgactgtaaatccttataaatggcttcctgtgtataacgccgaagtcgttgctgcttaccgggggaaaaagcgttccgaagccccgccacacattttcagcatatcagataacgcctaccagtacatgctgacagaccgggagaatcagagtatcctgatcactggggaatcaggggcaggtaaaacagtcaatactaagagggtgatacagtattttgcaagtatcgcagccattggggatcggggaaaaaaggacaatgctaacgccaacaaaggcaccttggaagaccagatcattcaggccaacccagccctggaggcattcggcaatgctaagaccgtgaggaatgacaactcctcccggttcggcaaattcatcagaattcatttcggagccactgggaagctggcgtcggccgacatcgaaacatacctcttggaaaagtctcgagtgatttttcagttgaaggccgaaagaaactaccacatcttctaccagatcctgtctaacaagaaacccgagctcttagatatgctcctggtgactaataacccctatgattatgcctttgtatcccagggtgaggtgtcggttgcaagtatcgacgactccgaggagctgatggcaacagactctgccttcgatgttctgggttttacatcagaggaaaaagcaggagtgtacaagcttaccggagcgattatgcattatggcaacatgaagttcaagcagaaacagcgcgaagagcaagccgagccggatgggacagaggatgccgacaagtccgcctacctaatgggtttgaattcagcagatctgctaaagggcttgtgtcacccccgcgtgaaggtcgggaatgagtacgtgaccaaagggcaatccgttcagcaggtctactactctatcggggctcttgccaaggctgtgtacgagaagatgttcaactggatggtgacccgtataaatgcgaccctggagactaaacagcctaggcagtatttcatcggtgtcctggatatagccggcttcgagatttttgacttcaattctttcgagcagttatgcattaatttcacaaacgagaaattacagcagtttttcaaccatcacatgtttgtgctggagcaggaagaatataagaaggagggcatcgagtggacattcatcgacttcgggatggacttgcaggcctgcatcgatctgatcgagaaacccatgggaattatgtcaatattggaagaggaatgtatgtttcctaaggctacagatatgaccttcaaagcaaaattgtacgataaccatcttggaaagtccaacaattttcagaaaccacgaaacatcaaggggaagcaggaggcacatttctctctgatacattatgcgggtactgtggactacaacattctgggatggttggagaaaaacaaagatcccctcaatgagactgtggtcgccctatatcaaaagtcttccctaaaattgatggctacactgttctctagctacgccacagccgacacgggcgattcaggtaagtcaaaaggtggcaagaaaaagggaagctcttttcaaactgtgtccgcactgcacagagagaatcttaacaaactgatgaccaacctccgaactacacatccccattttgtgcgttgtataatccctaatgaacggaaggccccaggggttatggataatcctctggtcatgcatcagctacgctgcaatggcgtgctcgagggtatccgaatatgccgaaaggggttcccgaacaggatcctatacggcgacttccggcagcggtatcgaattctcaaccccgttgccatcccagagggccaatttatcgacagtcgcaaaggcactgagaagctcctgtcatcactggatatcgatcacaatcaatataaattcggacacactaaggtgttcttcaaggccggtctgttaggactactggaggagatgagagatgaaagactctcccgcatcatcacccgcatgcaggctcaagcccgaggccagctcatgcgcatcgagttcaagaagatagtggaaagacgggacgctcttttggtgatccagtggaacatccgcgccttcatgggtgttaagaattggccatggatgaagctttactttaaaattaagcctctactcaagagcgcagagaccgagaaggaaatggcaaccatgaaggaggagttcggaaggatcaaggagactctggagaaaagcgaagccaggcggaaagaactagaagaaaagatggtatcactccttcaggagaaaaacgacctgcaactacaagtgcaggccgaacaggacaacctgaacgatgctgaggagcgctgcgaccaacttattaagaataagattcagttggaggctaaggtgaaagagatgaacgagcgccttgaagacgaagaagaaatgaacgccgagctgacagcaaagaagcgaaagctggaggatgagtgctccgagcttaagaaggacatcgatgatcttgagttaactctcgccaaagtagaaaaagaaaaacacgcgactgagaacaaggtgaagaatttgactgaagaaatggcagggcttgatgagattattgccaaactcacaaaggagaaaaaggctttgcaagaggctcaccagcaggcactggatgacctgcaggtcgaagaagacaaagtcaatagtctgtccaagtcaaaggtcaagctcgaacagcaggtcgacgatctcgagggctcccttgagcaggagaagaaagtgagaatggacttggaaagagcaaaacgtaagcttgagggggacctgaagttgacccaagagtctatcatggaccttgagaacgacaagctgcagttggaggaaaagctgaaaaaaaaggagttcgatatcaaccagcagaatagcaagatcgaagatgaacaggtcttggctctccagttacagaagaaattaaaggagaaccaggccaggattgaggagctagaggaggagttggaagcagaacgtaccgcccgtgctaaagtagaaaagctgcgctccgacctgagtagagagctggaggagatttctgagagactggaggaagctggaggagccacgtcagtgcaaatcgagatgaataaaaaaagagaagccgagtttcagaaaatgagaagggacctggaggaggctacactgcaacatgaggctactgctgccgcattacgcaaaaagcacgctgattccgtggcggagctgggagagcaaatcgacaacctgcagcgcgtgaagcagaaactggagaaagagaaaagcgaatttaagctggagctggacgatgttacgagtaatatggagcagataattaaagccaaagcgaatctggagaaagtatctaggacgctggaggaccaggccaatgaataccgggtgaagctggaggaagcccagcgctccttaaacgacttcacaacccagagagcaaagctccagaccgagaacggagagctagctcggcagcttgaggaaaaagaggcactaatcagccagctgaccagaggcaagcttagctacactcagcagatggaagatctgaaacgccagttggaagaagagggaaaggccaaaaacgcactggcacatgccttacaatctgctcggcacgactgtgacctccttagggaacagtacgaagaggagacagaagccaaagctgaactccagagagtattatctaaagctaacagtgaggtcgcgcagtggcggacaaagtacgaaacggatgcaatccagaggactgaggagttagaggaagctaaaaagaagctcgctcagcggctgcaggacgccgaggaggctgtagaggctgttaatgcgaaatgttcctcactcgaaaaaaccaaacatcgcctgcagaacgaaattgaggacctgatggtcgatgtggagcgttctaacgctgccgctgccgccctagacaagaaacagcgcaactttgataagatcttagccgagtggaagcagaagtatgaggagtcccagtccgagctggagtcatcccagaaagaggcacgcagtctgtctacagaactgttcaaattgaagaatgcctatgaagagtccttggagcatctggagacttttaagcgggagaataaaaacctacaggaggaaataagtgatcttacagagcagctgggggaaggcgggaagaacgtgcacgagttagaaaaagtccggaaacaattggaagtggagaagctcgaactgcaatcagcccttgaggaggcagaagcctcactggagcacgaagaaggtaaaatcctaagagcccagttggaattcaaccaaattaaggctgaaattgagaggaagctggccgagaaggacgaggagatggaacaggccaagcgaaaccaccagagagtggttgacagtctgcaaaccagcctggacgcagagacccggagccgcaacgaggtcctccgcgtgaagaaaaagatggagggcgacctgaatgagatggaaattcagcttagccacgcgaaccgaatggccgcagaagctcagaagcaggtcaagagtctacagagtctgttaaaagatacccaaattcaactggatgatgccgttcgggccaatgacgatctcaaggaaaatatcgccatcgtagagaggaggaacaatctgctccaagccgagcttgaggagttaagagctgtggtggagcagactgaaaggagcaggaagctggccgaacaggaattgatagagacgagtgaacgagtgcaacttctgcactcacaaaatacgtcgctcattaaccagaagaagaaaatggagtcggacctcacccagctgcaatccgaggtggaggaagcagtacaagagtgtaggaacgcagaggagaaggctaagaaagcaatcaccgacgctgctatgatggctgaggagctgaagaaggaacaggacacatcagcccatttggaacggatgaaaaaaaacatggagcaaacaatcaaagatctgcagcatcggttggacgaagccgaacagatcgctttgaaaggtggaaagaaacagttgcaaaagctggaggcaagagtcagagaactcgaaggtgagctggaagcggagcagaaacgcaacgctgagtctgtgaagggaatgcggaaatccgagcgtagaatcaaggaacttacctatcagaccgaggaagacaagaagaacctcctgaggttgcaggatctggttgacaagctacagttaaaggtgaaagcttataagcgccaggcagaagaggctgaagagcaagccaataccaacctctctaagtttcgtaaggtgcaacatgagttggacgaggccgaagagcgcgctgacatcgcagaatctcaggtcaacaagttgcgggccaagagccgcgacattggggctaagcagaagatgcacgatgaggagtag

SEQ ID NO: 129042 - DNA, 5820 bp, Artificial Sequence
  derived and/or modified sequence
atgacagatgcccagatggccgattttggagcagccgcccagtacctgaggaagtctgagaaagagagactggaagctcagacgagaccgttcgatattagaacagaatgtttcgtaccagatgataaagaggaattcgtgaaggctaagatccttagtagggaaggtggcaaagtcatcgcagagactgagaatggcaagacagttactgtcaaagaagaccaagtgctgcagcagaacccgccaaaatttgacaagattgaagacatggccatgctcacctttctgcacgaacctgctgtcctctttaatctgaaggaaaggtatgcagcttggatgatctacacgtacagtggcctgttctgcgtcacagtaaacccgtataagtggctgcccgtgtacaacgccgaggtcgttgccgcatatcgtggcaagaaaaggtctgaagctcccccacacatattcagcatttctgataatgcctatcaatacatgttgaccgacagggaaaaccagagtattctgatcaccggagaatccggggccggaaagaccgtcaacaccaagcgtgtaatccagtatttcgcaagtattgccgccattggggaccgaggaaagaaagacaatgccaacgccaataagggaacccttgaggaccagattatacaggcaaacccagccctagaagcattcgggaatgctaagaccgtgaggaatgacaactctagccgattcggcaaattcatcaggattcacttcggtgctaccggaaagttggcctcagctgacatcgagacgtatctgcttgaaaaaagccgagttatctttcaactgaaggccgagcgaaactatcacatcttctaccagattctgagcaacaagaagccggaactgctagatatgttgcttgtaaccaataatccatatgattatgcttttgtgtctcagggcgaagtctccgtggcctctatcgacgatagcgaggaactcatggccacagacagtgcgtttgacgtgctgggtttcactagcgaggagaaagccggtgtgtataagctaacaggggccattatgcattacgggaacatgaagttcaagcagaagcagcgggaagaacaggccgaacctgacggcactgaagatgccgacaaatcagcctatctcatgggtcttaatagcgccgatctgctgaaggggttgtgtcaccccagagtgaaagtgggaaacgagtacgtgaccaagggacagtcagtccagcaggtttattacagtatcggagctcttgctaaggctgtgtatgagaagatgtttaattggatggtgacacgtattaacgcgactctggaaactaaacaacccaggcagtactttatcggtgtgctggatatcgcgggcttcgaaattttcgactttaactctttcgaacagctgtgcatcaacttcaccaacgagaagttgcaacagttttttaaccaccacatgtttgtcctggagcaggaagagtataaaaaggaggggatcgaatggacttttatcgattttgggatggatttgcaggcctgtatcgatctcatcgaaaagccaatgggtattatgtccatcctagaagaggagtgtatgttcccgaaagccacagacatgacttttaaagcgaaactctatgataatcacctggggaaatccaacaattttcagaaacccagaaacatcaaaggcaaacaggaagctcatttctccttgatacactacgctggcactgtggactacaacatcctcggatggttggaaaaaaataaagatccgctgaatgagacagtcgtggctctgtatcagaagagttccctgaaacttatggccaccctgttttcttcttatgccactgctgacacgggagacagtggaaagtcaaagggagggaaaaaaaaaggctcgtctttccagacagtaagcgccctgcaccgcgagaacctgaataagctgatgactaaccttagaacaacacacccccattttgtgcggtgcataatcccaaacgagcgcaaggccccaggcgtgatggataaccccctagtcatgcaccagttgagatgcaatggcgtgctggagggcattaggatttgtaggaaggggttcccaaatcgcatactgtacggggactttcgccagcggtatagaattctgaatccagtcgctatccccgaaggacagtttatagacagtcggaaaggaactgagaaattgctctcatctctcgacatcgaccataaccagtataagtttgggcataccaaagtattctttaaagccggactgctgggactgttggaagagatgcgcgatgagcgcctatcccgcatcataactcgcatgcaggcccaggcgcgcggtcagctgatgagaatcgaatttaaaaaaatcgtagaaaggcgggacgccctcttggtaatacagtggaatatccgtgcattcatgggtgtaaagaattggccgtggatgaagctgtacttcaagattaagcctttgctgaagtccgctgaaacggagaaagaaatggcgactatgaaggaagaatttggccggatcaaggagaccttggagaagtctgaggccaggcgtaaggaactcgaggaaaagatggtttcgcttctgcaggagaagaatgatcttcagctgcaggtccaggccgagcaagataacctgaatgatgcagaggaacgatgtgaccagttgattaagaataagattcagctcgaggccaaagtcaaggaaatgaatgaacggctggaggacgaggaggagatgaacgcagagctgacagctaagaagaggaagctcgaagacgagtgctccgaactgaagaaggatatcgacgatctggaactgactctggcaaaggttgagaaggaaaagcatgccactgagaataaggtgaagaatcttacggaggaaatggccgggttagatgaaattatcgctaagctcaccaaggaaaaaaaagcgctgcaggaagctcatcagcaggctctcgacgatttgcaggttgaggaggacaaggtgaactcgctgtccaagtcgaaagtcaaactagaacagcaagtggatgacctggagggctcactggaacaggagaaaaaggtgcgtatggatcttgagagggccaaacgtaaactggaaggtgatttgaagctgacccaggaaagcatcatggacctggagaacgacaaattacagctggaggaaaagctcaaaaaaaaggagtttgacattaatcagcaaaatagtaagatcgaggacgaacaagtgctggctctgcaactccagaagaaattaaaggagaatcaggctaggatcgaggaattagaagaggaactcgaagcagagaggacagctagagctaaggtggagaagcttaggagcgacctctctcgtgagttagaggagatcagtgagagactcgaggaggctggcggcgccacctccgtacagatcgaaatgaataaaaaacgcgaagccgaattccagaagatgaggcgcgatctggaagaggctactctgcaacacgaagccacggcagcagccctaaggaaaaagcacgccgactccgtggccgaactcggcgagcagatcgacaatttgcaaagggtcaaacagaagttggaaaaggagaagtccgagttcaaactcgaattggatgacgtgacttccaacatggaacagattattaaagccaaggccaacctagagaaggtttctaggactttagaggatcaagctaatgagtacagggtaaagctggaagaggcgcaacgaagtctcaacgattttacaacccaacgcgcgaaactgcagaccgaaaatggagagctggccaggcagctggaagaaaaggaggcactaatttcccagctgacacggggaaaactatcttatacacagcagatggaagacttgaagagacagctggaggaggagggaaaggccaaaaatgctctggctcatgctctgcaaagtgccagacacgactgcgacttattgagagagcagtatgaggaagagaccgaggcaaaagccgaactccagagagtactctctaaggccaattccgaggtagcccagtggcgaaccaagtacgagactgacgctattcagcgtaccgaagaattggaagaagctaagaaaaagctagcccagcgcctgcaggatgctgaagaggctgttgaagctgtgaatgcgaagtgttcctcactcgaaaaaaccaagcataggctgcagaacgaaatcgaagacctcatggttgacgtggagcgcagtaatgctgctgcggcagccctcgataagaagcagcggaactttgacaagattctagcagaatggaagcagaaatatgaagagagccagagtgagctagagtcatctcaaaaagaggcgagaagcctttcaaccgaactgtttaaattgaagaatgcatatgaagaaagtctggagcacctggagacattcaaaagagaaaacaaaaacctgcaggaggagatttctgatcttactgagcagctcggggagggagggaagaacgttcacgaactcgagaaagtgaggaaacagctggaggtcgaaaaactggagcttcaaagtgccctggaggaagccgaggcatccctggaacacgaggagggcaagattctgcgtgcccagctggaattcaaccagattaaagctgagattgagcggaaactggctgagaaagacgaggagatggagcaggccaaacgaaaccaccagagagtggtcgacagcctgcagacgtcactagacgcagagacaagatccaggaatgaagtgctccgtgtgaaaaaaaaaatggaaggagatctcaacgaaatggagatacagctgtcacacgctaatagaatggccgcagaggcacaaaaacaggtgaagtctttgcaaagcctcttgaaagatacccaaattcagctcgacgatgcagttagagccaatgacgacctcaaggagaacatcgctatagtcgaaagacggaacaacctgctacaggcggaacttgaagaactgcgagctgtcgttgagcaaaccgaacggagtcgcaagctcgctgaacaggaattgattgagacttctgagagagttcagctactgcacagtcagaacacctctctgatcaatcagaagaagaaaatggaatccgacctgacccagctccaatcagaggtggaggaagccgtacaggagtgccggaatgcggaagagaaagcaaagaaggccattacggatgccgccatgatggccgaagaactcaagaaagagcaggacacctcagcccatctcgagagaatgaagaaaaacatggagcagacaatcaaagatctacaacaccgcctggatgaggccgagcagatcgcccttaagggcggcaaaaaacagctgcagaagctcgaagccagggttcgagagctcgagggtgagctggaggctgaacagaaacggaatgcagaatcagtcaagggaatgcggaagtccgagagacggatcaaagagctgacatatcaaactgaggaggataagaaaaacctgttgcgactgcaagatctggtggacaagttacagctgaaggttaaagcgtataagagacaggctgaagaggcagaagaacaggccaacacaaacctgtctaagtttagaaaagttcagcatgagcttgacgaagccgaggaacgggctgacattgctgaatcccaggtgaataaactgagggctaaaagccgggacatcggggctaaacagaagatgcacgatgaggagtag

SEQ ID NO: 129043 - DNA, 5820 bp, Artificial Sequence
  derived and/or modified sequence
atgacagatgcccagatggctgactttggagctgctgcccagtacctgaggaagtctgagaaggagcggctggaggcccagacccggccctttgacatcagaacagagtgctttgtgcctgatgacaaggaggagtttgtgaaggccaagatcctgagccgggagggcggcaaggtgattgctgagacagaaaatggcaagacagtgacagtgaaggaggaccaggtgctgcagcagaacccccccaagtttgacaagattgaggacatggccatgctgaccttcctgcacgagcctgctgtgctcttcaacctgaaggagagatatgctgcctggatgatctacacctacagcggcctcttctgtgtgacagtgaacccctacaagtggctgcctgtgtacaatgctgaggtggtggccgcctaccggggcaagaagaggtctgaggccccaccccacatcttcagcatcagtgacaatgcctaccagtacatgctgacagaccgggagaaccagagcatcctgatcactggagagagcggggccggcaagacagtgaacaccaagagggtcatccagtactttgccagcattgctgccatcggggaccggggcaagaaggacaatgccaatgccaacaagggcaccctggaggaccagatcatccaggccaacccagccctggaggcctttggaaatgccaagacagtgagaaatgacaacagcagcagatttgggaagttcatccgcatccactttggagccaccgggaagctggccagcgctgacatcgagacctacctgctggagaagagcagggtcatcttccagctgaaggccgagaggaactaccacatcttctaccagatcctgagcaacaagaagccagagctgctggacatgctgctggtgaccaacaacccctatgactatgcctttgtgtcccagggcgaggtgtctgtggccagcattgatgattctgaggagctgatggccacagattctgcctttgatgtgctgggcttcaccagcgaggagaaggccggcgtgtacaagctgaccggggccatcatgcactacggcaacatgaagttcaagcagaagcagcgggaggagcaggccgagccagatggaacagaagatgctgacaagagcgcctacctgatgggcctgaacagcgctgacctgctgaagggcctgtgccacccccgggtgaaggtgggcaatgaatatgtgaccaagggccagagcgtgcagcaggtgtactacagcattggagccctggccaaggctgtgtatgagaagatgttcaactggatggtgacccgcatcaatgccaccctggagaccaagcagccccggcagtacttcatcggcgtgctggacattgctggctttgagatctttgacttcaacagctttgagcagctgtgcatcaacttcaccaatgagaagctgcagcagttcttcaaccaccacatgtttgtgctggagcaggaggagtacaagaaggagggcatcgagtggaccttcatcgactttggcatggacctgcaggcctgcatcgacctgattgagaagcccatgggcatcatgagcatcctggaggaggagtgcatgttccccaaggccacagacatgaccttcaaggccaagctgtatgacaaccacctgggcaagagcaacaacttccagaagcccaggaacatcaagggcaagcaggaggcccacttcagcctcatccactacgccggcaccgtggactacaacatcctgggctggctggagaagaacaaggaccccctgaatgaaacagtggtggccctgtaccagaagagcagcctgaagctgatggccaccctcttcagcagctatgccacagctgacaccggggacagcggcaagagcaaaggaggcaagaagaagggcagcagcttccagacagtgtctgccctgcaccgggagaacctgaacaagctgatgaccaacctgcggaccacccacccccactttgtgcgctgcatcatccccaatgaaaggaaggcccctggggtgatggacaaccccctggtgatgcaccagctgcgctgcaatggagtgctggagggcatccgcatctgcaggaagggcttccccaaccgcatcctgtatggagacttccggcagcgctaccgcatcctgaaccctgtggccatccctgagggccagttcatcgacagcaggaagggcacagagaagctgctgagcagcctggacatcgaccacaaccagtacaagtttggccacaccaaggtgttcttcaaggccggcctgctgggcctgctggaggagatgagagatgagcggctgagccgcatcatcaccaggatgcaggcccaggcccggggccagctgatgagaattgagttcaagaagatcgtggagaggagagatgccctgctggtgatccagtggaacatccgggccttcatgggcgtgaagaactggccctggatgaagctgtacttcaagatcaagcccctgctgaagtctgctgagacagagaaggagatggccaccatgaaggaggagtttggccgcatcaaggagaccctggagaagtctgaggcccggaggaaggagctggaggagaagatggtgtccctgctgcaggagaagaatgacctgcagctgcaggtgcaggccgagcaggacaacctgaatgatgctgaggagcgctgtgaccagctgatcaagaacaagatccagctggaggccaaggtgaaggagatgaatgaaaggctggaggatgaggaggagatgaatgctgagctgacagccaagaagaggaagctggaggatgagtgcagcgagctgaagaaggacattgatgacctggagctgaccctggccaaggtggagaaggagaagcacgccacagagaacaaggtgaagaacctgacagaggagatggccggcctggatgagatcatcgccaagctgaccaaggagaagaaggccctgcaggaggcccaccagcaggccctggatgacctgcaggtggaggaggacaaggtgaacagcctgagcaagagcaaggtgaagctggagcagcaggtggatgacctggagggcagcctggagcaggagaagaaggtgaggatggacctggagcgggccaagaggaagctggagggggacctgaagctgacccaggagagcatcatggacctggagaatgacaagctgcagctggaggagaagctgaagaagaaggagtttgacatcaaccagcagaacagcaagattgaagatgagcaggtgctggccctgcagctgcagaagaagctgaaggagaaccaggccagaattgaggagctggaggaggagctggaggccgagaggacagcccgggccaaggtggagaagctgcggagtgacctgagccgggagctggaggagatcagcgagcggctggaggaggccggcggggccacctctgtgcagatcgagatgaacaagaagcgggaggccgagttccagaagatgagaagagacctggaggaggccaccctgcagcacgaggccacagctgctgccctgaggaagaagcatgctgacagcgtggccgagctgggggagcagattgacaacctgcagagggtgaagcagaagctggagaaggagaagtctgagttcaagctggagctggatgatgtgaccagcaacatggagcagatcatcaaggccaaggccaacctggagaaggtgtccaggaccctggaggaccaggccaatgagtacagagtgaagctggaggaggcccagaggagcctgaatgacttcaccacccagagggccaagctgcagacagaaaatggagagctggcccggcagctggaggagaaggaggccctgatcagccagctgacccggggcaagctgagctacacccagcagatggaggacctgaagaggcagctggaggaggagggcaaggccaagaatgccctggcccacgccctgcagagcgcccggcatgactgtgacctgctgcgggagcagtatgaggaggagacagaggccaaggccgagctgcagagggtgctgagcaaggccaacagcgaggtggcccagtggaggaccaagtatgaaacagatgccatccagaggacagaggagctggaggaggccaagaagaagctggcccagaggctgcaggatgctgaggaggccgtggaggccgtgaatgccaagtgcagcagcctggagaagaccaagcaccggctgcagaatgaaattgaggacctgatggtggatgtggagaggagcaatgctgctgctgctgccctggacaagaagcagaggaactttgacaagatcctggccgagtggaagcagaagtatgaggagagccagagcgagctggagagcagccagaaggaggcccggagcctgagcacagagctgttcaagctgaagaatgcctatgaggagagcctggagcacctggagaccttcaagcgggagaacaagaacctgcaggaggagatcagtgacctgacagagcagctgggggagggcggcaagaatgtgcatgagctggagaaggtgaggaagcagctggaggtggagaagctggagctgcagagcgccctggaggaggccgaggccagcctggagcacgaggagggcaagatcctgcgggcccagctggagttcaaccagatcaaggccgagattgaaaggaagctggccgagaaggatgaggagatggagcaggccaagaggaaccaccagagggtggtggacagcctgcagaccagcctggatgctgagaccaggagcagaaatgaggtgctgcgggtgaagaagaagatggagggggacctgaatgagatggagatccagctgagccacgccaacaggatggctgctgaggcccagaagcaggtgaagagcctgcagagcctgctgaaggacacccagatccagctggatgatgctgtgcgggccaatgatgacctgaaggaaaatattgccatcgtggagaggaggaacaacctgctgcaggccgagctggaggagctgcgggctgtggtggagcagacagagaggagcaggaagctggccgagcaggagctgattgagaccagcgagcgggtgcagctgctgcacagccagaacaccagcctcatcaaccagaagaagaagatggagagtgacctgacccagctgcagagcgaggtggaggaggccgtgcaggagtgcagaaatgctgaggagaaggccaagaaggccatcacagatgctgccatgatggccgaggagctgaagaaggagcaggacaccagcgcccacctggagaggatgaagaagaacatggagcagaccatcaaggacctgcagcaccggctggatgaggccgagcagatcgccctgaagggcggcaagaagcagctgcagaagctggaggcccgggtgcgggagctggagggggagctggaggccgagcagaagagaaatgctgagagcgtgaagggcatgaggaagtcagaaagacgcatcaaggagctgacctaccagacagaggaggacaagaagaacctgctgcggctgcaggacctggtggacaagctgcagctgaaggtgaaggcctacaagaggcaggccgaggaggccgaggagcaggccaacaccaacctgagcaagttcaggaaggtgcagcacgagctggatgaggccgaggagagagctgacattgctgagagccaggtgaacaagctgcgggccaagagccgggacattggagccaagcagaagatgcatgatgaggagtag

SEQ ID NO: 129044 - DNA, 5871 bp, Artificial Sequence
  derived and/or modified sequence
cgtgaagggataaccaggggaagcaccaagatgaccgatgcccagatggctgactttggggcagcggcccagtacctccgcaagtcagagaaggagcgtctagaggcccagacccggccctttgacattcgcactgagtgcttcgtgcccgatgacaaggaagagtttgtcaaagccaagattttgtcccgggagggaggcaaggtcattgctgaaaccgagaatgggaagacggtgactgtgaaggaggaccaggtgttgcagcagaacccacccaagttcgacaagattgaggacatggccatgctgaccttcctgcacgagcccgcggtgcttttcaacctcaaggagcgctacgcggcctggatgatatatacctactcgggcctcttctgtgtcactgtcaacccctacaagtggctgccggtgtacaatgccgaggtggtggccgcctaccggggcaagaagaggagtgaggccccgccccacatcttctccatctccgacaacgcctatcagtacatgctgacagatcgggagaaccagtccatcctcatcacgggagaatccggggcggggaagactgtgaacaccaagcgtgtcatccagtactttgccagcattgcagccataggtgaccgtggcaagaaggacaatgccaatgcgaacaagggcaccctggaggaccagatcatccaggccaaccccgctctggaggccttcggcaatgccaagactgtccggaacgacaactcctcccgctttgggaaattcattaggatccactttggggccactggaaagctggcttctgcagacatagagacctacctgctggagaagtcccgggtgatcttccagctgaaagctgagagaaactaccacatcttctaccagattctgtccaacaagaagccggagttgctggacatgctgctggtcaccaacaatccctacgactacgccttcgtgtctcagggagaggtgtccgtggcctccattgatgactccgaggagctcatggccaccgatagtgcctttgacgtgctgggcttcacttcagaggagaaagctggcgtctacaagctgacgggagccatcatgcactacgggaacatgaagttcaagcagaagcagcgggaggagcaggcggagccagacggcaccgaagatgctgacaagtcggcctacctcatggggctgaactcagctgacctgctcaaggggctgtgccaccctcgggtgaaagtgggcaacgagtatgtcaccaaggggcagagcgtgcagcaggtgtactactccatcggggctctggccaaggcagtgtatgagaagatgttcaactggatggtgacgcgcatcaacgccaccctggagaccaagcagccacgccagtacttcataggagtcctggacatcgctggcttcgagatcttcgacttcaacagctttgagcagctctgcatcaacttcaccaacgagaagctgcagcagttcttcaaccaccacatgttcgtgctggagcaggaggagtacaagaaggagggcattgagtggacattcattgactttggcatggacctgcaggcctgcattgacctcatcgagaagcccatgggcatcatgtccatcctggaggaggagtgcatgttccccaaggccactgacatgaccttcaaggccaagctgtacgacaaccacctgggcaagtccaacaatttccagaagccacgcaacatcaaggggaagcaggaagcccacttctccctgatccactacgccggcactgtggactacaacatcctgggctggctggaaaaaaacaaggatcctctcaacgagactgttgtggccctgtaccagaagtcctccctcaagctcatggccactctcttctcctcctacgcaactgccgatactggggacagtggtaaaagcaaaggaggcaagaaaaagggctcatccttccagacggtgtcggctctccaccgggaaaatctcaacaagctaatgaccaacctgaggaccacccatcctcactttgtgcgttgcatcatccccaatgagcggaaggctccaggggtgatggacaaccccctggtcatgcaccagctgcgctgcaatggcgtgctggagggcatccgcatctgcaggaagggcttccccaaccgcatcctctacggggacttccggcagaggtatcgcatcctgaacccagtggccatccctgagggacagttcattgatagcaggaaggggacagagaagctgctcagctctctggacattgatcacaaccagtacaagtttggccacaccaaggtgttcttcaaggcagggctgcttgggctgctggaggagatgcgggatgagaggctgagccgcatcatcacgcgcatgcaggcccaagcccggggccagctcatgcgcattgagttcaagaagatagtggaacgcagggatgccctgctggtaatccagtggaacattcgggccttcatgggggtcaagaattggccctggatgaagctctacttcaagatcaagccgctgctgaagagcgcagagacggagaaggagatggccaccatgaaggaagagttcgggcgcatcaaagagacgctggagaagtccgaggctcgccgcaaggagctggaggagaagatggtgtccctgctgcaggagaagaatgacctgcagctccaagtgcaggcggaacaagacaacctcaatgatgctgaggagcgctgcgaccagctgatcaaaaacaagattcagctggaggccaaagtaaaggagatgaatgagaggctggaggatgaggaggagatgaacgcggagctcactgccaagaagcgcaagctggaagacgagtgctcagagctcaagaaggacattgatgacctggagctgacactggccaaggtggagaaggagaagcatgcaacagagaacaaggtgaagaacctaacagaggagatggctgggctggatgaaatcatcgctaagctgaccaaggagaagaaagctctacaagaggcccatcagcaggccctggatgaccttcaggttgaggaagacaaggtcaacagcctgtccaagtctaaggtcaagctggagcagcaggtggatgatctggagggatccctagagcaagagaagaaggtgcgcatggacctggagcgagcaaagcggaaactggagggcgacctgaagctgacccaggagagcatcatggacctggaaaatgataaactgcagctggaagaaaagcttaagaagaaggagtttgacattaatcagcagaacagtaagattgaggatgagcaggtgctggcccttcaactacagaagaaactgaaggaaaaccaggcacgcatcgaggagctggaggaggagctggaggccgagcgcaccgccagggctaaggtggagaagctgcgctcagacctgtctcgggagctggaggagatcagcgagcggctggaagaggccggcggggccacgtccgtgcagatcgagatgaacaagaagcgcgaggccgagttccagaagatgcggcgggacctggaggaggccacgctgcagcacgaggccactgccgcggccctgcgcaagaagcacgccgacagcgtggccgagctgggcgagcagatcgacaacctgcagcgggtgaagcagaagctggagaaggagaagagcgagttcaagctggagctggatgacgtcacctccaacatggagcagatcatcaaggccaaggcaaacctggagaaagtgtctcggacgctggaggaccaggccaatgagtaccgcgtgaagctagaagaggcccaacgctccctcaatgatttcaccacccagcgagccaagctgcagaccgagaatggagagttggcccggcagctagaggaaaaggaggcgctaatctcgcagctgacccgggggaagctctcttatacccagcaaatggaggacctcaaaaggcagctggaggaggagggcaaggcgaagaacgccctggcccatgcactgcagtcggcccggcatgactgcgacctgctgcgggagcagtacgaggaggagacagaggccaaggccgagctgcagcgcgtcctgtccaaggccaactcggaggtggcccagtggaggaccaagtatgagacggacgccattcagcggactgaggagctcgaagaggccaaaaagaagctggcccagcggctgcaggatgccgaggaggccgtggaggctgttaatgccaagtgctcctcactggagaagaccaagcaccggctacagaatgagatagaggacttgatggtggacgtagagcgctccaatgctgctgctgcagccctggacaagaagcagagaaactttgacaagatcctggccgagtggaagcagaagtatgaggagtcgcagtctgagctggagtcctcacagaaggaggctcgctccctcagcacagagctcttcaagctcaagaacgcctacgaggagtccctggagcacctagagaccttcaagcgggagaacaagaaccttcaggaggaaatctcggaccttactgagcagctaggagaaggaggaaagaatgtgcatgagctggagaaggtccgcaaacagctggaggtggagaagctggagctgcagtcagccctggaggaggcagaggcctccctggagcacgaggagggcaagatcctccgggcccagctagagttcaaccagatcaaggcagagatcgagcggaagctggcagagaaggacgaggagatggaacaggccaagcgcaaccaccagcgggtggtggactcgctgcagacctccctggatgcagagacacgcagccgcaacgaggtcctgagggtgaagaagaagatggaaggagacctcaatgagatggagatccagctcagccacgccaaccgcatggctgccgaggcccagaagcaagtcaagagcctccagagcttgctgaaggacacccagatccagctggacgatgcggtccgtgccaacgacgacctgaaggagaacatcgccatcgtggagcggcgcaacaacctgctgcaggctgagctggaggagctgcgtgccgtggtggagcagacagagcggtcccggaagctggcggagcaggagctgattgagaccagcgagcgggtgcagctgctgcattcccagaacaccagcctcatcaaccagaagaagaagatggagtcggatctgacccagctccagtcggaagtggaggaggcagtgcaggagtgcagaaacgccgaggagaaggccaagaaggccatcacggatgccgccatgatggcagaggagctgaagaaggagcaggacaccagcgcccacctggagcgcatgaagaagaacatggagcagaccattaaggacctgcagcaccggctggacgaggccgagcagatcgccctcaagggaggcaagaagcagctgcagaagctggaagcgcgggtgcgggagctggagggtgagctggaggccgagcagaagcgcaacgcagagtcggtgaagggcatgaggaagagcgagcggcgcatcaaggagctcacctaccagacagaggaagacaaaaagaacctgctgcggctacaggacctggtggacaagctgcaactgaaggtcaaggcctacaagcgccaggccgaggaggcggaggagcaagccaacaccaacctgtccaagttccgcaaggtgcagcatgagctggatgaggcagaggagcgggcggacatcgctgagtcccaggtcaacaagcttcgagccaagagccgtgacattggtgccaagcaaaaaatgcacgatgaggagtgacactgcctcgggaacctcact

SEQ ID NO: 129045 - DNA, 5941 bp, Artificial Sequence
  derived and/or modified sequence
agatagagagactcctgcggcccagattcttcaggattctccgtgaagggataaccaggggaagcaccaagatgaccgatgcccagatggctgactttggggcagcggcccagtacctccgcaagtcagagaaggagcgtctagaggcccagacccggccctttgacattcgcactgagtgcttcgtgcccgatgacaaggaagagtttgtcaaagccaagattttgtcccgggagggaggcaaggtcattgctgaaaccgagaatgggaagacggtgactgtgaaggaggaccaggtgttgcagcagaacccacccaagttcgacaagattgaggacatggccatgctgaccttcctgcacgagcccgcggtgcttttcaacctcaaggagcgctacgcggcctggatgatatatacctactcgggcctcttctgtgtcactgtcaacccctacaagtggctgccggtgtacaatgccgaggtggtggccgcctaccggggcaagaagaggagtgaggccccgccccacatcttctccatctccgacaacgcctatcagtacatgctgacagatcgggagaaccagtccatcctcatcacgggagaatccggggcggggaagactgtgaacaccaagcgtgtcatccagtactttgccagcattgcagccataggtgaccgtggcaagaaggacaatgccaatgcgaacaagggcaccctggaggaccagatcatccaggccaaccccgctctggaggccttcggcaatgccaagactgtccggaacgacaactcctcccgctttgggaaattcattaggatccactttggggccactggaaagctggcttctgcagacatagagacctacctgctggagaagtcccgggtgatcttccagctgaaagctgagagaaactaccacatcttctaccagattctgtccaacaagaagccggagttgctggacatgctgctggtcaccaacaatccctacgactacgccttcgtgtctcagggagaggtgtccgtggcctccattgatgactccgaggagctcatggccaccgatagtgcctttgacgtgctgggcttcacttcagaggagaaagctggcgtctacaagctgacgggagccatcatgcactacgggaacatgaagttcaagcagaagcagcgggaggagcaggcggagccagacggcaccgaagatgctgacaagtcggcctacctcatggggctgaactcagctgacctgctcaaggggctgtgccaccctcgggtgaaagtgggcaacgagtatgtcaccaaggggcagagcgtgcagcaggtgtactactccatcggggctctggccaaggcagtgtatgagaagatgttcaactggatggtgacgcgcatcaacgccaccctggagaccaagcagccacgccagtacttcataggagtcctggacatcgctggcttcgagatcttcgacttcaacagctttgagcagctctgcatcaacttcaccaacgagaagctgcagcagttcttcaaccaccacatgttcgtgctggagcaggaggagtacaagaaggagggcattgagtggacattcattgactttggcatggacctgcaggcctgcattgacctcatcgagaagcccatgggcatcatgtccatcctggaggaggagtgcatgttccccaaggccactgacatgaccttcaaggccaagctgtacgacaaccacctgggcaagtccaacaatttccagaagccacgcaacatcaaggggaagcaggaagcccacttctccctgatccactacgccggcactgtggactacaacatcctgggctggctggaaaaaaacaaggatcctctcaacgagactgttgtggccctgtaccagaagtcctccctcaagctcatggccactctcttctcctcctacgcaactgccgatactggggacagtggtaaaagcaaaggaggcaagaaaaagggctcatccttccagacggtgtcggctctccaccgggaaaatctcaacaagctaatgaccaacctgaggaccacccatcctcactttgtgcgttgcatcatccccaatgagcggaaggctccaggggtgatggacaaccccctggtcatgcaccagctgcgctgcaatggcgtgctggagggcatccgcatctgcaggaagggcttccccaaccgcatcctctacggggacttccggcagaggtatcgcatcctgaacccagtggccatccctgagggacagttcattgatagcaggaaggggacagagaagctgctcagctctctggacattgatcacaaccagtacaagtttggccacaccaaggtgttcttcaaggcagggctgcttgggctgctggaggagatgcgggatgagaggctgagccgcatcatcacgcgcatgcaggcccaagcccggggccagctcatgcgcattgagttcaagaagatagtggaacgcagggatgccctgctggtaatccagtggaacattcgggccttcatgggggtcaagaattggccctggatgaagctctacttcaagatcaagccgctgctgaagagcgcagagacggagaaggagatggccaccatgaaggaagagttcgggcgcatcaaagagacgctggagaagtccgaggctcgccgcaaggagctggaggagaagatggtgtccctgctgcaggagaagaatgacctgcagctccaagtgcaggcggaacaagacaacctcaatgatgctgaggagcgctgcgaccagctgatcaaaaacaagattcagctggaggccaaagtaaaggagatgaatgagaggctggaggatgaggaggagatgaacgcggagctcactgccaagaagcgcaagctggaagacgagtgctcagagctcaagaaggacattgatgacctggagctgacactggccaaggtggagaaggagaagcatgcaacagagaacaaggtgaagaacctaacagaggagatggctgggctggatgaaatcatcgctaagctgaccaaggagaagaaagctctacaagaggcccatcagcaggccctggatgaccttcaggttgaggaagacaaggtcaacagcctgtccaagtctaaggtcaagctggagcagcaggtggatgatctggagggatccctagagcaagagaagaaggtgcgcatggacctggagcgagcaaagcggaaactggagggcgacctgaagctgacccaggagagcatcatggacctggaaaatgataaactgcagctggaagaaaagcttaagaagaaggagtttgacattaatcagcagaacagtaagattgaggatgagcaggtgctggcccttcaactacagaagaaactgaaggaaaaccaggcacgcatcgaggagctggaggaggagctggaggccgagcgcaccgccagggctaaggtggagaagctgcgctcagacctgtctcgggagctggaggagatcagcgagcggctggaagaggccggcggggccacgtccgtgcagatcgagatgaacaagaagcgcgaggccgagttccagaagatgcggcgggacctggaggaggccacgctgcagcacgaggccactgccgcggccctgcgcaagaagcacgccgacagcgtggccgagctgggcgagcagatcgacaacctgcagcgggtgaagcagaagctggagaaggagaagagcgagttcaagctggagctggatgacgtcacctccaacatggagcagatcatcaaggccaaggcaaacctggagaaagtgtctcggacgctggaggaccaggccaatgagtaccgcgtgaagctagaagaggcccaacgctccctcaatgatttcaccacccagcgagccaagctgcagaccgagaatggagagttggcccggcagctagaggaaaaggaggcgctaatctcgcagctgacccgggggaagctctcttatacccagcaaatggaggacctcaaaaggcagctggaggaggagggcaaggcgaagaacgccctggcccatgcactgcagtcggcccggcatgactgcgacctgctgcgggagcagtacgaggaggagacagaggccaaggccgagctgcagcgcgtcctgtccaaggccaactcggaggtggcccagtggaggaccaagtatgagacggacgccattcagcggactgaggagctcgaagaggccaaaaagaagctggcccagcggctgcaggatgccgaggaggccgtggaggctgttaatgccaagtgctcctcactggagaagaccaagcaccggctacagaatgagatagaggacttgatggtggacgtagagcgctccaatgctgctgctgcagccctggacaagaagcagagaaactttgacaagatcctggccgagtggaagcagaagtatgaggagtcgcagtctgagctggagtcctcacagaaggaggctcgctccctcagcacagagctcttcaagctcaagaacgcctacgaggagtccctggagcacctagagaccttcaagcgggagaacaagaaccttcaggaggaaatctcggaccttactgagcagctaggagaaggaggaaagaatgtgcatgagctggagaaggtccgcaaacagctggaggtggagaagctggagctgcagtcagccctggaggaggcagaggcctccctggagcacgaggagggcaagatcctccgggcccagctagagttcaaccagatcaaggcagagatcgagcggaagctggcagagaaggacgaggagatggaacaggccaagcgcaaccaccagcgggtggtggactcgctgcagacctccctggatgcagagacacgcagccgcaacgaggtcctgagggtgaagaagaagatggaaggagacctcaatgagatggagatccagctcagccacgccaaccgcatggctgccgaggcccagaagcaagtcaagagcctccagagcttgctgaaggacacccagatccagctggacgatgcggtccgtgccaacgacgacctgaaggagaacatcgccatcgtggagcggcgcaacaacctgctgcaggctgagctggaggagctgcgtgccgtggtggagcagacagagcggtcccggaagctggcggagcaggagctgattgagaccagcgagcgggtgcagctgctgcattcccagaacaccagcctcatcaaccagaagaagaagatggagtcggatctgacccagctccagtcggaagtggaggaggcagtgcaggagtgcagaaacgccgaggagaaggccaagaaggccatcacggatgccgccatgatggcagaggagctgaagaaggagcaggacaccagcgcccacctggagcgcatgaagaagaacatggagcagaccattaaggacctgcagcaccggctggacgaggccgagcagatcgccctcaagggaggcaagaagcagctgcagaagctggaagcgcgggtgcgggagctggagggtgagctggaggccgagcagaagcgcaacgcagagtcggtgaagggcatgaggaagagcgagcggcgcatcaaggagctcacctaccagacagaggaagacaaaaagaacctgctgcggctacaggacctggtggacaagctgcaactgaaggtcaaggcctacaagcgccaggccgaggaggcggaggagcaagccaacaccaacctgtccaagttccgcaaggtgcagcatgagctggatgaggcagaggagcgggcggacatcgctgagtcccaggtcaacaagcttcgagccaagagccgtgacattggtgccaagcaaaaaatgcacgatgaggagtgacactgcctcgggaacctcactcttgccaacctgtaataaatatgagtgcc

SEQ ID NO: 129046 - DNA, 5820 bp, Artificial Sequence
  derived and/or modified sequence
atgaccgacgcccagatggccgacttcggcgccgccgcccagtacctgagaaaatctgaaaaggagaggttggaggctcagacaaggccctttgatattaggaccgagtgttttgttccagatgataaggaggagttcgtgaaggccaagatccttagtcgcgagggcggaaaggtgatcgccgaaactgagaatgggaagaccgtgaccgtgaaggaagaccaagttctgcaacagaacccacccaagttcgataagattgaggacatggccatgctcaccttcctacacgagccagcggtactgttcaatctgaaggagcggtatgctgcatggatgatctatacttattccggactattctgcgtgacagtcaacccttacaagtggctgcctgtctacaacgcggaagtggtggcagcttacaggggcaagaagcgctctgaggcacctccgcatatcttcagcatttcagacaatgcatatcagtatatgttgacagatagggaaaaccagtccatcctcatcactggtgagagtggagcaggcaagactgttaacacaaaaagagtgattcaatacttcgcctctatagcagccatcggagaccggggaaaaaaggataacgctaacgcaaacaaaggaactctagaggaccagatcattcaggcaaatcctgcgctcgaagctttcggcaacgctaagacagtgcgcaacgataattcttcaaggtttggcaagttcatacgaattcacttcggtgctacgggaaaactcgcctcggcagatattgaaacttacctattggaaaagtctcgagtgatctttcagctcaaggccgagcgcaactatcatatcttctatcagatcctttctaataaaaagcctgaactgttagacatgctcctggtgaccaacaacccttatgattacgcctttgtgagtcagggggaagtgagcgttgctagcattgacgacagcgaggaactaatggcaaccgactctgccttcgacgttttgggctttacgagtgaagagaaagccggcgtctataagttaaccggcgcaatcatgcattatggtaacatgaagtttaaacagaagcagcgtgaggaacaggctgaacctgatggcaccgaggatgccgataaatctgcctatttgatgggattaaactctgctgatcttctgaaagggctgtgccatccgcgagtcaaggtagggaatgagtatgtgacaaagggccagtcggtgcagcaggtctactactccattggcgccctcgctaaggccgtgtatgaaaagatgttcaattggatggtcactcggattaacgccaccctcgagaccaagcagccccgccagtacttcatcggggtcctcgacattgcgggattcgagattttcgacttcaatagctttgagcagctgtgtattaattttactaacgagaagctgcaacaattcttcaaccatcatatgtttgtgctggagcaggaggagtacaaaaaagagggaatcgaatggaccttcatcgactttgggatggacttacaggcttgtatagatctcattgaaaaacctatgggtattatgagcatcctggaagaagaatgcatgtttcctaaagccacggatatgactttcaaggcgaagttgtatgataatcacttaggtaaaagcaataatttccagaagccacgaaacatcaagggaaaacaggaggctcacttttccctgattcattacgccggtactgtggattataatatcttaggatggcttgagaaaaacaaagacccactgaatgaaactgtggtcgccctctaccagaagagtagcctgaaactcatggctacactcttttcttcctatgccacagccgacacaggggacagcggcaagtccaaaggggggaagaagaaaggcagttccttccagacagttagcgcactccacagagagaacctgaacaagctgatgaccaacctgaggactactcaccctcacttcgttaggtgcatcattcctaatgagcgcaaagcacccggagtgatggataatccactggttatgcaccaactccggtgcaacggcgtgctagaagggattcggatctgtaggaaagggttccctaacaggattctttatggcgatttccgtcaacgatacagaatattgaacccagtcgccatacctgaaggtcagttcatcgatagtcgcaaggggacggaaaaattgctgtcatccctggacattgaccataatcagtataaatttggccacaccaaggtcttctttaaagccggcctgctggggctgctagaagagatgcgggatgagcggctctcaagaattatcaccaggatgcaagcccaggcccgcggccagctcatgagaattgagttcaaaaagattgtcgagaggcgggatgccctattagtcatccaatggaatataagggcttttatgggcgtgaaaaattggccctggatgaagctttactttaaaataaagcccctgttaaaatccgctgaaactgaaaaggagatggctacaatgaaggaggagtttggccggataaaggagacgctggagaaaagcgaagcacgccgtaaggagctggaggagaagatggttagcctgctgcaggaaaagaacgatctgcaactacaggtccaggctgaacaggataatttaaatgatgctgaagagcggtgcgaccaattgatcaaaaataaaatacaactcgaggccaaagtcaaggagatgaatgaaagactggaagatgaagaagaaatgaacgcggagctcaccgcaaagaaaagaaagctggaggatgaatgttctgaactaaagaaagatattgatgacctcgagctgacactggcgaaagtggagaaggaaaagcacgccaccgagaacaaagtgaaaaacttgactgaagaaatggccggactggatgagatcattgcgaagctcactaaggagaaaaaagctctgcaggaggcccaccagcaggcactggatgacctgcaggtcgaagaggacaaggtgaattcactttcgaaaagtaaggttaaattggagcaacaagtggacgatcttgaaggatcgctggagcaagagaagaaggtcaggatggacttggaaagggccaaacgcaagttggaaggggacctcaagctaacccaggaaagcattatggacttggaaaacgacaagctgcagcttgaggaaaagcttaagaaaaaggagttcgacattaaccagcagaactctaagatagaagatgaacaggtgcttgccctgcaactgcaaaaaaaactgaaagaaaaccaagcccggatcgaagagttggaagaggagctggaagccgagagaacggctagggccaaagtggaaaagcttcggagcgacttaagccgcgaactggaggagatctcagagaggctggaggaagccggaggggccacctcggtgcagatcgagatgaacaaaaagagagaagcagagtttcagaagatgcggcgcgacctagaggaggccacacttcaacatgaagcaacagcagctgctctgaggaagaaacacgccgatagtgtggcggagctgggagagcagattgacaacctccagagagtcaagcagaagttggagaaggaaaagagcgagttcaagctcgagctggacgatgtgacctcaaatatggaacagatcattaaggcaaaagcaaatcttgagaaggtcagcagaactctagaagaccaagcaaacgagtacagagtcaaactggaagaggcgcaacggtctctcaacgattttactacgcagcgggccaaacttcagaccgagaacggtgagctggcaagacagctggaagaaaaggaagcactgatttcacagctaacaaggggaaagctgtcttacactcagcagatggaagacctaaagcgccagctcgaggaagagggaaaagccaagaacgcacttgcgcacgcattacagagtgctcgccatgattgtgacctcctgagagaacagtacgaggaagagacggaagctaaagcagaattgcagcgtgtgctgtcaaaggccaacagtgaagtcgcgcagtggcggactaaatacgagacagatgcgatccagcgtacggaggaactggaggaggcaaagaaaaaactggcccaacgtctccaggatgctgaagaggccgtcgaagcggttaatgcaaaatgctcaagtctcgagaagaccaagcatcgacttcagaatgaaatcgaggatctgatggtggacgtggaacggagtaacgccgcagccgccgctctggataagaaacagagaaactttgacaagatcctggcggaatggaaacagaaatatgaagaatctcagtcggagttggagagcagccagaaagaggccaggtcactctcgactgagctatttaagcttaagaatgcatatgaagagtcactcgagcacctggagacttttaaacgcgaaaacaaaaacctgcaggaggagatctccgatctcaccgagcagcttggtgagggtgggaagaacgtgcacgagctggaaaaagtcagaaagcagttagaagtcgaaaagctcgagctgcagtcggccttggaagaagcagaggcgtccttagaacacgaagagggcaagatcctgagagctcagcttgaatttaaccagataaaggcagagattgaacgcaagctcgccgaaaaggatgaagagatggagcaggccaaacggaaccatcaaagagtcgtggactctctccagacaagtctggacgctgaaacgcggtcgcgaaatgaagtgctcagggtgaaaaagaagatggaaggtgatctcaacgagatggagatccagctctcacacgctaaccgaatggcggccgaggcacagaagcaggtgaaatccctccagtccctccttaaagacacccagatccagctcgacgatgcagtccgcgcgaacgacgatctgaaagaaaatatcgctatagtcgagcgtagaaataacctcctgcaagccgaactggaggagttaagagccgtggtcgagcagactgaaaggtcacggaagctcgctgaacaggagctcattgaaactagtgagcgagtccagctcctgcacagccagaacacatccctgattaaccagaaaaagaaaatggagagcgatcttactcagctccagagcgaggtggaggaggctgttcaagagtgcaggaatgccgaagaaaaggccaagaaggctataacagacgcagccatgatggcggaggaactgaaaaaggagcaggatacctccgctcatcttgagcggatgaaaaaaaacatggagcagacaattaaagacctccaacacaggctggacgaggccgaacaaatcgccctgaagggtggcaagaaacagctgcagaaactggaggctcgagtccgcgaactcgaaggtgagctcgaagccgagcaaaaacggaatgccgagtcggtgaaaggaatgcggaagagcgaacgacggattaaggagttgacctaccagacggaggaagataagaaaaacttactacggcttcaggacctggttgacaaattgcagctcaaagtaaaggcctacaaacggcaggcagaagaggccgaggaacaagctaacactaatctgtccaagtttaggaaggtgcaacacgaactcgatgaagctgaggaacgtgcagatattgccgaatcacaggtcaataagctccgcgcaaagagccgggacatcggcgctaaacagaagatgcatgatgaagagtag

SEQ ID NO: 129047 - DNA, 5820 bp, Artificial Sequence
  derived and/or modified sequence
atgaccgacgcccagatggccgacttcggcgccgccgcccagtacttgcgtaagtccgagaaagaacggttggaggcccaaacccggccctttgatatccgaactgagtgctttgtccctgatgacaaggaggagtttgtgaaagccaagatactatcacgcgaaggcggcaaagtcattgcagagactgaaaacgggaaaacagtaaccgtgaaggaagaccaggtgctccagcagaatcccccaaagttcgacaaaatagaagacatggccatgctgaccttcctgcatgagcctgcagtgcttttcaacctgaaggagcggtacgccgcatggatgatctacacctatagcgggctgttctgtgtgacggtcaacccttataaatggcttcccgtctacaacgccgaagtcgtcgccgcatatcgcgggaaaaagaggagcgaggccccgcctcatattttctcaatatccgataacgcgtatcagtatatgctcactgaccgagagaaccagagtatcctcatcaccggagagagcggcgcgggcaaaaccgtgaatactaaaagagtgattcaatattttgctagtatagccgccatcggcgatagaggaaaaaaagataacgccaacgcgaataaaggtaccctggaggatcagatcatccaagcaaatcccgcacttgaggcatttgggaatgcaaagacagttcgtaacgacaacagttcccggtttggaaagtttatcagaatacattttggcgccaccggcaaactggcttccgcggatatcgagacatatctactcgagaagtcacgggtgattttccagctgaaggctgagagaaactatcatatcttttaccagatcctgagcaataagaagcctgagttgctggacatgctgttagtgaccaacaatccctatgactatgcgtttgtttctcagggcgaagtgagtgtggccagcattgatgacagcgaggagctgatggccacggactctgcgtttgacgtgctgggctttaccagcgaggaaaaggcaggggtgtacaagctgacgggggcgatcatgcactatggaaatatgaagttcaaacagaaacagcgcgaggaacaggctgaacccgacgggacagaagacgctgataagagcgcctatttaatgggcctaaattccgccgatttattaaagggtctgtgtcacccaagagttaaagtcggcaatgaatatgtgactaagggccagtccgtgcaacaggtgtactactctatcggcgccctggcaaaagcagtgtacgagaaaatgtttaattggatggtcactaggatcaatgccaccctcgaaactaaacagccaaggcaatattttattggcgtgctcgacatcgcagggtttgagatcttcgactttaattcctttgagcaattatgcatcaacttcactaatgaaaagttgcagcagtttttcaaccaccacatgtttgtcctggagcaggaggaatacaagaaggaggggatcgagtggacatttattgactttggtatggaccttcaggcttgcatagatttaatagagaagcctatgggtatcatgtccatcttggaagaagagtgcatgtttcctaaggctaccgatatgacatttaaggccaagctctatgataaccacctgggtaagtccaataatttccagaagccccgcaatatcaagggtaaacaggaagctcatttctccttgattcattacgctgggacagtggattacaatatcctcggctggctcgaaaaaaacaaagaccctcttaacgagacagtggttgcactgtaccagaaatctagccttaaactcatggccacgctttttagcagctacgcaaccgcagataccggagactcaggcaaatcaaaagggggaaagaaaaaggggtcgtcttttcagacagtgtctgctctccatcgagagaaccttaataaactgatgacaaacctgagaaccacccatccccacttcgtgcgatgcattatccctaacgagcggaaggcgccaggggtgatggataacccgttggtgatgcatcaactgaggtgcaatggcgtgcttgaaggcataaggatatgccggaaagggttccctaacagaattctatacggggatttccgtcagcggtacagaatccttaacccagtcgcaattcctgagggccagttcattgatagcaggaagggaactgaaaaactgctgagtagcctagacatcgaccacaatcaatacaaatttggccataccaaggtgttcttcaaggcgggcttgttggggcttcttgaagaaatgcgggacgaacgcctcagccgcattattacccgaatgcaggcgcaggcgcggggccagcttatgcggattgaattcaagaagatcgttgagaggcgggatgccctcctggtcatccagtggaatattagggctttcatgggcgtcaagaactggccatggatgaaactctactttaagattaaaccccttcttaagagcgccgaaactgaaaaggaaatggcaacaatgaaggaagagtttggacgaataaaagagactcttgagaaaagcgaggcccgccgcaaagaacttgaggagaaaatggttagcctgctgcaggagaagaatgacctgcagctccaagttcaagctgaacaagacaacctcaacgacgcagaggaacggtgcgaccaactcatcaagaacaaaatccagcttgaggccaaggtaaaagagatgaacgagcggctggaagacgaggaggagatgaacgcggagcttaccgccaagaaacggaaattggaagacgaatgctcagaactgaagaaggatattgatgacctcgaactcactctggccaaagtggaaaaggaaaagcacgccacagaaaataaggtgaagaacctgacagaggaaatggctggcctggacgaaattattgccaagctgaccaaagagaaaaaggcactgcaagaagcacaccagcaggccctggatgatctccaggtcgaggaagataaggtcaatagcctttctaaatctaaggtgaagctcgagcagcaggttgacgatctcgagggctccctggagcaggagaaaaaagtgcggatggacctcgagcgcgcaaaacgtaagctggagggcgacctaaaacttacccaggagtccatcatggacttggaaaacgataagctgcagcttgaagagaagctgaagaaaaaggagtttgacattaaccagcaaaacagcaagattgaagacgaacaggtgctagccctgcagcttcaaaaaaagctcaaagagaaccaggcaagaatagaagaactggaggaggaattggaggcagaaagaaccgcgcgagcgaaggtggagaaactgagaagcgatttatcaagggagctggaggaaatctcagagcgactggaggaagctgggggagccacaagtgtgcagattgagatgaacaaaaaaagagaggcagagttccagaaaatgcggcgggacctggaggaggccaccctccagcatgaagccacagcagccgctctccgtaagaagcacgcagattcagtagccgagcttggcgaacagattgacaaccttcagagagtgaaacaaaagctggagaaggaaaagagcgagtttaaactggagctggatgatgtcaccagtaacatggagcaaatcattaaggcgaaggcaaacctggaaaaggtgagtcgcactctggaagaccaggctaacgagtaccgggttaagctcgaggaagctcagaggtctctgaatgacttcacaacacagagagcaaaattgcaaaccgaaaatggtgaactggcgcgacagctggaagaaaaagaagcactcatctcccagcttaccaggggtaaattaagctacactcaacagatggaagacttgaagcgccagttagaggaggagggaaaagccaagaatgccctggcacatgcgctacagtccgcacgccacgactgtgacctgctccgggagcaatatgaggaggagaccgaagccaaagccgagctgcaacgggtcctgtcaaaagcaaactctgaagtcgcccagtggagaacgaaatacgaaacagatgcaatccagaggactgaagagctggaagaggccaagaagaaactcgcccagaggcttcaggatgccgaggaagccgtggaggcagttaacgccaagtgtagctcactcgagaaaactaagcacagactgcagaacgaaattgaagacctcatggttgatgttgagagatccaacgccgcagctgccgcactggataagaagcagcgcaacttcgataagatcctagctgaatggaaacaaaaatacgaggagtcccagtcagaactcgagagcagtcagaaggaggctaggtcactaagtactgaactctttaaactcaaaaatgcatacgaagaaagtctcgaacacttagagacttttaaaagagaaaacaaaaacctgcaagaagagatctcagatctcactgagcagctgggcgaaggtggaaaaaacgtccatgaattagagaaggtgaggaaacagttggaggttgagaagctggagcttcagtctgctctggaagaagccgaagccagcctggaacacgaagagggcaaaattctacgcgcacaactcgaatttaaccagattaaggcagaaattgagcgcaagcttgccgaaaaagacgaggagatggagcaggcaaaacgcaatcaccagcgggttgtcgattcactgcagacctccctagacgccgaaacgaggagcaggaacgaagtcttgcgagttaaaaaaaagatggaaggagatttgaacgagatggaaattcagctctctcatgccaacaggatggctgccgaggctcagaagcaggtaaaaagcctgcagtccctcctgaaagatacgcagattcaactggatgacgcagtgcgagccaacgacgatcttaaggaaaacattgctatcgtggagcggcgaaataacctcctccaggcagaactggaagaactgagggctgtggtggaacagactgagagatcccgcaaattggctgagcaggagttaattgagacatctgaacgcgttcaactgctccactcccagaatactagcctcataaaccagaaaaaaaagatggaaagcgatcttacacagcttcagtcagaagttgaagaggcggtacaggaatgtcgcaatgctgaagagaaggctaaaaaagcgatcacagatgctgccatgatggcggaagaactgaagaaagaacaggatacgagcgcccatctcgagcgaatgaagaagaacatggagcagaccatcaaggatctccagcaccggctggatgaggccgaacagatcgctcttaagggcggcaaaaagcagctgcaaaaactggaagccagggtccgtgaactggagggagaactggaggccgagcaaaagcgaaacgccgaaagcgttaagggaatgagaaagtctgaaaggcgcattaaggaacttacatatcagaccgaggaggacaagaagaatctgctgcggttacaagacctggtggacaagctgcagctgaaggttaaagcctataagagacaagccgaggaagctgaggaacaggctaataccaatctcagcaagttcaggaaagtccagcacgaactggacgaagcagaagagcgtgctgacattgccgagagtcaggtaaacaagctccgcgcaaaatcacgcgacatcggcgccaagcagaagatgcacgatgaggagtag

SEQ ID NO: 129048 - DNA, 5819 bp, Artificial Sequence
  derived and/or modified sequence
atgacggatgctcagatggcagatttcggggcagccgcacagtatttgaggaagtccgagaaagagcgtctcgaggcacagacccgtccgtttgacatcaggaccgagtgctttgtccctgacgacaaggaagaattcgtcaaagcaaagattctgagtagagagggaggaaaggtgatcgctgagactgagaatggtaagaccgtgacggtaaaggaggaccaagtcctccagcagaatccacccaagtttgacaagattgaggatatggcaatgttaacattcttgcatgagccagccgtacttttcaatctcaaggagaggtacgctgcatggatgatatacacttacagcggccttttctgcgtcaccgtcaatccttataagtggctgccagtgtataacgccgaggtggtggccgcttacagagggaagaaacgttcggaggcccctccacacatcttctctattagcgataacgcttatcagtacatgctgacagaccgggaaaaccagtctattttaatcactggagagtctggcgcaggcaagaccgtgaatacaaagcgcgtgatacagtacttcgcatcaatcgctgctattggagaccgaggtaagaaggataacgcaaatgcaaacaaaggtaccctagaggatcagataatccaagccaaccctgcactggaggctttcgggaatgctaaaaccgtgcggaacgacaactctagtcgatttggtaagtttatcagaatacactttggagccaccgggaagctggcatcagctgatatcgaaacgtatctgcttgaaaagtcgagagtaattttccagttgaaggcggagcgaaattaccacatattttaccagattctctctaacaaaaagcccgagttactcgatatgttgttagtcactaataacccctatgattacgcctttgtcagccagggcgaggtgagcgttgcatctattgatgattctgaagagttgatggccactgactcggctttcgacgtgctcggcttcacctccgaagagaaggctggagtgtataagctcacaggcgctatcatgcactacggcaacatgaaatttaaacagaagcagagggaggagcaagctgaacccgacggcaccgaggacgccgataaatcggcctatctcatgggtctgaacagcgccgacctgctaaagggcctctgtcatccaagagtgaaggtgggtaacgagtacgtcacaaagggtcagagcgtgcagcaggtatactattccattggcgcactcgcaaaggccgtgtacgagaaaatgtttaactggatggtaacacggatcaacgctaccctggaaactaagcaacccaggcagtattttattggcgtcctggacattgcagggttcgagattttcgacttcaatagttttgaacagttatgtatcaattttaccaatgaaaagctccagcagtttttcaaccaccacatgttcgtcctggagcaggaggaatataaaaaggaaggtatagagtggacctttattgattttggaatggatctccaggcgtgcattgacctcatcgagaagcctatgggaatcatgagcatcctggaagaagaatgtatgttccccaaagccaccgatatgacattcaaagccaagctctacgataaccacctgggaaagtcaaataactttcaaaagcccaggaatatcaaaggtaagcaggaggctcacttttcgctcattcattacgcaggtaccgtcgactataacatcctgggctggctcgagaagaataaagaccctctgaatgagaccgtggtcgccctttaccagaagtcaagcttgaaattgatggccacactgttctcttcgtacgctaccgcagataccggtgactccgggaagtcaaagggcggaaagaagaaaggatcatcgtttcagaccgtgtcggcacttcatcgtgaaaatctcaacaaactcatgaccaacctgcgcacgacgcacccccactttgtgaggtgcatcatacccaatgaacgcaaggcacccggagtgatggacaacccactagtgatgcatcaactccgatgcaatggcgtgctggagggtatccgcatttgtaggaaaggctttcctaaccggattctgtacggcgactttaggcagaggtaccgaattttgaatcctgtggccatacctgagggccaatttatagacagtcgaaaaggtactgagaagttactttcttcactggacattgatcacaatcagtataaatttgggcatactaaagtgttcttcaaggccggactcttgggtttgctcgaagaaatgcgcgatgagcgcctctcacgcattattactaggatgcaggcacaggcaagagggcagctgatgcggattgaatttaagaagattgtcgaacgccgtgacgcgttactcgtcatccaatggaacataagagcctttatgggagttaaaaattggccgtggatgaaactctacttcaaaataaaacctctcctaaaaagcgccgagactgagaaggaaatggccaccatgaaagaagaattcggtcgaatcaaagaaactcttgaaaagtccgaggcacggaggaaggagctggaggaaaaaatggtgagtctactgcaagaaaagaatgatcttcagctgcaggtacaggctgaacaggataacctgaatgatgccgaggagcgctgcgaccagttgatcaaaaataagattcaattggaagccaaagtcaaagagatgaacgagagactagaggatgaggaggagatgaacgcggagctcaccgccaaaaagaggaagctcgaagatgaatgtagcgaactgaagaaggatatcgacgacttagaactaaccctggcaaaggtggaaaaagaaaagcatgctactgaaaacaaggtaaagaacctgacagaagaaatggctggcctagacgagattatagccaagctgactaaagaaaaaaaggcccttcaggaggcccaccaacaggcgttagatgatctccaggtggaggaggataaggtgaattctctgtccaagtcaaaggtgaagttggagcagcaagtggatgacctggaagggtctctcgagcaagagaagaaggtccgaatggatcttgaacgcgctaaacgaaaactagaaggagaccttaaattgactcaggagagtattatggatttggaaaacgacaaattacagcttgaagagaagctgaaaaagaaagagttcgacatcaatcaacagaactccaaaatcgaggacgagcaggtcctggctctccaactgcagaagaagttgaaagaaaatcaggccagaatcgaggaattggaggaagagttggaggccgagaggaccgccagagcaaaggtggaaaagctgcgctccgatctttctcgcgagctcgaggaaatcagtgaaaggctcgaagaggccggtggagccaccagcgtgcagatcgagatgaataaaaagagagaggccgagtttcagaagatgcgcagagacctcgaggaggcgacattgcagcacgaggcaactgccgcagctctccgcaaaaagcacgctgatagcgtggcggagttgggggaacaaatcgataacctccagcgagttaagcaaaagttagagaaagaaaagagcgaatttaagctggaattggatgatgtcacgagcaacatggaacaaatcatcaaggcaaaggccaatttagagaaggttagccggaccctcgaggaccaggcaaacgagtatagggtcaagttagaggaagcccagaggtccctcaacgacttcaccacacagcgggctaagcttcagaccgagaatggagagttggcgagacagctcgaagagaaggaggcactgattagtcaattgacccggggaaaactaagctacacccagcaaatggaggatttgaagcgtcaactggaagaagaaggtaaagctaagaacgcactagctcacgcccttcagagcgcacgccacgattgcgacttgcttcgggagcagtatgaagaggaaaccgaggctaaagccgaactgcagcgcgttttgagcaaagcaaacagtgaggtagctcagtggaggaccaagtatgagaccgatgctattcaaagaaccgaagagctggaggaagcaaagaaaaagctcgcacaacgcctgcaggatgcagaggaagctgtcgaagccgtgaatgctaagtgttcctcattagagaagaccaaacaccggctgcagaacgagatagaggatttgatggtggatgtagagaggagcaacgctgcggctgccgctcttgacaaaaaacagcgaaactttgataagatcctggccgaatggaaacaaaagtacgaggaatctcaatcagagctggaaagttcccagaaggaggccagaagtctcagcactgaattatttaagcttaagaacgcatacgaagagtccctcgagcacctggagacatttaaacgcgagaacaagaatcttcaggaggagatctccgacctgacagaacagctcggtgagggaggaaaaaacgtacatgaactggagaaagtgaggaaacagctcgaggttgagaagctcgaactccagagcgccctagaggaggccgaagccagcttagagcacgaggaggggaagatacttcgcgctcagctggagtttaatcagatcaaggcagaaattgagagaaaacttgcggagaaagacgaggaaatggagcaggccaagcggaatcatcagagggtcgtggactccctgcaaacatctctggatgcggaaacacgaagtcggaatgaagtgttgagagtcaaaaagaagatggagggggatctgaatgaaatggaaattcagctctcccatgccaatcggatggctgcggaggctcagaaacaagtgaaatccttacagtctttgctgaaagatacacagatacagctggacgacgctgtccgagcaaacgacgatttaaaagaaaacatcgcgattgtggaaaggagaaataacctcctgcaagcagaattagaggagctgagagcagtggtggagcagacagagcggagccgcaaattagccgaacaagaattgatcgaaacatcggaacgtgtgcaactgctgcactcacagaatacctcccttattaaccagaagaaaaagatggagagtgatcttacgcagttgcaatcagaggttgaagaggctgtacaagagtgcaggaacgccgaggaaaaggctaagaaagcaatcaccgatgcagccatgatggccgaagagttgaagaaggaacaggacacaagcgcacacctcgagagaatgaaaaagaatatggaacagacaatcaaagacctgcaacacagacttgacgaggctgagcaaatcgccctcaaggggggaaagaaacagctgcagaaactggaagcgagagtccgtgaattagaaggggaactggaggccgagcaaaagcgcaatgccgaatccgtgaaaggcatgcggaagtccgagcgacgcatcaaggaactgacttaccaaacagaggaggataaaaaaaatctgcttcggctgcaggatttggtcgacaagctgcagctcaaagtgaaggcctataagcgccaggccgaagaggcagaagaacaagcaaacacgaacctgtcgaaattccggaaagtgcagcacgagctggacgaggctgaagagagagcagatatcgccgaatctcaagtgaacaagttgcgagcgaagtcccgggatattggggctaagcagaaaatgcacgacgaagaata

SEQ ID NO: 129049 - DNA, 5819 bp, Artificial Sequence
  derived and/or modified sequence
atgaccgatgcccaaatggctgactttggtgctgctgcgcaatatctgcgtaagtccgagaaagaacggctggaggcccaaacccgcccatttgatatccgcaccgagtgttttgttcctgatgacaaagaggaatttgtgaaggctaagatactgtcacgagaaggaggaaaagtaatcgcagagaccgaaaatggcaaaacagtgactgtgaaggaagaccaggtgctgcagcagaatccccctaagtttgataaaattgaggacatggctatgctgaccttccttcatgagcccgctgtgttgttcaaccttaaggaaaggtacgccgcttggatgatatacacgtatagtggcctgttctgcgttactgtaaacccctacaagtggctccccgtctataatgccgaggttgtcgccgcttatcgcggaaagaagagatctgaggcgccaccacatattttctccatcagcgacaacgcctatcagtacatgctgacagatcgcgagaaccagagcatactgatcacaggcgaaagcggcgcaggtaagaccgtcaacactaaacgcgtcatccagtacttcgcgtctattgccgctattggagacaggggcaaaaaggataacgctaatgccaacaaaggaaccttggaagatcaaataattcaggccaaccctgctcttgaagctttcggcaatgcaaaaaccgtccgtaacgacaactcttccagattcggcaaatttatcagaatacactttggcgctacaggaaaattagcctctgctgatattgagacgtacctgttggagaaatctcgcgtgatattccagctgaaggcagagaggaattaccatatcttttaccaaattctgagcaacaagaagcccgaattgctggacatgctcctggtcacaaacaacccctacgactatgctttcgtttcccagggtgaggtatcagtagcgagcatcgacgacagcgaggaattgatggccaccgatagcgcgttcgacgtgcttggatttactagcgaggaaaaggcaggcgtgtataaattaacaggcgctatcatgcactatggcaatatgaaatttaagcagaagcaaagagaggagcaggccgaaccggacggcaccgaggacgccgataagtctgcctacctgatgggcctcaatagcgctgacctgttgaagggtctttgtcacccccgtgtgaaagtgggtaacgaatacgtcactaagggccagagtgtccagcaagtgtattacagcatcggcgctcttgcaaaggccgtttacgagaagatgtttaactggatggtaacccgcattaacgccaccctcgaaacaaagcaaccacgccaatacttcatcggcgtgctcgacatcgcgggattcgagatctttgatttcaattcctttgaacagctatgcatcaacttcaccaacgagaaactgcagcagttctttaaccatcatatgtttgttctggagcaggaagaatacaaaaaagagggaatcgagtggacctttatcgactttgggatggatctgcaggcgtgcatcgacctgattgagaagcccatgggcattatgagcattttagaggaggagtgtatgttccccaaggctactgatatgaccttcaaagctaagctgtacgataaccaccttggcaaaagcaacaactttcagaagcccaggaatattaaggggaaacaggaggcacatttctctctgattcactatgccggtaccgttgattacaacatactggggtggctggagaaaaataaagatccattgaacgagaccgtcgttgcactctatcagaagagttccctgaaactgatggcgacactgtttagctcatatgcaactgcggacacgggagattcaggcaaaagcaaggggggaaagaagaaaggcagcagcttccagacagtgtcagctctccatcgggaaaacctcaacaaattgatgacaaacctcaggaccacccaccctcatttcgttcggtgcatcatcccaaatgaacgaaaagcacccggtgttatggacaatcccctggttatgcaccaactccgttgtaatggcgttctggagggcattagaatttgtcgcaaaggtttccctaatcgcattctctacggcgatttccgacagcgatataggattctgaatcctgtcgcaattccggagggacagttcattgactccaggaaaggtaccgaaaagttgctttcaagcctcgacatcgaccataatcagtacaagtttggccatacaaaagtgttcttcaaggccggactacttggactcttagaagagatgcgagacgagcgactaagccggattataactcggatgcaggcacaggccagggggcaattaatgaggatcgaattcaaaaagatcgtggagcgcagggatgcactgctggtaatccagtggaatataagggcatttatgggcgttaaaaattggccatggatgaaactgtatttcaagattaaacccttacttaaatccgccgaaacggagaaagaaatggctaccatgaaggaagaatttggtcggatcaaagaaaccttggaaaagtcagaggcacgacgtaaagaacttgaggagaagatggtgtccctcctccaagaaaagaacgatctgcagctgcaggtacaggccgaacaggacaatctgaacgatgctgaagaacgttgtgaccagctgatcaagaacaagattcagcttgaagccaaagttaaagagatgaacgagcgactggaagacgaagaagaaatgaacgctgagctaaccgccaagaagcggaagctcgaagatgaatgctcggagctgaaaaaagatatagacgacttagaactcactcttgcaaaggtggagaaagagaagcacgccaccgaaaacaaggtcaagaacctgactgaggagatggcagggctggacgagattattgccaagctgacaaaagaaaaaaaggccttgcaggaagctcatcagcaggctctggacgacctccaggtggaggaggataaggtgaactccttgtccaaatccaaagtaaagttggaacagcaggtggatgatttggaggggagcctcgaacaggaaaagaaagtccgcatggatctggaacgagccaagcgaaaactcgagggtgatctgaaactcacccaagagtcaatcatggatctcgagaatgacaagctccaactcgaggaaaagctgaaaaagaaagagtttgacatcaaccagcagaacagtaaaatagaggacgaacaggtcctggcactgcagttgcagaagaaattgaaggaaaatcaggctcgcattgaggagttagaagaggaactggaggccgagcggaccgcaagggctaaagtggaaaaattaagaagcgatctatccagagaactggaagagattagcgagagactcgaagaggccggaggcgcaacatcagtccagattgaaatgaacaaaaaaagagaagctgagttccagaagatgcgacgagatctggaggaagccacgctccagcacgaggctaccgcggctgccctgaggaaaaagcacgcggactcagtggcagaactgggcgagcaaattgataatctccagagggtgaagcagaagctggagaaggagaagtctgagttcaaactagagctagatgatgtcacaagcaacatggagcagattatcaaggccaaggcaaatctggagaaggtgagccggacgctggaggaccaagcaaacgagtacagagtgaagctggaggaagcccagagatccctgaatgatttcacgacgcaacgggcaaagctgcaaactgagaatggggaactggctaggcagctggaggaaaaggaggctctcatcagccagctgacacgcggaaaactgtcatacacccagcagatggaggacctcaagcgtcagctagaagaagagggcaaagccaagaacgcccttgcgcacgccttgcagtcagccagacatgattgtgatctgctcagagagcagtacgaggaggagaccgaagccaaggctgaactgcagcgtgtcctttccaaggcaaacagtgaggtggcccagtggaggacaaagtacgagaccgacgccatccagcgcacagaggaacttgaggaggcaaagaagaagctcgcccagagattacaggacgctgaagaggccgttgaagcggtgaatgccaaatgctccagcttggaaaagacaaaacatagactgcaaaatgaaatcgaagacctgatggtggatgtcgagaggtccaatgctgctgctgccgctttggacaagaagcagaggaactttgataagattctggctgagtggaagcagaaatatgaggaaagtcaaagtgagctggagagctcccagaaggaggctagaagcctgagcacggagctcttcaagctgaagaacgcatatgaagagtccctggaacatctggagacctttaagagagagaacaagaacctgcaggaagaaatctcagatctgactgaacaattgggtgaaggaggtaagaacgtccacgagctggaaaaggttaggaaacagttggaagttgaaaaattggagcttcagtctgccctcgaggaagctgaagcctccctggagcacgaggaaggtaagattctccgggcacaactcgaatttaaccagatcaaagccgaaatcgagaggaagttggcagagaaggatgaggagatggagcaggccaagcggaatcatcagagggttgtcgattcgctacagacctccctggatgccgaaactaggtcaagaaacgaggtactgcgggtgaagaaaaagatggagggggacctgaacgaaatggaaatccaactcagccatgctaatcgcatggcggcagaagcccagaagcaggtgaaaagcctgcaatcccttttgaaggacacacagattcaactggatgacgcagttcgggcaaatgatgacttgaaagagaacatcgctatcgtggagcggaggaacaatctgcttcaggccgagctggaggagctgagagcagtggtggagcaaactgagagaagtcggaaactcgctgagcaggagctcatcgaaacatcagagcgcgtgcagctgctgcacagccagaacaccagtctgattaatcagaagaaaaagatggagagtgatctcacacagttgcagagtgaagttgaggaagctgtacaagagtgccgtaacgcagaggagaaagcaaagaaagccatcactgatgcagcgatgatggctgaggagctgaaaaaagagcaggacacatccgcccatctcgaaagaatgaagaagaacatggagcaaactataaaggacctgcagcaccggcttgatgaagctgaacagattgcactgaaagggggtaagaaacagttgcagaagctagaagccagagtccgcgaactggagggagagttagaggctgagcagaagaggaatgcagagtctgtgaaagggatgcggaagagcgagagacgaatcaaagaacttacttatcagactgaagaggataagaaaaacctgttgcggcttcaggacctggtggacaaactccaactcaaggtgaaggcctataagcgccaggcagaagaggctgaggaacaggccaacactaatttgagcaaatttagaaaagttcagcacgagttggacgaggccgaggagcgggcagatatcgcggaaagccaggtgaataagctccgcgctaaaagcagagacattggtgccaagcaaaagatgcatgacgaagagta

SEQ ID NO: 129050 - DNA, 5820 bp, Artificial Sequence
  derived and/or modified sequence
atgaccgacgcccagatggccgacttcggcgccgccgcccagtacctgagaaagagcgagaaggagagactggaggcccagaccagacccttcgacatcagaaccgagtgcttcgtgcccgacgacaaggaggagttcgtgaaggccaagatcctgagcagagagggcggcaaggtgatcgccgagaccgagaacggcaagaccgtgaccgtgaaggaggaccaggtgctgcagcagaacccccccaagttcgacaagatcgaggacatggccatgctgaccttcctgcacgagcccgccgtgctgttcaacctgaaggagagatacgccgcctggatgatctacacctacagcggcctgttctgcgtgaccgtgaacccctacaagtggctgcccgtgtacaacgccgaggtggtggccgcctacagaggcaagaagagaagcgaggcccccccccacatcttcagcatcagcgacaacgcctaccagtacatgctgaccgacagagagaaccagagcatcctgatcaccggcgagagcggcgccggcaagaccgtgaacaccaagagagtgatccagtacttcgccagcatcgccgccatcggcgacagaggcaagaaggacaacgccaacgccaacaagggcaccctggaggaccagatcatccaggccaaccccgccctggaggccttcggcaacgccaagaccgtgagaaacgacaacagcagcagattcggcaagttcatcagaatccacttcggcgccaccggcaagctggccagcgccgacatcgagacctacctgctggagaagagcagagtgatcttccagctgaaggccgagagaaactaccacatcttctaccagatcctgagcaacaagaagcccgagctgctggacatgctgctggtgaccaacaacccctacgactacgccttcgtgagccagggcgaggtgagcgtggccagcatcgacgacagcgaggagctgatggccaccgacagcgccttcgacgtgctgggcttcaccagcgaggagaaggccggcgtgtacaagctgaccggcgccatcatgcactacggcaacatgaagttcaagcagaagcagagagaggagcaggccgagcccgacggcaccgaggacgccgacaagagcgcctacctgatgggcctgaacagcgccgacctgctgaagggcctgtgccaccccagagtgaaggtgggcaacgagtacgtgaccaagggccagagcgtgcagcaggtgtactacagcatcggcgccctggccaaggccgtgtacgagaagatgttcaactggatggtgaccagaatcaacgccaccctggagaccaagcagcccagacagtacttcatcggcgtgctggacatcgccggcttcgagatcttcgacttcaacagcttcgagcagctgtgcatcaacttcaccaacgagaagctgcagcagttcttcaaccaccacatgttcgtgctggagcaggaggagtacaagaaggagggcatcgagtggaccttcatcgacttcggcatggacctgcaggcctgcatcgacctgatcgagaagcccatgggcatcatgagcatcctggaggaggagtgcatgttccccaaggccaccgacatgaccttcaaggccaagctgtacgacaaccacctgggcaagagcaacaacttccagaagcccagaaacatcaagggcaagcaggaggcccacttcagcctgatccactacgccggcaccgtggactacaacatcctgggctggctggagaagaacaaggaccccctgaacgagaccgtggtggccctgtaccagaagagcagcctgaagctgatggccaccctgttcagcagctacgccaccgccgacaccggcgacagcggcaagagcaagggcggcaagaagaagggcagcagcttccagaccgtgagcgccctgcacagagagaacctgaacaagctgatgaccaacctgagaaccacccacccccacttcgtgagatgcatcatccccaacgagagaaaggcccccggcgtgatggacaaccccctggtgatgcaccagctgagatgcaacggcgtgctggagggcatcagaatctgcagaaagggcttccccaacagaatcctgtacggcgacttcagacagagatacagaatcctgaaccccgtggccatccccgagggccagttcatcgacagcagaaagggcaccgagaagctgctgagcagcctggacatcgaccacaaccagtacaagttcggccacaccaaggtgttcttcaaggccggcctgctgggcctgctggaggagatgagagacgagagactgagcagaatcatcaccagaatgcaggcccaggccagaggccagctgatgagaatcgagttcaagaagatcgtggagagaagagacgccctgctggtgatccagtggaacatcagagccttcatgggcgtgaagaactggccctggatgaagctgtacttcaagatcaagcccctgctgaagagcgccgagaccgagaaggagatggccaccatgaaggaggagttcggcagaatcaaggagaccctggagaagagcgaggccagaagaaaggagctggaggagaagatggtgagcctgctgcaggagaagaacgacctgcagctgcaggtgcaggccgagcaggacaacctgaacgacgccgaggagagatgcgaccagctgatcaagaacaagatccagctggaggccaaggtgaaggagatgaacgagagactggaggacgaggaggagatgaacgccgagctgaccgccaagaagagaaagctggaggacgagtgcagcgagctgaagaaggacatcgacgacctggagctgaccctggccaaggtggagaaggagaagcacgccaccgagaacaaggtgaagaacctgaccgaggagatggccggcctggacgagatcatcgccaagctgaccaaggagaagaaggccctgcaggaggcccaccagcaggccctggacgacctgcaggtggaggaggacaaggtgaacagcctgagcaagagcaaggtgaagctggagcagcaggtggacgacctggagggcagcctggagcaggagaagaaggtgagaatggacctggagagagccaagagaaagctggagggcgacctgaagctgacccaggagagcatcatggacctggagaacgacaagctgcagctggaggagaagctgaagaagaaggagttcgacatcaaccagcagaacagcaagatcgaggacgagcaggtgctggccctgcagctgcagaagaagctgaaggagaaccaggccagaatcgaggagctggaggaggagctggaggccgagagaaccgccagagccaaggtggagaagctgagaagcgacctgagcagagagctggaggagatcagcgagagactggaggaggccggcggcgccaccagcgtgcagatcgagatgaacaagaagagagaggccgagttccagaagatgagaagagacctggaggaggccaccctgcagcacgaggccaccgccgccgccctgagaaagaagcacgccgacagcgtggccgagctgggcgagcagatcgacaacctgcagagagtgaagcagaagctggagaaggagaagagcgagttcaagctggagctggacgacgtgaccagcaacatggagcagatcatcaaggccaaggccaacctggagaaggtgagcagaaccctggaggaccaggccaacgagtacagagtgaagctggaggaggcccagagaagcctgaacgacttcaccacccagagagccaagctgcagaccgagaacggcgagctggccagacagctggaggagaaggaggccctgatcagccagctgaccagaggcaagctgagctacacccagcagatggaggacctgaagagacagctggaggaggagggcaaggccaagaacgccctggcccacgccctgcagagcgccagacacgactgcgacctgctgagagagcagtacgaggaggagaccgaggccaaggccgagctgcagagagtgctgagcaaggccaacagcgaggtggcccagtggagaaccaagtacgagaccgacgccatccagagaaccgaggagctggaggaggccaagaagaagctggcccagagactgcaggacgccgaggaggccgtggaggccgtgaacgccaagtgcagcagcctggagaagaccaagcacagactgcagaacgagatcgaggacctgatggtggacgtggagagaagcaacgccgccgccgccgccctggacaagaagcagagaaacttcgacaagatcctggccgagtggaagcagaagtacgaggagagccagagcgagctggagagcagccagaaggaggccagaagcctgagcaccgagctgttcaagctgaagaacgcctacgaggagagcctggagcacctggagaccttcaagagagagaacaagaacctgcaggaggagatcagcgacctgaccgagcagctgggcgagggcggcaagaacgtgcacgagctggagaaggtgagaaagcagctggaggtggagaagctggagctgcagagcgccctggaggaggccgaggccagcctggagcacgaggagggcaagatcctgagagcccagctggagttcaaccagatcaaggccgagatcgagagaaagctggccgagaaggacgaggagatggagcaggccaagagaaaccaccagagagtggtggacagcctgcagaccagcctggacgccgagaccagaagcagaaacgaggtgctgagagtgaagaagaagatggagggcgacctgaacgagatggagatccagctgagccacgccaacagaatggccgccgaggcccagaagcaggtgaagagcctgcagagcctgctgaaggacacccagatccagctggacgacgccgtgagagccaacgacgacctgaaggagaacatcgccatcgtggagagaagaaacaacctgctgcaggccgagctggaggagctgagagccgtggtggagcagaccgagagaagcagaaagctggccgagcaggagctgatcgagaccagcgagagagtgcagctgctgcacagccagaacaccagcctgatcaaccagaagaagaagatggagagcgacctgacccagctgcagagcgaggtggaggaggccgtgcaggagtgcagaaacgccgaggagaaggccaagaaggccatcaccgacgccgccatgatggccgaggagctgaagaaggagcaggacaccagcgcccacctggagagaatgaagaagaacatggagcagaccatcaaggacctgcagcacagactggacgaggccgagcagatcgccctgaagggcggcaagaagcagctgcagaagctggaggccagagtgagagagctggagggcgagctggaggccgagcagaagagaaacgccgagagcgtgaagggcatgagaaagagcgagagaagaatcaaggagctgacctaccagaccgaggaggacaagaagaacctgctgagactgcaggacctggtggacaagctgcagctgaaggtgaaggcctacaagagacaggccgaggaggccgaggagcaggccaacaccaacctgagcaagttcagaaaggtgcagcacgagctggacgaggccgaggagagagccgacatcgccgagagccaggtgaacaagctgagagccaagagcagagacatcggcgccaagcagaagatgcacgacgaggagtag

SEQ ID NO: 129051 - protein, 1937 aa, Artificial Sequence
  derived and/or modified sequence
MSASSDAEMAVFGEAAPYLRKSEKERIEAQNKPFDAKTSVFVAEPKESYVKSTIQSKEGGKVTVKTEGGATLTVREDQVFPMNPPKYDKIEDMAMMTHLHEPGVLYNLKERYAAWMIYTYSGLFCVTVNPYKWLPVYKPEVVAAYRGKKRQEAPPHIFSISDNAYQFMLTDRENQSILITGESGAGKTVNTKRVIQYFATIAVTGEKKKDESGKMQGTLEDQIISANPLLEAFGNAKTVRNDNSSRFGKFIRIHFGTTGKLASADIETYLLEKSRVTFQLKAERSYHIFYQITSNKKPDLIEMLLITTNPYDYAFVSQGEITVPSIDDQEELMATDSAIDILGFTPEEKVSIYKLTGAVMHYGNMKFKQKQREEQAEPDGTEVADKAAYLQSLNSADLLKALCYPRVKVGNEYVTKGQTVQQVYNAVGALAKAVYEKMFLWMVTRINQQLDTKQPRQYFIGVLDIAGFEIFDFNSLEQLCINFTNEKLQQFFNHHMFVLEQEEYKKEGIEWTFIDFGMDLAACIELIEKPLGIFSILEEECMFPKATDTSFKNKLYDQHLGKSANFQKPKVVKGKAEAHFSLIHYAGTVDYNITGWLDKNKDPLNDTVVGLYQKSAMKTLASLFSTYASAEADSSAKKGAKKKGSSFQTVSALFRENLNKLMTNLRSTHPHFVRCIIPNETKTPGAMEHELVLHQLRCNGVLEGIRICRKGFPSRILYGDFKQRYKVLNASAIPEGQFIDSKKASEKLLASIDIDHTQYKFGHTKVFFKAGLLGLLEEMRDEKLAQIITRTQAVCRGFLMRVEYQKMLQRREALFCIQYNVRAFMNVKHWPWMKLFFKIKPLLKSAETEKEMATMKEEFQKTKDELAKSEAKRKELEEKMVTLLKEKNDLQLQVQSEADSLADAEERCEQLIKNKIQLEAKIKEVTERAEEEEEINAELTAKKRKLEDECSELKKDIDDLELTLAKVEKEKHATENKVKNLTEEMAGLDETIAKLSKEKKALQETHQQTLDDLQAEEDKVNILTKAKTKLEQQVDDLEGSLEQEKKLRMDLERAKRKLEGDLKLAQESTMDMENDKQQLDEKLEKKEFEISNLISKIEDEQAVEIQLQKKIKELQARIEELGEEIEAERASRAKAEKQRSDLSRELEEISERLEEAGGATSAQVELNKKREAEFQKLRRDLEEATLQHEAMVAALRKKHADSMAELGEQIDNLQRVKQKLEKEKSELKMETDDLSSNAEAISKAKGNLEKMCRSLEDQVSELKTKEEEQQRLINDLTAQRARLQTEAGEYSRQLDEKDALVSQLSRSKQASTQQIEELKHQLEEETKAKNALAHALQSSRHDCDLLREQYEEEQEGKAELQRALSKANSEVAQWRTKYETDAIQRTEELEEAKKKLAQRLQEAEEHVEAVNAKCASLEKTKQRLQNEVEDLMLDVERSNAACAALDKKQRNFDKVLSEWKQKYEETQAELEASQKESRSLSTELFKVKNVYEESLDQLETLRRENKNLQQEISDLTEQIAEGGKQIHELEKIKKQVEQEKCEIQAALEEAEASLEHEEGKILRIQLELNQVKSEVDRKIAEKDEEIDQLKRNHTRVVETMQSTLDAEIRSRNDALRVKKKMEGDLNEMEIQLNHANRLAAESLRNYRNTQGILKETQLHLDDALRGQEDLKEQLAIVERRANLLQAEIEELWATLEQTERSRKIAEQELLDASERVQLLHTQNTSLINTKKKLENDVSQLQSEVEEVIQESRNAEEKAKKAITDAAMMAEELKKEQDTSAHLERMKKNLEQTVKDLQHRLDEAEQLALKGGKKQIQKLEARVRELEGEVENEQKRNAEAVKGLRKHERRVKELTYQTEEDRKNVLRLQDLVDKLQAKVKSYKRQAEEAEEQSNANLSKFRKLQHELEEAEERADIAESQVNKLRVKSREVHTKISAE

SEQ ID NO: 129052 - DNA, 228 bp, Artificial Sequence
  derived and/or modified sequence
atgcacatctacttcaccgccgagctgctgaagagaagaaacgccaagcccaccttcagcatgagcagcatgcaggccgccagaagcatccccaagagcatgaacgtgcacagcatgcccagcttcctgtacagcagctgcagcagcaccaacatgtggtggctgaagaactgctgcagcttcagcctggtgaagctgatgcacagctgcagcagactgctgaactag

SEQ ID NO: 129053 - DNA, 228 bp, Artificial Sequence
  derived and/or modified sequence
atgcacatttatttcacagcagaacttttaaagaggcggaacgcgaagcctactttttccatgtctagcatgcaggcagctcgaagcattcccaagtctatgaacgtgcattccatgccaagctttctgtactcctcttgcagttcgaccaacatgtggtggctaaaaaactgctgcagcttttcactcgtcaaacttatgcattcctgctcgcggcttctgaactag

SEQ ID NO: 129054 - DNA, 228 bp, Artificial Sequence
  derived and/or modified sequence
atgcacatctacttcaccgctgagctgctgaagagaagaaatgccaagcccaccttctccatgagctccatgcaggccgcccggagcatccccaagtccatgaatgtgcacagcatgcccagcttcctgtacagcagctgcagcagcaccaacatgtggtggctgaagaactgctgcagcttcagcctggtgaagctgatgcacagctgcagccggctgctgaactag

SEQ ID NO: 129055 - DNA, 228 bp, Artificial Sequence
  derived and/or modified sequence
atgcacatctacttcaccgccgagctgctgaagcggcggaacgccaagcctacattctctatgagctcaatgcaggcggctcgcagtataccaaaaagcatgaacgttcacagcatgccttctttcctttactccagttgtagttccaccaacatgtggtggttgaagaattgttgtagttttagcctggttaagctcatgcactcatgctctcggctcttgaactag

SEQ ID NO: 129056 - DNA, 368 bp, Artificial Sequence
  derived and/or modified sequence
tctgtttgaagtctgcataaaggattctgcttggaaatcctttcctacagatgcggatgccttccagcacaccgttacacctcagctggtggaggacaagctcatgctccatggcacctaaaaatgcatatttatttcactgcagagctgttgaaaaggagaaatgcaaaaccaaccttctcgatgagctcgatgcaggcagccaggtccatcccgaagtcgatgaacgtccactcgatgccttccttcttgtactcctcctgctccagcacgaacatgtggtggttgaaaaactgttgcagtttctcattggtgaagttgatgcacagctgctccaggctgttgaactaaataaatagatatgttta

SEQ ID NO: 129057 - DNA, 5814 bp, Artificial Sequence
  derived and/or modified sequence
atgtcagccagctcggatgccgaaatggcagtgttcggcgaagccgcgccttatctcagaaaaagcgagaaggagcggattgaggcacagaataaaccattcgatgccaaaacgtctgtgttcgtagcggagcccaaagaatcctatgttaagtccactattcagtctaaggagggcggcaaggtcacagtcaagactgaagggggggctactctcaccgttcgggaggatcaggtattcccaatgaatccaccaaaatacgacaaaatcgaagacatggccatgatgacccacctacatgaaccaggcgttctttacaacctaaaggaacgctacgcggcctggatgatttatacctattcaggcctcttctgtgtgactgtcaatccctacaaatggcttcccgtatacaaacctgaagtggtggcagcttatcgaggaaagaaacgccaggaggctcctcctcatatcttcagtataagcgacaacgcttatcagtttatgcttactgaccgcgagaaccaatccatcctcatcactggggagtctggagccggtaagacagtaaatacaaagcgagttattcagtacttcgccactatcgccgtgacgggagagaaaaagaaggatgaaagcgggaaaatgcaggggacactagaagatcagataatatccgccaatcctctgctcgaagccttcggtaatgctaaaaccgtcaggaacgataatagctcgcggtttgggaagtttataagaattcatttcggaaccactggcaagcttgcttcagccgacatcgaaacctatctcttggaaaagtcccgtgttacctttcaattgaaagccgagcgctcttatcacattttttaccagatcaccagcaataaaaaacccgatctaattgagatgttgctgataactacaaacccctacgactatgcctttgtgtctcaaggcgaaattaccgtgccatcaattgacgatcaggaggaactcatggccaccgactctgctatagacatcttggggttcactcctgaagagaaggtttctatttataagctcactggtgccgtaatgcattatggtaatatgaaatttaaacagaaacagagagaggagcaagctgaaccagacggcacggaggttgcggataaagccgcgtacctgcagtcactcaattccgccgacttactgaaagccttatgttatccccgcgtgaaggtaggaaacgaatatgtgacgaaaggtcaaacagtccagcaggtgtataacgctgtgggcgccctggctaaggcagtgtacgaaaagatgtttttgtggatggtgactcgcatcaaccagcagctagatactaagcagcccaggcaatacttcatcggtgtgctagatatcgccggatttgagatttttgatttcaactccctcgaacagctgtgcatcaacttcacaaacgagaagctccaacaatttttcaatcatcatatgtttgtactcgaacaggaggagtacaagaaagaaggaattgagtggacattcatcgatttcggaatggatctggccgcttgcattgagttgattgaaaagcctctgggaatctttagtattctcgaagaggaatgcatgtttcctaaggctaccgacactagcttcaagaataagctgtacgatcaacacttggggaagagcgccaattttcagaagcccaaggtcgtgaaaggaaaggcagaggcccacttctctttaattcactacgccggtaccgtggactataatatcaccggttggttggataaaaacaaggaccccctgaatgacacagtcgtgggcctctatcagaagagcgccatgaagactctggcctcactgttctccacctacgcatccgctgaagctgatagctcggccaagaagggcgcgaaaaaaaagggaagtagcttccaaaccgtgagcgctctgttcagggagaatcttaataaacttatgacaaaccttcgctctacccatccacatttcgtgaggtgtattattcccaacgaaaccaagacccccggagccatggagcatgagctcgtgctacatcagctgcgctgtaacggtgtgctggaaggtatccgcatttgccggaagggctttccatccaggattctctatggtgactttaaacagagatacaaggtgctcaacgcttctgccataccggaaggccagttcattgattcaaagaaagccagcgaaaagctgctcgcgtccattgacatagaccatacacaatacaagtttggacataccaaggtcttctttaaggcaggcctccttgggctgctggaggaaatgcgggacgaaaagctcgcccagatcatcacccggacgcaggcagtttgccggggcttcttaatgcgggttgaatatcaaaaaatgttacagcggcgggaggcccttttctgcatccagtataacgtcagggccttcatgaatgtgaagcattggccatggatgaagctgttctttaagatcaagcctcttctgaaaagcgcagaaactgaaaaggaaatggcaaccatgaaagaggagttccagaagacaaaggacgagcttgccaagtcggaggctaaacggaaggaattggaggagaagatggtaactctcctcaaggaaaaaaacgatctacagctgcaagtccagagtgaggcagattccctggccgatgccgaagaaaggtgcgagcagctaatcaaaaacaagatccaattagaggctaaaataaaggaggtgactgagcgggccgaggaggaggaggaaatcaacgcagagcttacggccaaaaagaggaagctggaggacgaatgctccgagctgaagaaagacatagatgacctggagttgactctcgcgaaggttgagaaggagaagcacgccaccgaaaacaaggtaaagaatctcaccgaggagatggcagggctggatgaaactatcgctaaactctctaaggagaaaaaagccttgcaggagacccaccagcaaaccctagacgatctgcaagccgaggaggacaaggtgaacatcctgaccaaggctaaaaccaagttagagcagcaagtggatgatctcgagggaagtctggagcaggaaaaaaagctgagaatggacttagagagggctaaaaggaagctagaaggagacttgaagttggcacaagagagcacgatggatatggagaacgacaaacagcagctcgatgaaaagctcgagaagaaggaattcgagatctcaaacctgatttccaagatcgaagatgagcaagcggttgagatccagttacagaagaagatcaaggagttacaagccagaatagaggagctgggggaagagatagaggccgagagggcatctcgggccaaggctgaaaaacagcgctcggacttgagccgggaacttgaagagatcagcgaaagactagaggaggccgggggcgccacctctgcccaggtggagcttaacaaaaagcgcgaagctgaatttcagaagctcaggcgagatctcgaggaggcgacattgcagcatgaagccatggtggctgctttgcggaaaaagcacgccgactcaatggctgaactgggcgaacagatcgataatctgcagagggttaaacagaagttggaaaaagaaaagtccgagttgaagatggaaacagatgacctttcctccaatgccgaagctattagtaaggcgaaaggcaacctcgagaagatgtgtcgaagcctggaagaccaggtgtccgaacttaagaccaaggaagaggaacaacagcgcctgatcaacgatcttacagcccagcgcgcaaggctacaaaccgaggctggcgaatacagtcgccaactcgatgagaaggacgccctggtcagccaactctcgcgttcaaaacaggccagcacgcagcaaatagaggagctgaaacatcagttggaagaggaaactaaggctaagaacgccctagcccacgctctccagtcgtcccggcacgactgcgatcttctgcgggaacagtacgaagaggagcaggaaggaaaggctgagctgcaacgggccctgagcaaggccaactcagaagtggcccagtggcgcactaagtacgagacagatgcaattcagcgtaccgaagaactcgaggaggctaagaagaagctagcccaaaggttgcaggaggccgaagagcacgtcgaggccgtcaatgcaaagtgtgccagcctggaaaagacaaagcaacggttacagaacgaagtagaagacctcatgttggacgttgaacgatccaatgctgcttgtgctgccctggacaagaaacagcgtaatttcgataaagtgctttccgaatggaaacagaagtatgaggagactcaggccgaacttgaagcttcccagaaagagtcccgctcgttgagtacagagctgttcaaggtgaagaacgtgtacgaggaaagcctggaccagctagaaaccctgaggcgggagaataagaatcttcagcaagagattagcgatctgaccgagcagatcgctgaagggggcaaacagattcacgaactggagaagattaaaaagcaggtggagcaagaaaaatgcgaaatacaagccgccttggaggaggcggaggcctccctggaacacgaggaaggcaaaatcctgcggatccaacttgaattaaaccaagtgaaaagcgaggtcgacaggaaaatcgctgaaaaggatgaggaaatagatcagctgaagcgcaatcatacaagggtcgtggagacgatgcaaagtaccctggacgcagaaatacgatctcgaaacgacgcgcttagagtgaagaaaaaaatggagggggatctgaacgagatggagatacagctgaaccacgcgaaccggctggcagcagagtccctaaggaattacaggaatacccagggaattctcaaggagacacaactgcacctggacgatgctttacgggggcaagaggacttgaaagagcaactagccatagtggagcgacgagctaacctgctgcaggccgagatcgaggagctatgggctacactggagcagacagagcgctctagaaagatcgctgaacaggagttactggacgcatcagaacgagtgcagctcttacacacccagaacacctctctgattaacacgaaaaaaaagttggagaatgatgtgtcccagctccagagcgaagtcgaggaggtgatccaggagagcaggaacgcagaggaaaaagcaaaaaaggccattacggacgctgctatgatggctgaggagctgaagaaagagcaggatacaagcgcccacctggaacgcatgaagaagaatctggagcagactgtgaaggacttgcaacaccggttggacgaagcagagcaacttgcgttaaaaggtggaaagaaacagatccagaagctggaagcacgcgtacgcgaactcgagggcgaagtagaaaacgaacagaagcggaacgcagaggctgttaaaggtcttaggaaacatgagagaagggtcaaggaactcacataccagacagaggaagaccgcaaaaacgtgttgcgacttcaagacttagtggataagttacaagccaaggttaagtcgtataaacggcaggccgaggaggctgaggaacagtctaacgccaacctatctaagtttaggaaattgcagcacgaactcgaggaggctgaggaaagagccgatattgctgagtcacaagtcaacaagctgagagtcaagtctcgggaggtgcacaccaagatttctgccgagtag

SEQ ID NO: 129058 - DNA, 5814 bp, Artificial Sequence
  derived and/or modified sequence
atgtccgcttcttccgacgctgagatggcagtgtttggtgaggcggccccatacctgcgcaagtccgaaaaggaaaggatcgaagcccagaataagccctttgacgccaagacatccgtatttgtggccgagcccaaggagagctatgtgaaaagtactattcaaagcaaagaaggtggtaaagtgacagtgaaaactgaagggggggctaccttaactgtgcgtgaggatcaggtgttccctatgaacccaccaaagtatgataagatagaggatatggctatgatgacgcatctccacgagcctggagttctgtataaccttaaggagcgttacgccgcatggatgatttatacctatagtggcctgttttgcgtgaccgtgaacccctataagtggttgcccgtctacaagccggaggtggttgccgcgtatcgaggcaaaaaaagacaggaggcccctccccatatcttctccattagcgacaatgcttatcaatttatgttaacagacagggaaaaccaatcaatcctgatcaccggcgagtcaggcgctggtaaaacagtcaatacaaaaagggtcatccaatatttcgctactatagccgtcactggcgagaaaaaaaaagatgaaagcggtaaaatgcagggtacactggaggaccagattatctcggctaatccactactggaggctttcggcaatgctaaaacggtgagaaatgacaactccagccgatttggaaaattcattaggatccatttcggaacaacagggaagctggcatctgccgacatagagacctacctcctcgaaaaatcgagagttacgttccagttaaaagccgagcgcagctatcacatcttctaccagatcacttccaacaagaagcctgatctcattgaaatgctgcttatcaccactaacccatacgattatgcctttgtgagtcagggggaaatcacagtgccatctatcgatgaccaggaggagcttatggctactgatagtgctatcgacattttagggtttacccctgaggaaaaggtttccatctacaaactcacgggggccgttatgcactacggaaatatgaagttcaagcagaaacaaagagaagagcaagccgaaccggatggaaccgaggttgctgataaggcggcttatctccagtcgctgaatagcgcggacctcctgaaggcgctctgttacccccgggtcaaagtaggtaatgagtatgtgacgaaaggccagacggttcagcaggtctataatgcagttggcgcgctcgccaaggctgtgtatgagaagatgttcctgtggatggtgacccgcatcaatcagcagttggatacaaaacagcctaggcagtacttcattggcgtacttgatattgcaggtttcgagatatttgattttaactcactggaacagctgtgcatcaactttacaaacgaaaaattgcagcagttcttcaatcatcacatgttcgttcttgagcaggaagaatacaagaaggagggcatcgagtggaccttcattgacttcggcatggatctggcagcttgcatcgagctcatcgagaagcccctggggatctttagtatcctggaagaagaatgtatgttcccgaaggctaccgatacaagcttcaagaacaagttatatgatcagcacttgggaaagtctgccaattttcagaagcctaaagtggtgaagggtaaggcggaagcacatttttcacttattcactacgcaggcaccgtcgattacaacataaccggatggctggataaaaataaagaccccctgaatgatacagtagtaggactgtaccaaaaaagcgctatgaagaccctcgcctccctgtttagcacttacgcatcagcagaggccgactcgagcgccaagaagggagcaaagaaaaaggggtcatcattccaaacagtgtcagctctgttcagggaaaaccttaataaattaatgactaacctgcgatccacacatcctcatttcgtgcggtgcattattccaaatgaaaccaagacaccaggtgcaatggagcacgagttagtgctacaccagctgcgatgcaacggagtattggagggaatccgtatatgccgcaagggtttcccatcaagaatactgtacggagactttaagcagcgatataaggttctcaacgcgagcgcaattcctgagggccaatttattgactccaagaaagcttctgagaagctgctggcttcaattgatattgaccacacccagtacaagttcggccatacaaaggtgtttttcaaagccggactgttgggtctgctggaggaaatgcgagacgagaagttagcgcagattatcactagaacgcaggctgtatgtcgggggtttctgatgagggtggagtatcagaagatgctgcagaggcgagaggccctgttttgcattcagtataacgtgcgtgccttcatgaacgtgaaacactggccgtggatgaagttgttttttaagatcaagccgctcttaaaatctgctgagactgaaaaggagatggctaccatgaaggaggagttccagaaaacaaaggatgagctagccaagagcgaggctaaaagaaaagaactggaggagaaaatggtgactctgctcaaagaaaaaaatgacttacaactgcaagttcagtccgaggctgatagtttggccgacgccgaagagcgatgcgagcagctcattaagaataagatacaactggaagccaaaattaaggaggtgaccgaaagggccgaagaagaggaggagattaatgccgaactgacagccaagaagcggaagttggaggacgaatgttcagaactaaagaaggacatcgacgacttggaacttacactggctaaggtcgaaaaagaaaagcatgccactgagaacaaagtgaagaacctgaccgaagagatggctggcctcgatgagaccattgccaagttgagcaaagagaaaaaagctcttcaggaaacccaccaacagaccctagatgatctgcaagccgaggaagacaaggtcaacattctgaccaaagccaagactaagctggaacagcaagtcgacgacctcgagggcagtttggagcaggagaaaaagctgaggatggatctcgagcgggcaaaacgcaaactggagggggatctcaagctagctcaggagtccaccatggacatggagaacgataagcagcaactggacgagaaattggagaagaaggaatttgagatctctaatttgatctcaaaaatcgaagatgaacaagcggtagaaattcagctgcagaagaaaataaaggagctgcaggctcgcatcgaggagctcggggaggagatcgaggctgaaagagctagtagagctaaagctgagaagcaaaggtccgacttgagccgtgagcttgaggagatctccgagcgcctcgaggaagcagggggcgccactagtgcccaggtagaacttaataagaagcgcgaggccgaatttcaaaagttgagacgggacctggaggaggctaccctccagcacgaagcaatggtagcggcgctaagaaaaaagcatgccgacagcatggctgagctcggagagcaaattgataacctccagagggttaaacagaaactggagaaagaaaaaagcgaacttaagatggaaaccgacgacttatcgtccaacgcagaggcgataagtaaggcaaagggaaacctggaaaaaatgtgccgtagtctcgaggaccaggtcagtgaactaaagactaaggaggaagagcaacagagattaattaacgaccttacagcacagagagctaggctccaaacagaggccggcgagtattcccggcagctcgacgaaaaagatgcactggtgtcacaactctctagatcaaagcaagcatctacgcagcagatcgaggaactgaagcatcagctcgaggaggagaccaaggcgaagaacgcattagcgcatgcccttcagtccagtcgacacgactgcgatctgctgcgggaacagtatgaggaggagcaagagggaaaagcagaattgcagagagctctcagtaaagctaactctgaagtggctcagtggcgaacgaagtatgagaccgatgcaattcagcgcaccgaagagctcgaagaggctaagaagaagctcgcccaacgcttgcaggaagctgaagagcatgtggaggcagtgaatgcaaagtgtgcttccctagaaaagacaaagcaacggttgcagaatgaggttgaggatctgatgttggacgtggagagatcaaacgccgcttgtgctgcccttgataaaaaacagcgtaactttgataaggtactctcagaatggaaacagaagtacgaagagacgcaggccgagctcgaggctagccagaaagagtcccgatctctgagcactgaactgtttaaagtcaagaacgtctatgaagaatcactggatcagctggagactttgaggcgcgagaataagaatctccaacaggagatctccgatctgaccgagcagatcgctgaaggtggcaagcagatacacgagcttgagaagatcaagaaacaagtggaacaggagaagtgcgagatccaagcggcgctggaggaggctgaggccagcttggaacacgaggaggggaaaatattgagaatccaactcgagttaaaccaggtaaaaagtgaagtggataggaaaatcgcggagaaggatgaggaaattgatcagctgaagcgcaatcacacgagggtggtggagaccatgcagtccaccctggatgccgaaattcggtccagaaacgacgccctgcgcgttaagaaaaagatggagggggacttgaacgagatggaaatccagctgaaccacgcgaataggctagccgccgaatctctccgtaattataggaacacgcaggggatactgaaggagacccagctgcacctggacgacgcacttcgcggtcaggaagacctaaaggaacagcttgccatagtcgaacgtagggcgaacctcctccaggccgagatagaagaactgtgggcaacactggagcaaaccgaacggtctaggaaaatcgcggagcaagagcttctagacgcttccgagcgcgttcagctgctccacacccaaaacacctcactgataaatactaagaagaaactggagaatgatgtatcccaactacagtccgaggtggaggaagtgattcaagagtctcgcaacgcagaagagaaggccaaaaaggcgatcactgacgctgccatgatggccgaggaactgaagaaggaacaggacacctcagcccacctagagaggatgaaaaaaaatctcgaacaaactgtgaaggacctgcagcaccgcttggatgaagccgagcagctggctcttaagggcggtaagaaacagatccagaaactggaggctagagtcagggagctcgaaggcgaggtggagaatgagcagaaaaggaatgcggaagctgtgaaaggcctccggaagcacgaacgcagggtgaaagaactaacatatcaaaccgaggaagaccgtaagaatgttttacgattgcaagacctggtggacaagctacaggcgaaggttaaatcctacaagcgacaggctgaggaagctgaggagcagtccaatgctaatttgagcaaattccggaagctgcagcacgagctagaagaagccgaggaacgggccgatatcgcagagtcacaggtcaacaaattaagggttaagtcacgtgaggtgcatacaaaaatttcagccgagtag

SEQ ID NO: 129059 - DNA, 5814 bp, Artificial Sequence
  derived and/or modified sequence
atgtctgccagcagtgatgctgagatggctgtgtttggagaggccgccccctacctgaggaagtctgagaaggagagaattgaggcccagaacaagccctttgatgccaagacctctgtgtttgtggccgagcccaaggagagctatgtgaagagcaccatccagagcaaggagggcggcaaggtgacagtgaagacagagggcggggccaccctgactgtgcgggaggaccaggtgttccccatgaacccccccaagtatgacaagattgaggacatggccatgatgacccacctgcacgagcccggggtgctgtacaacctgaaggagagatatgctgcctggatgatctacacctacagcggcctcttctgtgtgacagtgaacccctacaagtggctgcctgtgtacaagccagaggtggtggccgcctaccggggcaagaagaggcaggaggccccaccccacatcttcagcatcagtgacaatgcctaccagttcatgctgacagaccgggagaaccagagcatcctgatcaccggggagagcggggccggcaagacagtgaacaccaagagggtcatccagtactttgccaccatcgctgtgactggagagaagaagaaggatgagagcggcaagatgcagggcaccctggaggaccagatcatcagcgccaaccccctgctggaggcctttggaaatgccaagacagtgagaaatgacaacagcagcagatttgggaagttcatccgcatccacttcggcaccaccgggaagctggccagcgctgacatcgagacctacctgctggagaagagccgggtgaccttccagctgaaggccgagaggagctaccacatcttctaccagatcaccagcaacaagaagccagacctgattgagatgctgctgatcaccaccaacccctatgactatgcctttgtgtcccagggcgagatcaccgtgcccagcattgatgaccaggaggagctgatggccacagattctgccatcgacatcctgggcttcaccccagaggagaaggtgtccatctacaagctgaccggggctgtgatgcactacggcaacatgaagttcaagcagaagcagcgggaggagcaggccgagccagatggaacagaggtggccgacaaggccgcctacctgcagagcctgaacagcgctgacctgctgaaggccctgtgctacccccgggtgaaggtgggcaatgaatatgtgaccaagggccagacagtgcagcaggtgtacaatgctgtgggcgccctggccaaggctgtgtatgagaagatgttcctgtggatggtgacccgcatcaaccagcagctggacaccaagcagccccggcagtacttcatcggcgtgctggacattgctggctttgagatctttgacttcaacagcctggagcagctgtgcatcaacttcaccaatgagaagctgcagcagttcttcaaccaccacatgtttgtgctggagcaggaggagtacaagaaggagggcatcgagtggaccttcatcgactttggcatggacctggccgcctgcatcgagctgattgagaagcccctgggcatcttcagcatcctggaggaggagtgcatgttccccaaggccacagacaccagcttcaagaacaagctgtatgaccagcacctgggcaagagcgccaacttccagaagcccaaggtggtgaagggcaaggccgaggcccacttcagcctcatccactacgccggcaccgtggactacaacatcaccggctggctggacaagaacaaggaccccctgaatgacacagtggtgggcctgtaccagaagagcgccatgaagaccctggccagcctcttcagcacctacgccagcgctgaggccgacagcagcgccaagaagggggccaagaagaagggcagcagcttccagacagtgtctgccctcttccgggagaacctgaacaagctgatgaccaacctgcggagcacccacccccactttgtgcgctgcatcatccccaatgagaccaagacccctggggccatggagcacgagctggtgctgcaccagctgcgctgcaatggagtgctggagggcatccgcatctgcaggaagggcttccccagccgcatcctgtatggagacttcaagcagcgctacaaggtgctgaatgccagcgccatccctgagggccagttcatcgacagcaagaaggccagcgagaagctgctggccagcattgacatcgaccacacccagtacaagtttggccacaccaaggtgttcttcaaggccggcctgctgggcctgctggaggagatgagagatgagaagctggcccagatcatcaccaggacccaggccgtgtgccggggcttcctgatgagggtggagtaccagaagatgctgcagaggcgggaggccctcttctgcatccagtacaacgtgcgggccttcatgaatgtgaagcactggccctggatgaagctgttcttcaagatcaagcccctgctgaagtctgctgagacagagaaggagatggccaccatgaaggaggagttccagaagaccaaggatgagctggccaagtctgaggccaagaggaaggagctggaggagaagatggtgaccctgctgaaggagaagaatgacctgcagctgcaggtgcagagcgaggccgacagcctggctgatgctgaggagcgctgtgagcagctgatcaagaacaagatccagctggaggccaagatcaaggaggtgacagaaagagctgaggaggaggaggagatcaatgctgagctgacagccaagaagaggaagctggaggatgaatgttctgagctgaagaaggacattgatgacctggagctgaccctggccaaggtggagaaggagaagcacgccacagagaacaaggtgaagaacctgacagaggagatggccggcctggatgagaccatcgccaagctgagcaaggagaagaaggccctgcaggagacccaccagcagaccctggatgacctgcaggccgaggaggacaaggtgaacatcctgaccaaggccaagaccaagctggagcagcaggtggatgacctggagggcagcctggagcaggagaagaagctgaggatggacctggagcgggccaagaggaagctggagggggacctgaagctggcccaggagagcaccatggacatggagaatgacaagcagcagctggatgagaagctggagaagaaggagtttgagatcagcaacctgatcagcaagattgaagatgagcaggccgtggagatccagctgcagaagaagatcaaggagctgcaggcccgcatcgaggagctgggggaggagattgaagctgagcgggccagccgggccaaggccgagaagcagaggagtgacctgagccgggagctggaggagatcagcgagcggctggaggaggccggcggggccaccagcgcccaggtggagctgaacaagaagcgggaggccgagttccagaagctgcggcgggacctggaggaggccaccctgcagcacgaggccatggtggccgccctgaggaagaagcacgccgacagcatggccgagctgggggagcagattgacaacctgcagagggtgaagcagaagctggagaaggagaagtctgagctgaagatggagacagatgacctgagcagcaatgctgaggccatcagcaaggccaagggcaacctggagaagatgtgccgcagcctggaggaccaggtgtctgagctgaagaccaaggaggaggagcagcagaggctcatcaatgacctgacagcccagagggcccggctgcagacagaagctggggagtacagccggcagctggatgagaaggatgccctggtgtcccagctgagccgcagcaagcaggccagcacccagcagatcgaggagctgaagcaccagctggaggaggagaccaaggccaagaatgccctggcccacgccctgcagagcagcagacatgactgtgacctgctgcgggagcagtatgaggaggagcaggagggcaaggccgagctgcagagggccctgagcaaggccaacagcgaggtggcccagtggaggaccaagtatgaaacagatgccatccagaggacagaggagctggaggaggccaagaagaagctggcccagaggctgcaggaggccgaggagcacgtggaggccgtgaatgccaagtgtgccagcctggagaagaccaagcagaggctgcagaatgaggtggaggacctgatgctggatgtggagaggagcaatgctgcctgtgccgccctggacaagaagcagaggaactttgacaaggtgctgtctgagtggaagcagaagtatgaggagacccaggccgagctggaggccagccagaaggagagccgcagcctgagcacagagctgttcaaggtgaagaatgtgtatgaggagagcctggaccagctggagaccctgcggcgggagaacaagaacctgcagcaggagatcagtgacctgacagagcagattgctgagggcggcaagcagatccacgagctggagaagatcaagaagcaggtggagcaggagaagtgtgagatccaggccgccctggaggaggccgaggccagcctggagcacgaggagggcaagatcctgcgcatccagctggagctgaaccaggtgaagtctgaggtggacaggaagattgctgagaaggatgaggagattgaccagctgaagaggaaccacaccagggtggtggagaccatgcagagcaccctggatgctgagatccgcagcagaaatgatgccctgcgggtgaagaagaagatggagggggacctgaatgagatggagatccagctgaaccacgccaaccggctggccgctgagagcctgaggaactacagaaacacccagggcatcctgaaggagacccagctgcacctggatgatgccctgcggggccaggaggacctgaaggagcagctggccatcgtggagcggcgggccaacctgctgcaggccgagattgaggagctgtgggccaccctggagcagacagagaggagcaggaagattgctgagcaggagctgctggatgccagcgagcgggtgcagctgctgcacacccagaacaccagcctcatcaacaccaagaagaagctggagaatgatgtgtcccagctgcagagcgaggtggaggaggtgatccaggagagcagaaatgctgaggagaaggccaagaaggccatcacagatgctgccatgatggccgaggagctgaagaaggagcaggacaccagcgcccacctggagaggatgaagaagaacctggagcagacagtgaaggacctgcagcaccggctggatgaagctgagcagctggccctgaagggcggcaagaagcagatccagaagctggaggcccgggtgcgggagctggagggggaggtggagaatgagcagaagagaaatgctgaggccgtgaagggcctgaggaagcatgagcggcgggtgaaggagctgacctaccagacagaggaggacaggaagaatgtgctgcggctgcaggacctggtggacaagctgcaggccaaggtgaagagctacaagaggcaggccgaggaggccgaggagcagagcaatgccaacctgagcaagttcaggaagctgcagcacgagctggaggaggccgaggagagagctgacattgctgagagccaggtgaacaagctgcgggtgaagagccgggaggtgcacaccaagatctctgctgagtag

SEQ ID NO: 129060 - DNA, 6019 bp, Artificial Sequence
  derived and/or modified sequence
gtggaacacttctgaacctgcatttttatctggaactccagaggcagaatcctttgctaaataaatcgcagccatgagtgcgagctcagacgctgagatggctgtttttggcgaagctgctccctaccttcgaaaatcagaaaaggagcggattgaggcccaaaacaagccgtttgatgctaaaacatctgtctttgtggcggagcccaaggaatcctatgtgaagagcactatacaaagcaaagaaggagggaaagtaaccgtaaagactgaaggtggagcaactctaactgtcagggaagaccaagtcttccctatgaaccctccgaaatatgacaaaattgaggacatggccatgatgactcatctacacgagcctggagtgctgtacaacctcaaagagcgctatgcagcctggatgatctacacctactcaggcctcttctgtgtcaccgtcaacccctacaagtggctgccggtgtacaagcccgaggtggtggctgcctacagaggcaaaaagcgccaggaggccccgccccacatcttctccatctctgacaatgcctatcagttcatgttgactgatcgagagaatcagtccatcctgatcaccggagaatctggtgccggaaagactgtgaacaccaagcgtgtcatccaatactttgcaacaattgcagttactggagagaagaagaaggatgaatctggcaaaatgcaggggactctggaagatcaaatcatcagcgccaatcccctactggaggcctttggcaatgccaaaactgtgaggaatgacaactcctctcgctttggtaaattcattagaatccactttggtactacagggaagctggcatctgctgatatagaaacatatcttttagaaaagtccagagttactttccagctaaaggcggaaagaagctaccatattttttatcagatcacttccaataagaagccagatctaattgaaatgctcctgatcaccaccaacccatatgactatgccttcgtcagtcagggggagatcacagttcccagtattgatgaccaagaagagttgatggccactgatagtgccattgacatcctgggcttcactcctgaagagaaagtgtccatctataaactcacaggggctgtgatgcattatgggaacatgaaattcaagcaaaagcagcgtgaggagcaagctgagccagatggcacagaagtcgctgacaaggcagcctatctccagagtctgaactctgcagacctactcaaagccctctgctaccctagggtcaaggttggcaatgagtatgtcaccaaaggccagactgtgcagcaggtgtacaatgcggtgggtgctctggccaaagccgtctacgagaagatgttcctgtggatggtcacccgcatcaaccagcagctggacaccaagcagcccaggcagtacttcatcggggtcttggacattgctggctttgaaatctttgattttaacagcctggagcagctgtgcatcaacttcaccaacgagaaactgcaacagtttttcaaccaccacatgtttgtgctagagcaggaggagtacaagaaggaaggcatcgagtggacgttcattgactttgggatggacctggctgcctgcattgagctcattgagaagccactgggcatcttctccatcctggaagaggagtgcatgttccctaaggcaacggacacctccttcaagaacaagctgtatgaccagcacctgggcaagtctgccaacttccagaagcccaaggtggtcaaaggcaaggctgaggcccacttctctctgattcactatgctggcactgtggactacaacattactggctggctggacaaaaataaggaccccctgaatgatactgtggttgggctgtaccagaagtctgcaatgaagactctagccagtctcttttccacgtatgctagtgctgaagcagatagcagcgcgaagaaaggtgctaagaaaaagggctcttctttccagactgtgtctgcccttttcagggaaaatttaaataaattgatgacgaatctgaggagcacacaccctcacttcgtacggtgtatcattcccaatgaaaccaaaactcctggggcaatggaacatgaacttgtgttgcaccagctgaggtgtaatggtgtgctggaaggcatccgcatctgtaggaaaggattcccaagcagaatcttatatggtgatttcaaacaaagatacaaggttttaaatgcaagtgctattccagagggacagttcattgacagcaagaaggcttctgagaaacttcttgcatctattgatattgatcatactcaatataaatttggacataccaaggttttcttcaaagctggacttctgggtcttctggaagaaatgagagatgaaaaattagcccaaattataacaagaacacaagctgtctgtaggggattcctaatgagggtagaatatcagaagatgttgcaaaggagagaagcacttttctgcatccagtataatgtccgtgccttcatgaacgtcaagcactggccctggatgaaactctttttcaagattaagcccctcctcaagagtgcagagaccgagaaagagatggccaccatgaaggaagaattccagaaaaccaaagatgaactcgccaagtcagaggcaaaacggaaggagctagaggaaaaaatggtcactctcttaaaagagaaaaatgacctgcaactccaggttcaatctgaagcagatagcttggctgatgcagaggaaaggtgtgagcaactgattaaaaacaaaatccaacttgaggccaaaatcaaagaggtgactgaaagagctgaggaggaggaagagatcaatgctgagctgacagccaagaagagaaaactggaggatgaatgttcagaactcaagaaagacattgatgaccttgagctgacactggccaaggttgagaaggagaaacatgccacggagaacaaggtgaaaaatcttacagaagagatggcaggcctggatgaaaccattgcaaaactgtccaaggagaagaaggctctccaagagacccaccagcagaccctggatgacctgcaggcagaggaggacaaagtcaacatcctgaccaaagctaaaaccaagctagaacagcaagtggatgatcttgaagggtctctggaacaagaaaagaagcttcgaatggatctagaaagagcaaagcggaaactggagggtgacctcaaattggcccaagaatccacaatggatatggaaaatgacaaacagcaacttgatgaaaagcttgaaaagaaagaatttgaaatcagcaatttgataagcaaaattgaagatgagcaagctgtagaaattcaactacagaagaagatcaaagagttgcaggcccgcattgaggagctgggggaagaaatcgaggcagagagggcgtcccgagccaaagcggagaagcagcgctctgacctctcccgggaactggaggagatcagcgagaggctggaagaagccggtggggcaacttctgctcaggtggaattgaacaagaagcgggaggctgagtttcagaaactgcgcagggacctggaggaggccaccctgcagcatgaagctatggtggctgctcttcggaagaagcacgcagacagtatggctgagcttggggagcagattgacaacttgcagcgggtcaaacagaagctggagaaggagaagagtgagctgaagatggagactgatgacctcagcagtaacgcagaggccatttccaaagccaagggaaaccttgaaaagatgtgccgctctctagaagatcaagtgagtgagcttaagaccaaggaagaggagcagcagcggctgatcaatgacctcacagcacagagagcgcgcctgcagacagaagcgggtgaatattctcgacaattagatgagaaagatgctttagtctctcagctttcaaggagcaagcaagcatctactcagcagattgaagagctgaaacatcaactagaggaagaaactaaagccaagaacgccctggcacacgccctgcagtcctcccgccatgactgcgacctgctgcgggaacagtatgaggaagagcaggaaggcaaagctgagctgcagagggcgctgtccaaggccaacagtgaggttgcccagtggagaaccaaatacgagacggatgccatccagcgcacagaggagctggaggaggccaagaaaaagttggcccagcgcctgcaagaagctgaggaacatgtagaagctgtgaacgccaaatgtgcttcccttgagaagacgaagcagcggctccagaatgaagttgaagacctcatgcttgatgtggaaaggtctaatgcagcctgtgcagcccttgataagaagcaaaggaactttgacaaggtcctatcagaatggaagcagaagtatgaggaaactcaggctgaacttgaggcctcccagaaggagtcacgttctcttagcactgagctgttcaaggtgaagaatgtctatgaggaatccctggatcaactcgaaacgctaagaagagaaaataagaacttgcaacaggagatttctgacctcactgagcagattgcagagggaggaaagcaaattcatgaattggagaaaataaagaagcaagtagaacaagagaaatgtgaaattcaggctgctttagaggaagcagaggcatctcttgaacatgaagaaggaaagattctgcgtatccagcttgagttaaaccaagtcaagtctgaagttgatagaaaaatcgcagaaaaggatgaggaaattgaccagctgaagagaaaccacactagagtcgtggagacaatgcagagcacgctggatgcagagattagaagcagaaatgatgctctgagagtcaagaagaaaatggaaggagatctgaatgaaatggaaatccagctgaaccatgccaatcgcttagctgcagagagtttaaggaactacaggaacacccaaggaatcctgaaggaaacccagctccacctggatgatgctctccggggccaggaggacctcaaggaacagctggcaattgtggagcgcagagccaacctgctgcaggctgagatcgaggagctgtgggccactctggaacagacagagagaagcaggaaaatcgccgaacaggagctcctggatgccagtgagcgtgtccagctcctccacacccagaataccagtctcattaacaccaagaagaaattagaaaatgacgtttcccaactccaaagtgaagtggaagaagtaatccaagaatcacgcaatgcagaagagaaagccaagaaggccatcactgatgctgccatgatggctgaggagctgaagaaggaacaggacaccagcgcccacctggagcggatgaagaagaacctggagcagacggtgaaggacctgcagcatcgtctagatgaggccgagcagctggcgctgaagggtgggaagaagcagatccagaaactggaggccagggtacgtgagcttgaaggagaggttgaaaatgaacagaaacgtaatgcagaggctgttaaaggtttacggaaacatgagcgacgagtaaaagaactcacctaccagactgaagaagatcgcaagaatgttctcaggctgcaggacttggtagataaattacaggcgaaggtgaaatcatacaagagacaagctgaggaggctgaggaacaatccaatgctaatctatctaaattccgcaaactccagcatgagctggaggaggccgaggaacgggctgacattgctgagtcccaggtcaacaaattgcgagtgaagagccgagaggttcacacaaaaatcagtgcagagtaaacacacctgcctgatgctatcaagaggctgaagaaaggcacaaaatgtgctatttttggtcacttgctttatgacgtttattttcctgttaaagctgaataaataaaaactacagtaaatgtatacattaaa

SEQ ID NO: 129061 - DNA, 6038 bp, Artificial Sequence
  derived and/or modified sequence
atttccaccaagaacccagagagtggaacacttctgaacctgcatttttatctggaactccagaggcagaatcctttgctaaataaatcgcagccatgagtgcgagctcagacgctgagatggctgtttttggcgaagctgctccctaccttcgaaaatcagaaaaggagcggattgaggcccaaaacaagccgtttgatgctaaaacatctgtctttgtggcggagcccaaggaatcctatgtgaagagcactatacaaagcaaagaaggagggaaagtaaccgtaaagactgaaggtggagcaactctaactgtcagggaagaccaagtcttccctatgaaccctccgaaatatgacaaaattgaggacatggccatgatgactcatctacacgagcctggagtgctgtacaacctcaaagagcgctatgcagcctggatgatctacacctactcaggcctcttctgtgtcaccgtcaacccctacaagtggctgccggtgtacaagcccgaggtggtggctgcctacagaggcaaaaagcgccaggaggccccgccccacatcttctccatctctgacaatgcctatcagttcatgttgactgatcgagagaatcagtccatcctgatcaccggagaatctggtgccggaaagactgtgaacaccaagcgtgtcatccaatactttgcaacaattgcagttactggagagaagaagaaggatgaatctggcaaaatgcaggggactctggaagatcaaatcatcagcgccaatcccctactggaggcctttggcaatgccaaaactgtgaggaatgacaactcctctcgctttggtaaattcattagaatccactttggtactacagggaagctggcatctgctgatatagaaacatatcttttagaaaagtccagagttactttccagctaaaggcggaaagaagctaccatattttttatcagatcacttccaataagaagccagatctaattgaaatgctcctgatcaccaccaacccatatgactatgccttcgtcagtcagggggagatcacagttcccagtattgatgaccaagaagagttgatggccactgatagtgccattgacatcctgggcttcactcctgaagagaaagtgtccatctataaactcacaggggctgtgatgcattatgggaacatgaaattcaagcaaaagcagcgtgaggagcaagctgagccagatggcacagaagtcgctgacaaggcagcctatctccagagtctgaactctgcagacctactcaaagccctctgctaccctagggtcaaggttggcaatgagtatgtcaccaaaggccagactgtgcagcaggtgtacaatgcggtgggtgctctggccaaagccgtctacgagaagatgttcctgtggatggtcacccgcatcaaccagcagctggacaccaagcagcccaggcagtacttcatcggggtcttggacattgctggctttgaaatctttgattttaacagcctggagcagctgtgcatcaacttcaccaacgagaaactgcaacagtttttcaaccaccacatgtttgtgctagagcaggaggagtacaagaaggaaggcatcgagtggacgttcattgactttgggatggacctggctgcctgcattgagctcattgagaagccactgggcatcttctccatcctggaagaggagtgcatgttccctaaggcaacggacacctccttcaagaacaagctgtatgaccagcacctgggcaagtctgccaacttccagaagcccaaggtggtcaaaggcaaggctgaggcccacttctctctgattcactatgctggcactgtggactacaacattactggctggctggacaaaaataaggaccccctgaatgatactgtggttgggctgtaccagaagtctgcaatgaagactctagccagtctcttttccacgtatgctagtgctgaagcagatagcagcgcgaagaaaggtgctaagaaaaagggctcttctttccagactgtgtctgcccttttcagggaaaatttaaataaattgatgacgaatctgaggagcacacaccctcacttcgtacggtgtatcattcccaatgaaaccaaaactcctggggcaatggaacatgaacttgtgttgcaccagctgaggtgtaatggtgtgctggaaggcatccgcatctgtaggaaaggattcccaagcagaatcttatatggtgatttcaaacaaagatacaaggttttaaatgcaagtgctattccagagggacagttcattgacagcaagaaggcttctgagaaacttcttgcatctattgatattgatcatactcaatataaatttggacataccaaggttttcttcaaagctggacttctgggtcttctggaagaaatgagagatgaaaaattagcccaaattataacaagaacacaagctgtctgtaggggattcctaatgagggtagaatatcagaagatgttgcaaaggagagaagcacttttctgcatccagtataatgtccgtgccttcatgaacgtcaagcactggccctggatgaaactctttttcaagattaagcccctcctcaagagtgcagagaccgagaaagagatggccaccatgaaggaagaattccagaaaaccaaagatgaactcgccaagtcagaggcaaaacggaaggagctagaggaaaaaatggtcactctcttaaaagagaaaaatgacctgcaactccaggttcaatctgaagcagatagcttggctgatgcagaggaaaggtgtgagcaactgattaaaaacaaaatccaacttgaggccaaaatcaaagaggtgactgaaagagctgaggaggaggaagagatcaatgctgagctgacagccaagaagagaaaactggaggatgaatgttcagaactcaagaaagacattgatgaccttgagctgacactggccaaggttgagaaggagaaacatgccacggagaacaaggtgaaaaatcttacagaagagatggcaggcctggatgaaaccattgcaaaactgtccaaggagaagaaggctctccaagagacccaccagcagaccctggatgacctgcaggcagaggaggacaaagtcaacatcctgaccaaagctaaaaccaagctagaacagcaagtggatgatcttgaagggtctctggaacaagaaaagaagcttcgaatggatctagaaagagcaaagcggaaactggagggtgacctcaaattggcccaagaatccacaatggatatggaaaatgacaaacagcaacttgatgaaaagcttgaaaagaaagaatttgaaatcagcaatttgataagcaaaattgaagatgagcaagctgtagaaattcaactacagaagaagatcaaagagttgcaggcccgcattgaggagctgggggaagaaatcgaggcagagagggcgtcccgagccaaagcggagaagcagcgctctgacctctcccgggaactggaggagatcagcgagaggctggaagaagccggtggggcaacttctgctcaggtggaattgaacaagaagcgggaggctgagtttcagaaactgcgcagggacctggaggaggccaccctgcagcatgaagctatggtggctgctcttcggaagaagcacgcagacagtatggctgagcttggggagcagattgacaacttgcagcgggtcaaacagaagctggagaaggagaagagtgagctgaagatggagactgatgacctcagcagtaacgcagaggccatttccaaagccaagggaaaccttgaaaagatgtgccgctctctagaagatcaagtgagtgagcttaagaccaaggaagaggagcagcagcggctgatcaatgacctcacagcacagagagcgcgcctgcagacagaagcgggtgaatattctcgacaattagatgagaaagatgctttagtctctcagctttcaaggagcaagcaagcatctactcagcagattgaagagctgaaacatcaactagaggaagaaactaaagccaagaacgccctggcacacgccctgcagtcctcccgccatgactgcgacctgctgcgggaacagtatgaggaagagcaggaaggcaaagctgagctgcagagggcgctgtccaaggccaacagtgaggttgcccagtggagaaccaaatacgagacggatgccatccagcgcacagaggagctggaggaggccaagaaaaagttggcccagcgcctgcaagaagctgaggaacatgtagaagctgtgaacgccaaatgtgcttcccttgagaagacgaagcagcggctccagaatgaagttgaagacctcatgcttgatgtggaaaggtctaatgcagcctgtgcagcccttgataagaagcaaaggaactttgacaaggtcctatcagaatggaagcagaagtatgaggaaactcaggctgaacttgaggcctcccagaaggagtcacgttctcttagcactgagctgttcaaggtgaagaatgtctatgaggaatccctggatcaactcgaaacgctaagaagagaaaataagaacttgcaacaggagatttctgacctcactgagcagattgcagagggaggaaagcaaattcatgaattggagaaaataaagaagcaagtagaacaagagaaatgtgaaattcaggctgctttagaggaagcagaggcatctcttgaacatgaagaaggaaagattctgcgtatccagcttgagttaaaccaagtcaagtctgaagttgatagaaaaatcgcagaaaaggatgaggaaattgaccagctgaagagaaaccacactagagtcgtggagacaatgcagagcacgctggatgcagagattagaagcagaaatgatgctctgagagtcaagaagaaaatggaaggagatctgaatgaaatggaaatccagctgaaccatgccaatcgcttagctgcagagagtttaaggaactacaggaacacccaaggaatcctgaaggaaacccagctccacctggatgatgctctccggggccaggaggacctcaaggaacagctggcaattgtggagcgcagagccaacctgctgcaggctgagatcgaggagctgtgggccactctggaacagacagagagaagcaggaaaatcgccgaacaggagctcctggatgccagtgagcgtgtccagctcctccacacccagaataccagtctcattaacaccaagaagaaattagaaaatgacgtttcccaactccaaagtgaagtggaagaagtaatccaagaatcacgcaatgcagaagagaaagccaagaaggccatcactgatgctgccatgatggctgaggagctgaagaaggaacaggacaccagcgcccacctggagcggatgaagaagaacctggagcagacggtgaaggacctgcagcatcgtctagatgaggccgagcagctggcgctgaagggtgggaagaagcagatccagaaactggaggccagggtacgtgagcttgaaggagaggttgaaaatgaacagaaacgtaatgcagaggctgttaaaggtttacggaaacatgagcgacgagtaaaagaactcacctaccagactgaagaagatcgcaagaatgttctcaggctgcaggacttggtagataaattacaggcgaaggtgaaatcatacaagagacaagctgaggaggctgaggaacaatccaatgctaatctatctaaattccgcaaactccagcatgagctggaggaggccgaggaacgggctgacattgctgagtcccaggtcaacaaattgcgagtgaagagccgagaggttcacacaaaaatcagtgcagagtaaacacacctgcctgatgctatcaagaggctgaagaaaggcacaaaatgtgctatttttggtcacttgctttatgacgtttattttcctgttaaagctgaataaataaaaactacagtaaatgtatacatt

SEQ ID NO: 129062 - DNA, 5814 bp, Artificial Sequence
  derived and/or modified sequence
atgagcgccagcagcgacgccgagatggccgtgttcggcgaggccgctccatatctcaggaagagtgagaaggagcggattgaggcccagaacaaaccattcgacgccaagacttctgtgttcgttgccgagcctaaggaatcatatgtgaagtccactatacaatcaaaagaggggggaaaagtaaccgtgaaaacggaggggggtgccaccctgaccgttagggaagatcaggtttttccaatgaacccccccaaatatgacaaaatcgaggacatggctatgatgacccatctgcatgaacccggcgtgctttacaacttgaaggagaggtacgccgcatggatgatttatacgtatagtggcctgttttgtgtgactgtgaacccatacaagtggctccctgtctacaaaccagaggtggtcgccgcttataggggtaaaaaacgacaggaggctccccctcatatcttcagcatctctgacaatgcttatcagttcatgctaacagatagggagaatcagagcattctcatcacaggtgagtccggagccgggaagacagtgaatacaaaaagggtcatccagtacttcgcgaccatcgccgttaccggggaaaagaaaaaggatgaaagcggcaagatgcaagggactctcgaggaccagattatctccgccaacccgttgctggaggcgttcggcaatgccaagacggttcgaaacgacaattcgtcacgctttggaaagtttatccggattcactttggtactacaggcaaactggcatcagccgacattgaaacctatctcttggagaagagtcgggtaacctttcagctgaaggccgaaagatcctaccacattttctatcaaatcactagcaataagaagccagatttgatcgagatgctcttgattactactaacccgtatgactacgccttcgtgagccagggcgagattactgttccaagtatcgatgaccaagaggaactgatggccacggactctgccattgatatcctgggattcacgcccgaggaaaaggtttccatttataaactgacaggcgccgtaatgcattacggtaacatgaagtttaaacagaagcagcgggaagaacaggctgaaccagatggtaccgaagtggccgataaggccgcttacctccagagtcttaatagcgctgacctactcaaagccctttgttatcccagagtcaaggttggaaacgagtatgtaaccaagggtcaaactgtccagcaggtgtacaacgcagtgggagccctggcgaaagccgtttacgaaaaaatgtttctttggatggtcacccgcatcaaccaacagctggacaccaaacaacctcgtcaatactttatcggagtcctcgatatagcaggatttgaaatctttgacttcaattcactggagcagctatgcatcaacttcactaacgaaaaactgcagcaatttttcaatcatcatatgtttgtgctggagcaggaggagtacaagaaggaaggaatcgagtggaccttcattgacttcggtatggatttagccgcctgtatcgaactaatcgaaaagccactcggaattttttccattcttgaggaggaatgcatgttccctaaagctaccgacacctccttcaaaaataaattgtacgatcagcacctgggaaaatcggccaacttccaaaagccgaaagttgtcaagggcaaggccgaggctcacttttcactgattcattacgccggtaccgttgactacaatatcacgggctggctggacaagaataaggacccccttaacgacacagtggtcggactataccagaagagtgctatgaagacactggcatcactgttctcgacgtatgcgtccgctgaagccgactcctccgccaaaaagggggccaagaaaaaaggctccagctttcagacagtgtctgcactgtttagagagaacctcaataagctaatgacaaacctgcgtagcacacatccacactttgttaggtgcattattcccaacgaaacaaagacccccggggccatggaacacgagctagtcttgcatcagttacgatgtaacggcgtgctcgaggggataaggatatgtcggaagggcttcccctccagaatattgtatggcgactttaagcagcgttataaagtcctgaatgctagtgctatccctgagggtcagttcatcgatagcaagaaggcctctgaaaaattacttgcttccatcgacatcgaccatacacagtataagtttggccacactaaagtgttcttcaaagcagggttgctgggactgctcgaggaaatgagggacgagaagctggcacagattatcacccgcacacaagcggtttgccgggggttccttatgagagtcgagtatcagaaaatgctgcaacggcgagaagccttgttctgtatacagtataatgtaagggccttcatgaacgtcaaacactggccatggatgaaattgttcttcaaaatcaaacccctgctcaagtcggccgagactgagaaagagatggcaacaatgaaagaagagtttcaaaagacaaaggatgagctggcgaaaagcgaagccaagaggaaggaattagaagaaaagatggtgactcttctaaaagaaaaaaatgatctgcaactgcaggtccagtctgaggctgattctctggcagacgctgaggagcgctgcgagcagctgattaaaaacaagatacaattagaggctaagattaaagaagtgaccgagagagcagaggaagaggaggaaattaacgccgagctaacagcaaagaagagaaagctggaagatgaatgcagtgagctgaagaaggacatcgatgatcttgaacttacattggccaaagtggaaaaagaaaagcatgcaaccgagaataaggtgaagaacttgacagaggaaatggccggcctcgacgaaacaatcgcgaaattgtcgaaggaaaagaaggccttacaagaaactcatcagcagaccctggatgacctacaggcggaggaggacaaagtaaacatcttaacaaaggccaagacgaaactggaacagcaggtggacgacctagagggatcattagagcaggagaaaaagcttcggatggacctggaacgggccaaacggaagctggaaggggatcttaagttggctcaggaaagcacaatggatatggagaacgataagcagcagctagatgaaaaactggagaagaaagagtttgagatttcaaacctaatttccaaaatcgaagatgaacaagctgtagaaattcaactgcagaagaagattaaagagctccaagccaggatcgaggaattaggagaagagatcgaggcagagagggcttcacgagcaaaagcagaaaagcagaggtctgatctttcacgtgaactggaagaaatatccgaaagactggaagaagctggaggcgccacctctgcacaggtggagctgaataagaagagagaagccgagttccagaagctgcggagagacttggaggaagccactctccaacatgaagccatggtggcagctctgcgaaagaaacatgccgattccatggccgaactgggtgagcagatcgataaccttcagagggttaagcaaaaactggagaaggagaaatcggagcttaagatggaaaccgatgacctgagctctaatgcagaggctattagtaaagccaaaggaaacttggaaaagatgtgcaggtccctcgaagaccaagtctccgaattgaaaacaaaggaagaagagcagcaacggcttatcaacgacctgacggcgcagagagcacgcctgcagacagaggccggcgagtactctagacagttggatgaaaaagacgccttggtgagccaattgagtagatccaagcaggcatccacacagcagatcgaagaactgaaacaccagctggaagaagaaacaaaggccaagaatgccctggctcacgcacttcagagttcccgacacgattgtgacctactccgagaacagtatgaagaggagcaggagggcaaggccgaactgcagcgggccttgagtaaggcaaacagcgaggtcgcacagtggcggacaaaatatgagaccgacgctatccagcgtacagaagagctggaagaggctaagaagaaactggctcagagactgcaggaggctgaggagcacgttgaggccgtcaatgccaagtgtgcatccctggagaaaacaaaacagcgcctgcaaaatgaagtggaagatctgatgctggatgtcgagaggtctaatgctgcttgcgccgccctcgacaagaagcaaaggaatttcgataaggtcctttccgagtggaaacagaagtacgaggagacacaggccgagctggaggcgtcgcagaaggaatcaagaagcctgagcaccgagctctttaaggttaaaaacgtttatgaagagagtctcgatcaactggagactcttcggagggaaaataagaacttgcagcaagagattagcgacttaactgaacaaatagccgaaggaggaaaacagatccacgagctggaaaagataaaaaaacaggtcgagcaagaaaagtgtgagatccaggccgccttggaagaggccgaagcctctttagaacacgaagagggcaagatcctaagaatccagctcgaactgaatcaggtgaaaagtgaagtggatcggaaaatagctgagaaagacgaggaaatagaccaactgaaacgcaatcacacccgcgttgtagaaaccatgcagtccacccttgacgccgagattcgctcccggaacgatgctctcagggttaaaaaaaaaatggaaggagatctgaatgaaatggagatccagctgaatcacgcgaaccgactggccgccgaatcattgagaaactatcgcaacacccaagggattttgaaagagacacagctccaccttgacgatgctctgaggggccaggaagatctgaaagaacagttggcaatagtagagcgaagagctaatctgctccaagcagagatcgaagaactctgggccacccttgagcagaccgagaggagcagaaagatcgcagagcaggaactgctggacgcttccgagagagttcaattgctccatacacagaacacaagccttattaatacaaagaagaaactggaaaatgacgtttcccagctgcaaagcgaagtcgaagaggtcattcaggagtccaggaacgccgaggagaaggcgaaaaaagctatcaccgacgctgccatgatggcagaagagctgaagaaggagcaagatacgtctgcacatctggagaggatgaaaaagaacctcgaacagaccgtgaaagatttgcagcatcggctggatgaggccgaacagctcgccttgaagggtgggaaaaaacagatccagaagctggaggccagagtccgcgagttagagggtgaagtcgagaatgagcagaaacgcaatgctgaagcagtcaaagggttgcgcaaacatgagaggagagtgaaagagttgacttaccagactgaagaagataggaaaaatgtgttgagactgcaggacctcgtcgacaaactgcaggctaaagttaagtcctataagcggcaggctgaggaggctgaggaacagtccaacgccaacctcagcaaatttagaaaactccagcacgagcttgaagaagccgaggagcgggcagacatcgccgagtcacaagtgaataaactccgggtgaagtctagagaggtccacacaaagatatctgcagaatag

SEQ ID NO: 129063 - DNA, 5814 bp, Artificial Sequence
  derived and/or modified sequence
atgagcgccagcagcgacgccgagatggccgtgttcggcgaggccgccccatatctgaggaaatctgagaaggaacggattgaggctcagaacaagccatttgacgcgaaaacctcagtgttcgtcgcagagccaaaggagtcttatgtgaagtccacaatccagagtaaagagggaggcaaagtgaccgtgaagaccgaaggcggtgctacactcacagttcgagaggatcaggttttccccatgaatccaccgaagtacgataagatcgaggatatggcaatgatgacacacctgcatgagccgggagtactgtataaccttaaagaaagatacgcagcctggatgatctacacatactcgggccttttctgcgtaaccgtcaacccttataagtggttacctgtgtataagccagaggttgtcgctgcgtacaggggcaagaagcgacaggaggcacccccccatatcttttccatttccgataatgcataccaatttatgctgactgatcgcgaaaatcaaagtatcttgatcactggcgagtccggggccgggaagacagttaacaccaagcgcgtaatacaatacttcgccaccatcgccgtgaccggcgagaagaaaaaggacgagtctggcaaaatgcagggtaccctcgaggatcagatcatttctgctaatcccctgttggaggccttcggaaatgccaaaacagttaggaacgataatagtagccggttcggaaaattcatccgaatccactttggaaccactggcaaacttgcaagcgccgatatcgaaacatatcttctggaaaagtcccgtgttacgttccagctcaaggctgagagaagctaccacattttttaccagatcacttcaaataaaaagcccgatctgatcgagatgctacttattactacaaatccatatgattatgcctttgttagccagggggaaatcaccgtgccgtctatcgatgaccaggaagaactgatggccaccgacagcgcaatcgacattctgggctttacgccagaggagaaggtgtccatatacaagctaacgggggcagtcatgcactatggcaacatgaaattcaaacaaaagcagcgcgaagagcaggccgaaccggacggcactgaggtcgctgacaaagcggcatacctacagagccttaacagcgcagatctcctgaaagctctgtgctaccctcgagtgaaagtgggcaacgaatatgtgacaaaagggcaaaccgtccagcaggtgtacaacgctgtcggagccctggcaaaagccgtgtatgaaaagatgttcctgtggatggtgactcgcattaaccagcaattagatacaaagcagcccagacagtactttattggtgtgctggacattgctggtttcgaaattttcgacttcaattctttggaacaactctgcattaatttcacaaacgagaagctccagcagttcttcaaccaccacatgttcgttctggagcaagaagaatataagaaggaaggcattgagtggactttcatcgattttgggatggacctcgctgcctgtattgagctcatcgagaaaccactcggtatcttctctatccttgaggaagaatgcatgttccccaaggccaccgacacaagtttcaagaacaagctctatgaccagcatttgggtaaatccgctaacttccagaagcctaaagtcgtgaaagggaaagctgaggcccacttctcactcatccactacgctgggactgtcgattacaatattactggatggctggacaaaaataaggaccctctaaatgatacagttgtgggcttataccagaagtcagctatgaagacactggcctcacttttttccacctatgcttctgccgaggctgactcctcagcgaaaaaaggtgctaaaaaaaaaggttcaagcttccagaccgtgtctgccctcttcagagaaaatctaaacaagcttatgacaaaccttcggtctacacatccccacttcgtcagatgcattattccaaacgaaacaaagacaccgggagctatggaacacgaactcgtcctgcaccagcttaggtgcaatggcgtgctggaaggcatccgaatttgccgaaagggcttcccttctaggatcctctatggagatttcaaacaacggtataaagtgctgaatgcctctgcaattcccgagggacagttcatcgactcaaagaaggctagtgaaaagctactggccagcattgacatcgaccacacccaatacaaattcggccatactaaagtcttcttcaaagctggcctgctgggactcctggaggagatgcgcgacgaaaagctggcccagatcatcacccggacacaggctgtatgcagggggttccttatgagggtggagtaccagaagatgctgcagcggagagaagccctgttctgcatccagtacaacgtcagggctttcatgaacgtaaagcactggccttggatgaagttattcttcaagatcaagcccctgctcaagtctgcagaaaccgaaaaggaaatggctactatgaaggaggaatttcagaaaactaaagatgagctggccaagagcgaggccaagaggaaggagttggaagaaaagatggtgactctgctgaaggagaaaaatgacctgcagctccaggttcaaagcgaagccgattctctggcagacgccgaggaacgatgcgagcagctgatcaagaacaagatccagctcgaggctaaaattaaggaggtgactgaacgcgctgaagaggaagaggagataaacgccgagctgactgcgaagaagaggaaactggaagacgagtgcagcgagctgaaaaaagatattgacgatctggagcttacgttagccaaggtcgaaaaagaaaagcatgcaaccgaaaacaaagtgaagaatctgaccgaggagatggctggactagatgagaccattgccaagttaagtaaagagaaaaaagccttacaagaaacgcatcagcaaaccctcgacgacctccaagccgaggaagacaaggtgaacatcttgacaaaggccaagacaaaactcgagcagcaggtcgacgacctcgagggcagcctggaacaggaaaaaaagttacgtatggacctggagagggcaaaacgcaaactggaaggcgacctaaaactggcacaggaatctactatggatatggaaaatgataagcagcagctcgatgagaaactggagaaaaaagaatttgagattagcaatctgatcagtaagatcgaggatgaacaagctgtggagatacagttgcaaaaaaaaatcaaggagttgcaggcccggatcgaagaattaggtgaggagatcgaggctgaaagggctagtagagccaaagccgagaaacaaagaagtgacctttccagagagctcgaggaaatttcagaacggcttgaggaagccggaggagcgaccagcgcccaggtcgaactcaataaaaaaagagaagccgaattccagaagctcaggcgcgatctagaagaggctacattgcagcatgaggccatggtggctgcgttgaggaagaaacatgcagactcgatggccgagctgggagagcagatagataaccttcagcgagtgaagcagaaactcgaaaaagagaagtctgagttgaaaatggagacagacgatctgagctctaatgctgaagcgatctcgaaggcgaaggggaatctggaaaagatgtgccggtcactggaggatcaggtctccgagcttaaaacaaaggaggaagagcaacagcgcctgattaatgacttaaccgcccagagggcccgcctgcaaaccgaggccggtgaatactcccggcagttggacgaaaaagacgccctcgtgagccaactctcacggagcaagcaggccagcacccaacagattgaagagctaaagcatcaattagaagaagagaccaaagcaaaaaacgccctggctcatgctttacagtctagccggcacgactgcgacctcctcagggagcagtatgaggaggaacaggaaggcaaggccgaactccagcgggctctgagtaaggctaattctgaggtggctcagtggcgcactaaatatgagaccgacgctatccagagaaccgaggaattggaagaggccaaaaagaagctcgcgcaacgtttacaggaggctgaggagcacgtagaggcagtgaatgctaagtgcgcttcccttgagaaaacgaagcagcgcctgcagaacgaggtggaggatcttatgctcgacgttgaacgaagtaacgcggcatgtgcagcccttgacaagaaacagaggaacttcgacaaggtactttccgaatggaaacagaaatacgaggagacacaggccgagctggaagcatctcagaaagaaagcagatctctgtccactgagctgttcaaagtgaagaacgtctacgaggaatccctggatcagctggagaccctcaggcgcgaaaataaaaacctccagcaggaaatctctgacctcacggagcagatcgcagaaggaggcaagcaaattcatgaattggagaagattaaaaagcaggtcgaacaggagaagtgtgagatccaggccgccctcgaggaagctgaggcaagcctagagcacgaggaggggaaaattctccgcattcagcttgaactgaaccaggtgaaaagcgaagtggaccggaaaattgcggagaaagacgaggagatcgatcaactgaagcggaaccatactagggtcgttgagacaatgcaatcaaccctcgacgccgagattcgctccaggaatgatgccctgagagtcaagaagaagatggagggcgacctgaatgaaatggagatccagctgaaccatgcaaacaggctcgctgcagaatctttaagaaactatcgtaatacgcagggcatcctgaaagaaacccagctgcacttggatgatgctctccggggccaggaggacctgaaggagcagctcgcaatcgtggagaggcgcgccaatctgcttcaggctgagatagaggagctgtgggcaactctcgagcagacggagcggtcgaggaagatagctgagcaagagctcctcgatgcttccgagagggtccaactactgcacactcagaacacttcactgatcaataccaagaaaaagctggagaacgacgtcagccagttgcaaagtgaagtggaagaagttattcaagagagccggaatgccgaagaaaaagctaagaaggcgatcacagatgcggcaatgatggccgaggaactgaaaaaagaacaggataccagtgcccatctcgaacgcatgaagaagaatcttgaacagacggtgaaagatttacagcaccgtctggatgaggctgagcagctcgctctgaaaggagggaaaaaacaaattcagaaactcgaggcacgcgttagggagctggagggagaagtcgagaatgaacagaaacgcaatgcagaggctgtcaaaggcttgagaaaacatgaacgccgggtgaaagaattgacatatcagacagaggaagataggaaaaatgtcctgagattgcaggatctggtagacaagctacaggcaaaagtaaaatcctataagcgccaggctgaggaggccgaagaacagtcaaacgccaatctaagcaaattccggaagctgcagcatgaacttgaggaggctgaggagcgtgccgacatagccgagtcccaggtgaataaactgagggtaaaaagccgcgaagtgcatacaaaaatatcagctgagtag

SEQ ID NO: 129064 - DNA, 5814 bp, Artificial Sequence
  derived and/or modified sequence
atgtccgccagttctgacgccgagatggcagtcttcggggaggctgcaccctatctgcgcaagtccgagaaagagcggattgaagctcagaacaagccattcgacgccaagacctcggtcttcgttgccgaacccaaggagagctatgttaagtccacaatccagtcaaaagaagggggaaaggttacagtgaagacagaggggggtgccacactgacagtgagggaggatcaggtgttccccatgaatcctccaaagtacgacaagattgaagacatggcaatgatgactcacctgcacgagcccggagtcctttataacctgaaagagcgatacgccgcatggatgatttatacctacagtgggctgttctgtgttacagtgaatccctacaagtggctccccgtgtacaaacctgaggtggtagccgcatacagggggaagaaacggcaggaagcgcctcctcacattttctctatctctgataatgcttatcagtttatgctgacagacagggagaaccagtcaatcctgatcacaggagaatccggcgcaggcaagactgtcaatacaaagagagttattcagtactttgcgacaattgccgtaacgggcgagaaaaagaaggatgagagtggcaagatgcaaggcactttagaagaccagattatcagcgcaaatcccctgctcgaagcatttgggaacgcaaaaacagtccgcaatgacaattcctctcgcttcggcaagttcataagaattcatttcggaactacaggaaagctagcaagcgcagacattgaaacatacctgctagagaaatccagggtcacctttcagctgaaagccgagcgctcctaccacattttctaccagatcacatctaacaagaagcccgacctcattgagatgttactgattacaacaaacccctatgattacgcatttgtgtctcagggggagatcacagtaccatcgatcgacgatcaggaggagctcatggcaactgattccgccatagacatcttaggattcactcccgaggaaaaggtgtcaatatataagctgacaggggcagtgatgcactacggcaatatgaaatttaagcagaagcagagagaagagcaagcagagcccgacggaaccgaggttgctgataaggcagcctatttgcagtccctgaactcagccgacctgttgaaagctctgtgttatcccagggtaaaggtgggcaacgagtacgtcactaagggacagactgttcagcaggtgtacaacgccgtgggagccctggctaaggccgtttacgagaagatgtttctgtggatggtgaccagaatcaaccagcaactggacaccaagcagcctcgacagtattttatcggagttcttgatatagctggctttgaaatcttcgatttcaactctctagaacagttgtgcatcaacttcaccaacgagaaactacagcagttctttaaccaccacatgttcgtgttagagcaggaagagtacaaaaaggaaggcatcgaatggaccttcatcgactttggaatggacttggccgcttgcatcgaacttatcgagaagcccctgggcattttctcaatcttggaggaggagtgcatgtttccaaaagccaccgacacctccttcaagaataaactgtacgaccaacatctcggaaagagtgccaacttccaaaagcccaaggtcgtgaagggcaaagccgaggcccacttctccctgatccactacgccggtacagttgattacaatataaccggatggctggataaaaacaaggatcctctcaacgacaccgtcgtgggactatatcagaagagcgcgatgaagacgttggcatccctgttttcaacctacgcttcagccgaagccgattcgtccgccaagaagggcgcaaagaaaaaaggtagttcttttcagacggtctctgccctattcagggaaaatctcaacaaactgatgactaacttaagaagtactcacccgcacttcgtcaggtgcattatccctaatgaaaccaagacacctggcgctatggagcacgaactcgtactgcaccaactgaggtgcaatggtgtgctggagggcatccgaatttgcagaaagggattcccgtcccgcatcctgtatggcgactttaaacagaggtacaaagtgttaaacgccagtgccatcccagaaggacagttcattgattctaaaaaagcatcagaaaaactattggcgagcatcgacattgatcacacgcagtataagttcggccataccaaggtgttctttaaagcaggcctgttggggctgctggaagagatgcgggacgagaaactcgcgcaaatcattaccagaacccaggctgtgtgtaggggtttcctcatgagggtcgaataccagaagatgctgcagcgtcgagaggcactgttctgcattcagtacaacgtcagggcatttatgaacgtgaagcattggccttggatgaagctgtttttcaagataaaacccctgctcaagtcagctgagacagagaaagagatggccactatgaaagaagagttccagaagacaaaagacgaattagctaagtcggaagccaaacggaaggaattggaagagaagatggttactctcctgaaagaaaagaacgatttgcagctacaagtccagtccgaagctgattctctggctgatgccgaagaacgttgcgagcagctgattaaaaacaagatccagcttgaggccaaaataaaagaggttacagagcgagccgaggaggaggaagagatcaacgctgagctaaccgccaaaaagcggaaacttgaggacgaatgttcagaattgaagaaagacattgacgacctggaactgacactggccaaggtggagaaagagaagcacgctaccgagaataaagtaaagaatttaacagaagaaatggcagggctcgatgaaactatcgctaaactgtccaaggagaagaaggccttgcaggagacccatcagcagactttagatgacctgcaggctgaagaggacaaggtgaatattctaacaaaagctaaaaccaagctcgagcagcaagttgacgacttggagggcagccttgaacaagagaagaagctgcggatggatctcgaaagggccaagagaaagttggagggcgaccttaagctggcgcaggaaagcacgatggatatggaaaatgataagcagcagctggacgaaaagttggaaaaaaaggaattcgagatctcaaatctcatctcaaagatagaggatgagcaggccgtcgaaatacagctgcagaagaagataaaagagctccaagccaggatcgaagaactgggtgaggagatcgaagcagagagagcgtccagagccaaggcagagaagcagcggtcggacctctcgcgggagttggaggagatctccgagcgcttggaggaggctggcggtgccactagcgcccaggttgagttgaataagaaacgtgaggcggagtttcagaagctccgcagggacctggaagaggcaactctgcagcacgaggctatggtggctgccctgagaaaaaagcatgccgatagtatggctgaattgggtgagcaaattgataacctgcaaagagtcaaacagaagttggaaaaagaaaaaagcgagctgaagatggagactgatgacctgagttccaacgcggaggctattagcaaggctaagggtaacctcgagaaaatgtgccggtccttagaggatcaggtgtccgagctcaaaacaaaagaagaggagcagcagcgtctcatcaacgatctcacggcacagcgtgcccgactacagacagaggcgggtgaatattcgcgccagctggatgagaaggacgcgttagtttctcagctctctcgctctaagcaggctagtactcagcagatagaggaactgaaacatcagcttgaggaagaaactaaggctaagaacgccttagcccatgcgttgcagtcttccagacacgattgtgaccttctacgggagcagtacgaggaggaacaagaaggcaaggcagaactccagagagcgctgtcaaaggcaaattctgaagttgcacagtggcggactaagtatgaaacggacgccatccagagaactgaagagctggaggaggcaaaaaagaagctcgctcagcggctccaggaagcagaggagcacgttgaagccgtcaacgctaagtgcgcttccctggaaaagacaaaacagcggttgcagaatgaggttgaagatcttatgttggatgtggaacgatccaatgccgcatgcgccgctcttgataagaagcagcgcaatttcgataaggtattatctgaatggaagcagaaatacgaagagactcaggctgaactcgaagctagccagaaagagtccaggtccctgtcaactgagcttttcaaggttaaaaatgtgtacgaggagtctctagaccagctcgagaccctgcgcagagagaacaaaaacctccagcaggagatctctgacctgacggagcagattgcagaagggggtaagcagattcacgagttggaaaaaattaagaaacaggtcgaacaggagaaatgtgagatacaagctgcgctcgaggaggccgaagcctccttagaacacgaggagggtaagatcctgcgcatccagctggagctgaatcaggttaagagcgaggtcgaccggaaaatagcggagaaggatgaagaaatcgaccagcttaagcgcaatcacacacgcgtcgttgagaccatgcagtcgaccttggatgccgaaatccgtagccgcaacgatgccttgcgcgtaaagaaaaaaatggaaggagatcttaacgaaatggagatccaactgaatcatgctaatcgcctcgcagcagaatcactaaggaattatcggaatactcagggcatccttaaagaaactcagctgcatctcgatgatgccctgcggggtcaggaggatcttaaggagcagctcgccattgttgagcgccgagcaaatctgctgcaggctgaaatcgaggaactctgggcaacactggaacaaaccgagaggagtcgcaagattgccgaacaggagctgttggatgcatccgaaagggtgcaactgttacacactcaaaatacctccctcattaatacaaagaaaaaactggagaacgacgtgagccagctgcaatcagaggtggaggaggtgattcaggagtcacggaatgccgaggagaaagccaagaaggccattacggacgccgcaatgatggcagaagaactgaagaaggaacaggatacaagcgcgcatctggagaggatgaagaagaacctagaacagaccgtcaaggatctgcagcacagactggatgaggctgaacaactagcactgaagggtggtaagaagcaaattcagaaactcgaagctcgggttagggaactggagggtgaggtcgagaacgaacagaaacgcaacgcagaagctgtaaagggcctgcggaaacacgagcgacgtgttaaggagctgacgtatcagactgaggaggaccggaaaaacgtcctgagattgcaggatctggtggataaactgcaggccaaggtaaagagctataagagacaggccgaagaagctgaggagcaatcaaacgccaatttgtctaaatttaggaagcttcaacacgagcttgaagaagccgaggagcgggctgatattgctgagtctcaggtgaataagctccgggtgaagtcacgggaagtccacacaaagatcagtgccgagtag

SEQ ID NO: 129065 - DNA, 5813 bp, Artificial Sequence
  derived and/or modified sequence
atgtctgcatcctctgacgctgagatggccgtcttcggtgaggcggctccatacttgcggaaaagcgagaaagagagaatcgaggctcagaataagcccttcgatgcgaaaacatccgtgtttgtcgccgagccgaaagaatcctatgtgaagtcaacaatccaatctaaggaagggggtaaagttacagttaaaactgaagggggagccacactgacggtcagggaagaccaagtcttccctatgaacccgccaaaatatgacaagatagaagatatggccatgatgactcacctgcatgaaccaggagtcctctataatctcaaagaacggtacgccgcttggatgatctatacttacagcgggttattctgcgtcacggtgaacccctacaagtggctcccggtgtacaaaccagaggtcgttgccgcttatcggggaaagaagaggcaggaggccccacctcacatcttttctatttcggacaatgcatatcaatttatgcttaccgatcgagagaaccaaagcatcttgattaccggggagagtggagctggtaagacagtaaataccaagagagtgattcagtattttgcaaccatcgcagtgacaggtgaaaagaaaaaggacgagtctggaaagatgcaggggacattggaggatcagatcatcagtgcaaatcctctgctcgaagcgttcggaaacgctaaaactgtgagaaacgataactcttccaggttcggcaaattcattcgtatacatttcggtaccacaggcaagctcgccagcgcagatattgagacttaccttttggaaaagagcagagtaactttccagttaaaggctgaacggtcctaccacattttctaccagattactagcaacaaaaagcccgatctcatagaaatgctgcttatcaccaccaacccctacgattacgcattcgtttctcagggtgaaatcacggtcccttctattgatgaccaggaagaattaatggcaaccgactccgcaatagatatcctcggattcacacccgaggaaaaggtgagcatctataaactcactggagccgttatgcactacgggaacatgaagtttaagcagaaacaaagggaggaacaagcagagcccgatgggacggaggtcgctgacaaagctgcatatttacagtccctcaacagtgccgacctgctgaaagccctatgttatcccagagttaaggtgggaaacgagtacgtgactaaaggccagacggttcagcaggtgtacaatgcagttggtgccctggctaaggctgtgtatgagaagatgtttctgtggatggtgacgcgtatcaaccaacagctggatactaaacagcccaggcagtacttcatcggcgttctggacatcgctggtttcgagatttttgacttcaattcactggagcagctctgtatcaatttcacgaatgaaaagctgcaacaatttttcaaccatcacatgttcgtactggaacaggaagaatataagaaggaggggattgagtggactttcatagactttggcatggacttggctgcctgtatcgaactgatcgagaaacccctcggcatcttctccattcttgaggaagagtgcatgttcccgaaagcgacagatacatcgtttaagaacaaattatatgatcagcatctcggcaaatccgcaaactttcagaaaccgaaagtcgtcaagggaaaggccgaagctcactttagcctgatccactacgcaggcacagtggactataacatcacaggctggcttgacaaaaataaggaccccctgaacgacaccgtggtgggcctgtatcagaaatcagccatgaagaccttggcctccctcttcagtacctatgcttctgctgaggccgactcttctgctaagaagggcgctaaaaaaaaggggtctagttttcagaccgtctccgccctttttcgggagaatctgaacaagctcatgaccaatctcaggtcgacgcacccacactttgtacgctgtatcataccaaatgagaccaagacacctggggcaatggagcatgaactggtgttgcatcaactgagatgcaatggggtcctagagggaatccgcatttgtagaaagggattcccatcaaggatcctttatggtgattttaaacagaggtataaggtcctgaacgcctctgcaattcccgagggacagtttatagacagtaagaaggcttctgaaaaactcctggcgtccatcgatattgaccacactcagtacaagtttggacacacaaaggtctttttcaaggcgggactgctgggcctcctggaagagatgcgcgatgagaaactcgcccagatcattactaggacgcaggccgtgtgccgaggctttcttatgcgcgtggagtatcaaaagatgctccagaggagggaggccctcttctgcatacagtacaacgtgagggccttcatgaatgttaagcactggccctggatgaaactgttttttaagatcaaaccactgctgaagtctgctgagactgagaaagagatggcaacgatgaaggaggagtttcagaaaacaaaagacgagctggccaaatctgaggcaaagcgaaaggaactggaggagaaaatggtgaccctgcttaaagagaagaatgacctgcaacttcaggtgcaatcagaggccgattctctagccgatgcagaggaaaggtgtgaacagctgattaaaaacaagatacaactggaggccaaaattaaagaggtgacagagagagctgaggaagaggaagagataaacgcagagctcaccgctaagaagagaaaattagaagatgaatgtagcgagcttaaaaaggacatagacgacctggaactgacactggccaaagtggagaaggagaaacacgccacagaaaacaaagtgaagaatctgactgaagagatggcagggctggatgagactatcgccaagctgagcaaagagaaaaaggctttgcaggagacccatcagcagaccctggatgatctgcaagcggaagaggacaaagttaacatactgaccaaggcaaagacgaaactggaacagcaggtggatgacctcgaaggtagcctggaacaggagaagaagctccgtatggatttggaaagagccaagcgcaagctggagggggatttgaaacttgcacaagaatcaaccatggacatggaaaacgataagcagcaactggatgaaaaactggaaaagaaagaattcgagattagtaatctgatatctaagatcgaggacgagcaagctgtggaaatccagttgcaaaagaaaattaaagagttgcaagcgaggatcgaggagctcggcgaggaaatagaggcggaacgggcttcccgcgctaaggctgagaagcagaggagtgatctgagccgggagctggaggagatctctgagcgcttggaagaagccggaggggctacttccgcacaggttgagctgaacaagaagagagaagccgagttccagaagctgagaagggacctagaagaggccaccctgcagcatgaagccatggttgctgctctacgtaagaagcatgctgattctatggcggagctcggcgaacagattgacaacctgcagcgggttaagcagaagctcgaaaaagagaagagcgagctcaagatggaaaccgatgacttaagttctaatgccgaagccatatctaaagcaaaaggcaatctcgagaaaatgtgtcgttctctagaggaccaggtgtccgagttaaagacgaaagaggaggagcagcagaggcttatcaacgacctcaccgcgcagagggccagactgcagaccgaagccggtgaatactcacgccagctggacgaaaaagatgctctggtgtcgcagctctcccgctcaaaacaggcttcgacccagcagatcgaagagttgaagcaccagctcgaggaggagaccaaggccaagaatgcgctggcccatgcacttcagtccagtcgccacgattgcgacctcctgcgggagcagtacgaagaggaacaagaaggcaaagcggaactgcaacgggcactttcgaaggcaaacagcgaggtcgcccaatggaggaccaaatacgagaccgacgccatccagcgcaccgaggaattggaggaagcaaagaagaagcttgcccagagattacaggaagccgaagaacacgtggaggccgtcaacgcaaagtgtgccagtctggagaaaacgaagcagcgtcttcaaaacgaggtggaagacctgatgcttgacgtcgaacgctctaacgccgcttgtgcagccctagataaaaagcagaggaactttgataaagttctgtcagagtggaagcagaagtacgaagagacccaggctgagctcgaagcgtcccagaaagaaagtcggagcctgagtaccgaactcttcaaggtaaagaatgtgtacgaggagtccctggatcagctggagacactgcgaagagagaacaaaaatctgcaacaggagatctcggacctgaccgaacagattgctgagggtggtaaacaaatccatgagctggaaaaaattaagaagcaagtagaacaagagaagtgcgagatccaagccgcactggaggaagccgaggccagtctcgaacacgaggagggaaagatcttgaggatacagcttgagctgaaccaagtaaagtccgaggtggaccgtaaaattgcggagaaggatgaagagatcgatcagctaaaaagaaatcatacccgcgttgtcgaaactatgcagtctactctcgacgctgaaatccgatctcgcaatgacgctcttagagttaaaaagaagatggagggcgacctaaatgagatggaaattcaactcaaccatgctaatcgtctggctgcagagtctcttaggaattataggaacacacaggggattttaaaagaaacgcagctgcatctcgacgatgccctgcggggacaggaagatctcaaggagcagctggccatagtggagaggcgggcaaatctcctgcaggctgaaatagaagagctgtgggctactctggagcagacagagaggtcaaggaagatagccgagcaggagctgttggatgcatctgagcgtgtgcaactgctccacacacagaatacctcactcatcaacacaaagaaaaagctggagaacgatgtgagccagctccagagcgaggttgaagaagttattcaggagtctcgtaatgcggaggagaaggctaaaaaggctatcactgacgctgcgatgatggctgaagaactgaagaaggaacaggatacaagcgcacacctggagcgcatgaaaaaaaacttagagcagacggtaaaggacctgcagcataggcttgatgaggcagaacagctcgctcttaagggcggtaagaaacagatacaaaaattggaggcaagggtgagagagctggagggcgaggtcgaaaacgaacagaagagaaacgctgaagccgttaaagggctacgcaaacacgagcgcagagttaaggagctgacttaccagacagaggaagatcgtaagaacgtgctacgattgcaggacctggtagataaactccaggcaaaggttaaaagctacaaacgccaggcggaggaagctgaggaacagtctaacgccaacctctccaagttccgtaaattgcaacacgaactggaggaggctgaggagcgtgccgatattgctgaatctcaggtcaacaagctgagagtgaagtctagggaagtgcatactaaaattagcgcagagta

SEQ ID NO: 129066 - DNA, 5814 bp, Artificial Sequence
  derived and/or modified sequence
atgagcgccagcagcgacgccgagatggccgtgttcggcgaggccgccccctacctgagaaagagcgagaaggagagaatcgaggcccagaacaagcccttcgacgccaagaccagcgtgttcgtggccgagcccaaggagagctacgtgaagagcaccatccagagcaaggagggcggcaaggtgaccgtgaagaccgagggcggcgccaccctgaccgtgagagaggaccaggtgttccccatgaacccccccaagtacgacaagatcgaggacatggccatgatgacccacctgcacgagcccggcgtgctgtacaacctgaaggagagatacgccgcctggatgatctacacctacagcggcctgttctgcgtgaccgtgaacccctacaagtggctgcccgtgtacaagcccgaggtggtggccgcctacagaggcaagaagagacaggaggcccccccccacatcttcagcatcagcgacaacgcctaccagttcatgctgaccgacagagagaaccagagcatcctgatcaccggcgagagcggcgccggcaagaccgtgaacaccaagagagtgatccagtacttcgccaccatcgccgtgaccggcgagaagaagaaggacgagagcggcaagatgcagggcaccctggaggaccagatcatcagcgccaaccccctgctggaggccttcggcaacgccaagaccgtgagaaacgacaacagcagcagattcggcaagttcatcagaatccacttcggcaccaccggcaagctggccagcgccgacatcgagacctacctgctggagaagagcagagtgaccttccagctgaaggccgagagaagctaccacatcttctaccagatcaccagcaacaagaagcccgacctgatcgagatgctgctgatcaccaccaacccctacgactacgccttcgtgagccagggcgagatcaccgtgcccagcatcgacgaccaggaggagctgatggccaccgacagcgccatcgacatcctgggcttcacccccgaggagaaggtgagcatctacaagctgaccggcgccgtgatgcactacggcaacatgaagttcaagcagaagcagagagaggagcaggccgagcccgacggcaccgaggtggccgacaaggccgcctacctgcagagcctgaacagcgccgacctgctgaaggccctgtgctaccccagagtgaaggtgggcaacgagtacgtgaccaagggccagaccgtgcagcaggtgtacaacgccgtgggcgccctggccaaggccgtgtacgagaagatgttcctgtggatggtgaccagaatcaaccagcagctggacaccaagcagcccagacagtacttcatcggcgtgctggacatcgccggcttcgagatcttcgacttcaacagcctggagcagctgtgcatcaacttcaccaacgagaagctgcagcagttcttcaaccaccacatgttcgtgctggagcaggaggagtacaagaaggagggcatcgagtggaccttcatcgacttcggcatggacctggccgcctgcatcgagctgatcgagaagcccctgggcatcttcagcatcctggaggaggagtgcatgttccccaaggccaccgacaccagcttcaagaacaagctgtacgaccagcacctgggcaagagcgccaacttccagaagcccaaggtggtgaagggcaaggccgaggcccacttcagcctgatccactacgccggcaccgtggactacaacatcaccggctggctggacaagaacaaggaccccctgaacgacaccgtggtgggcctgtaccagaagagcgccatgaagaccctggccagcctgttcagcacctacgccagcgccgaggccgacagcagcgccaagaagggcgccaagaagaagggcagcagcttccagaccgtgagcgccctgttcagagagaacctgaacaagctgatgaccaacctgagaagcacccacccccacttcgtgagatgcatcatccccaacgagaccaagacccccggcgccatggagcacgagctggtgctgcaccagctgagatgcaacggcgtgctggagggcatcagaatctgcagaaagggcttccccagcagaatcctgtacggcgacttcaagcagagatacaaggtgctgaacgccagcgccatccccgagggccagttcatcgacagcaagaaggccagcgagaagctgctggccagcatcgacatcgaccacacccagtacaagttcggccacaccaaggtgttcttcaaggccggcctgctgggcctgctggaggagatgagagacgagaagctggcccagatcatcaccagaacccaggccgtgtgcagaggcttcctgatgagagtggagtaccagaagatgctgcagagaagagaggccctgttctgcatccagtacaacgtgagagccttcatgaacgtgaagcactggccctggatgaagctgttcttcaagatcaagcccctgctgaagagcgccgagaccgagaaggagatggccaccatgaaggaggagttccagaagaccaaggacgagctggccaagagcgaggccaagagaaaggagctggaggagaagatggtgaccctgctgaaggagaagaacgacctgcagctgcaggtgcagagcgaggccgacagcctggccgacgccgaggagagatgcgagcagctgatcaagaacaagatccagctggaggccaagatcaaggaggtgaccgagagagccgaggaggaggaggagatcaacgccgagctgaccgccaagaagagaaagctggaggacgagtgcagcgagctgaagaaggacatcgacgacctggagctgaccctggccaaggtggagaaggagaagcacgccaccgagaacaaggtgaagaacctgaccgaggagatggccggcctggacgagaccatcgccaagctgagcaaggagaagaaggccctgcaggagacccaccagcagaccctggacgacctgcaggccgaggaggacaaggtgaacatcctgaccaaggccaagaccaagctggagcagcaggtggacgacctggagggcagcctggagcaggagaagaagctgagaatggacctggagagagccaagagaaagctggagggcgacctgaagctggcccaggagagcaccatggacatggagaacgacaagcagcagctggacgagaagctggagaagaaggagttcgagatcagcaacctgatcagcaagatcgaggacgagcaggccgtggagatccagctgcagaagaagatcaaggagctgcaggccagaatcgaggagctgggcgaggagatcgaggccgagagagccagcagagccaaggccgagaagcagagaagcgacctgagcagagagctggaggagatcagcgagagactggaggaggccggcggcgccaccagcgcccaggtggagctgaacaagaagagagaggccgagttccagaagctgagaagagacctggaggaggccaccctgcagcacgaggccatggtggccgccctgagaaagaagcacgccgacagcatggccgagctgggcgagcagatcgacaacctgcagagagtgaagcagaagctggagaaggagaagagcgagctgaagatggagaccgacgacctgagcagcaacgccgaggccatcagcaaggccaagggcaacctggagaagatgtgcagaagcctggaggaccaggtgagcgagctgaagaccaaggaggaggagcagcagagactgatcaacgacctgaccgcccagagagccagactgcagaccgaggccggcgagtacagcagacagctggacgagaaggacgccctggtgagccagctgagcagaagcaagcaggccagcacccagcagatcgaggagctgaagcaccagctggaggaggagaccaaggccaagaacgccctggcccacgccctgcagagcagcagacacgactgcgacctgctgagagagcagtacgaggaggagcaggagggcaaggccgagctgcagagagccctgagcaaggccaacagcgaggtggcccagtggagaaccaagtacgagaccgacgccatccagagaaccgaggagctggaggaggccaagaagaagctggcccagagactgcaggaggccgaggagcacgtggaggccgtgaacgccaagtgcgccagcctggagaagaccaagcagagactgcagaacgaggtggaggacctgatgctggacgtggagagaagcaacgccgcctgcgccgccctggacaagaagcagagaaacttcgacaaggtgctgagcgagtggaagcagaagtacgaggagacccaggccgagctggaggccagccagaaggagagcagaagcctgagcaccgagctgttcaaggtgaagaacgtgtacgaggagagcctggaccagctggagaccctgagaagagagaacaagaacctgcagcaggagatcagcgacctgaccgagcagatcgccgagggcggcaagcagatccacgagctggagaagatcaagaagcaggtggagcaggagaagtgcgagatccaggccgccctggaggaggccgaggccagcctggagcacgaggagggcaagatcctgagaatccagctggagctgaaccaggtgaagagcgaggtggacagaaagatcgccgagaaggacgaggagatcgaccagctgaagagaaaccacaccagagtggtggagaccatgcagagcaccctggacgccgagatcagaagcagaaacgacgccctgagagtgaagaagaagatggagggcgacctgaacgagatggagatccagctgaaccacgccaacagactggccgccgagagcctgagaaactacagaaacacccagggcatcctgaaggagacccagctgcacctggacgacgccctgagaggccaggaggacctgaaggagcagctggccatcgtggagagaagagccaacctgctgcaggccgagatcgaggagctgtgggccaccctggagcagaccgagagaagcagaaagatcgccgagcaggagctgctggacgccagcgagagagtgcagctgctgcacacccagaacaccagcctgatcaacaccaagaagaagctggagaacgacgtgagccagctgcagagcgaggtggaggaggtgatccaggagagcagaaacgccgaggagaaggccaagaaggccatcaccgacgccgccatgatggccgaggagctgaagaaggagcaggacaccagcgcccacctggagagaatgaagaagaacctggagcagaccgtgaaggacctgcagcacagactggacgaggccgagcagctggccctgaagggcggcaagaagcagatccagaagctggaggccagagtgagagagctggagggcgaggtggagaacgagcagaagagaaacgccgaggccgtgaagggcctgagaaagcacgagagaagagtgaaggagctgacctaccagaccgaggaggacagaaagaacgtgctgagactgcaggacctggtggacaagctgcaggccaaggtgaagagctacaagagacaggccgaggaggccgaggagcagagcaacgccaacctgagcaagttcagaaagctgcagcacgagctggaggaggccgaggagagagccgacatcgccgagagccaggtgaacaagctgagagtgaagagcagagaggtgcacaccaagatcagcgccgagtag

SEQ ID NO: 129067 - protein, 1960 aa, Artificial Sequence
  derived and/or modified sequence
MAQQAADKYLYVDKNFINNPLAQADWAAKKLVWVPSDKSGFEPASLKEEVGEEAIVELVENGKKVKVNKDDIQKMNPPKFSKVEDMAELTCLNEASVLHNLKERYYSGLIYTYSGLFCVVINPYKNLPIYSEEIVEMYKGKKRHEMPPHIYAITDTAYRSMMQDREDQSILCTGESGAGKTENTKKVIQYLAYVASSHKSKKDQGELERQLLQANPILEAFGNAKTVKNDNSSRFGKFIRINFDVNGYIVGANIETYLLEKSRAIRQAKEERTFHIFYYLLSGAGEHLKTDLLLEPYNKYRFLSNGHVTIPGQQDKDMFQETMEAMRIMGIPEEEQMGLLRVISGVLQLGNIVFKKERNTDQASMPDNTAAQKVSHLLGINVTDFTRGILTPRIKVGRDYVQKAQTKEQADFAIEALAKATYERMFRWLVLRINKALDKTKRQGASFIGILDIAGFEIFDLNSFEQLCINYTNEKLQQLFNHTMFILEQEEYQREGIEWNFIDFGLDLQPCIDLIEKPAGPPGILALLDEECWFPKATDKSFVEKVMQEQGTHPKFQKPKQLKDKADFCIIHYAGKVDYKADEWLMKNMDPLNDNIATLLHQSSDKFVSELWKDVDRIIGLDQVAGMSETALPGAFKTRKGMFRTVGQLYKEQLAKLMATLRNTNPNFVRCIIPNHEKKAGKLDPHLVLDQLRCNGVLEGIRICRQGFPNRVVFQEFRQRYEILTPNSIPKGFMDGKQACVLMIKALELDSNLYRIGQSKVFFRAGVLAHLEEERDLKITDVIIGFQACCRGYLARKAFAKRQQQLTAMKVLQRNCAAYLKLRNWQWWRLFTKVKPLLQVSRQEEEMMAKEEELVKVREKQLAAENRLTEMETLQSQLMAEKLQLQEQLQAETELCAEAEELRARLTAKKQELEEICHDLEARVEEEEERCQHLQAEKKKMQQNIQELEEQLEEEESARQKLQLEKVTTEAKLKKLEEEQIILEDQNCKLAKEKKLLEDRIAEFTTNLTEEEEKSKSLAKLKNKHEAMITDLEERLRREEKQRQELEKTRRKLEGDSTDLSDQIAELQAQIAELKMQLAKKEEELQAALARVEEEAAQKNMALKKIRELESQISELQEDLESERASRNKAEKQKRDLGEELEALKTELEDTLDSTAAQQELRSKREQEVNILKKTLEEEAKTHEAQIQEMRQKHSQAVEELAEQLEQTKRVKANLEKAKQTLENERGELANEVKVLLQGKGDSEHKRKKVEAQLQELQVKFNEGERVRTELADKVTKLQVELDNVTGLLSQSDSKSSKLTKDFSALESQLQDTQELLQEENRQKLSLSTKLKQVEDEKNSFREQLEEEEEAKHNLEKQIATLHAQVADMKKKMEDSVGCLETAEEVKRKLQKDLEGLSQRHEEKVAAYDKLEKTKTRLQQELDDLLVDLDHQRQSACNLEKKQKKFDQLLAEEKTISAKYAEERDRAEAEAREKETKALSLARALEEAMEQKAELERLNKQFRTEMEDLMSSKDDVGKSVHELEKSKRALEQQVEEMKTQLEELEDELQATEDAKLRLEVNLQAMKAQFERDLQGRDEQSEEKKKQLVRQVREMEAELEDERKQRSMAVAARKKLEMDLKDLEAHIDSANKNRDEAIKQLRKLQAQMKDCMRELDDTRASREEILAQAKENEKKLKSMEAEMIQLQEELAAAERAKRQAQQERDELADEIANSSGKGALALEEKRRLEARIAQLEEELEEEQGNTELINDRLKKANLQIDQINTDLNLERSHAQKNENARQQLERQNKELKVKLQEMEGTVKSKYKASITALEAKIAQLEEQLDNETKERQAACKQVRRTEKKLKDVLLQVDDERRNAEQYKDQADKASTRLKQLKRQLEEAEEEAQRANASRRKLQRELEDATETADAMNREVSSLKNKLRRGDLPFVVPRRMARKGAGDGSDEEVDGKADGAEAKPAE

SEQ ID NO: 129068 - protein, 1382 aa, Artificial Sequence
  derived and/or modified sequence
MYKGKKRHEMPPHIYAITDTAYRSMMQDREDQSILCTGESGAGKTENTKKVIQYLAYVASSHKSKKDQGELERQLLQANPILEAFGNAKTVKNDNSSRFGKFIRINFDVNGYIVGANIETYLLEKSRAIRQAKEERTFHIFYYLLSGAGEHLKTDLLLEPYNKYRFLSNGHVTIPGQQDKDMFQETMEAMRIMGIPEEEQMGLLRVISGVLQLGNIVFKKERNTDQASMPDNTAAQKVSHLLGINVTDFTRGILTPRIKVGRDYVQKAQTKEQADFAIEALAKATYERMFRWLVLRINKALDKTKRQGASFIGILDIAGFEIFDLNSFEQLCINYTNEKLQQLFNHTMFILEQEEYQREGIEWNFIDFGLDLQPCIDLIEKPAGPPGILALLDEECWFPKATDKSFVEKVMQEQGTHPKFQKPKQLKDKADFCIIHYAGKVDYKADEWLMKNMDPLNDNIATLLHQSSDKFVSELWKDVDRIIGLDQVAGMSETALPGAFKTRKGMFRTVGQLYKEQLAKLMATLRNTNPNFVRCIIPNHEKKAGKLDPHLVLDQLRCNGVLEGIRICRQGFPNRVVFQEFRQRYEILTPNSIPKGFMDGKQACVLMIKALELDSNLYRIGQSKVFFRAGVLAHLEEERDLKITDVIIGFQACCRGYLARKAFAKRQQQLTAMKVLQRNCAAYLKLRNWQWWRLFTKVKPLLQVSRQEEEMMAKEEELVKVREKQLAAENRLTEMETLQSQLMAEKLQLQEQLQAETELCAEAEELRARLTAKKQELEEICHDLEARVEEEEERCQHLQAEKKKMQQNIQELEEQLEEEESARQKLQLEKVTTEAKLKKLEEELDDLLVDLDHQRQSACNLEKKQKKFDQLLAEEKTISAKYAEERDRAEAEAREKETKALSLARALEEAMEQKAELERLNKQFRTEMEDLMSSKDDVGKSVHELEKSKRALEQQVEEMKTQLEELEDELQATEDAKLRLEVNLQAMKAQFERDLQGRDEQSEEKKKQLVRQVREMEAELEDERKQRSMAVAARKKLEMDLKDLEAHIDSANKNRDEAIKQLRKLQAQMKDCMRELDDTRASREEILAQAKENEKKLKSMEAEMIQLQEELAAAERAKRQAQQERDELADEIANSSGKGALALEEKRRLEARIAQLEEELEEEQGNTELINDRLKKANLQIDQINTDLNLERSHAQKNENARQQLERQNKELKVKLQEMEGTVKSKYKASITALEAKIAQLEEQLDNETKERQAACKQVRRTEKKLKDVLLQVDDERRNAEQYKDQADKASTRLKQLKRQLEEAEEEAQRANASRRKLQRELEDATETADAMNREVSSLKNKLRRGDLPFVVPRRMARKGAGDGSDEEVDGKADGAEAKPAE

SEQ ID NO: 129069 - protein, 562 aa, Artificial Sequence
  derived and/or modified sequence
ASGTRRRWPPTTSWRRPRRGCSRSWTTCWWTWTTSARARATWRRSRRSLTSSWRRRRPSLPSMQRSATGLRRRPERRRPRLCRWPGPEEAMEQKAELERLNKQFRTEMEDLMSSKDDVGKSVHELEKSKRALEQQVEEMKTQLEELEDELQATEDAKLRLEVNLQAMKAQFERDLQGRDEQSEEKKKQLVRQVREMEAELEDERKQRSMAVAARKKLEMDLKDLEAHIDSANKNRDEAIKQLRKLQAQMKDCMRELDDTRASREEILAQAKENEKKLKSMEAEMIQLQEELAAAERAKRQAQQERDELADEIANSSGKGALALEEKRRLEARIAQLEEELEEEQGNTELINDRLKKANLQIDQINTDLNLERSHAQKNENARQQLERQNKELKVKLQEMEGTVKSKYKASITALEAKIAQLEEQLDNETKERQAACKQVRRTEKKLKDVLLQVDDERRNAEQYKDQADKASTRLKQLKRQLEEAEEEAQRANASRRKLQRELEDATETADAMNREVSSLKNKLRRGDLPFVVPRRMARKGAGDGSDEEVDGKADGAEAKPAE

SEQ ID NO: 129070 - protein, 218 aa, Artificial Sequence
  derived and/or modified sequence
MAQQAADKYLYVDKNFINNPLAQADWAAKKLVWVPSDKSGFEPASLKEEVGEEAIVELVENGKKVKVNKDDIQKMNPPKFSKVEDMAELTCLNEASVLHNLKERYYSGLIYTYSGLFCVVINPYKNLPIYSEEIVEMYKGKKRHEMPPHIYAITDTAYRSMMQDREDQSILCTGESGAGKTENTKKVIQYLAYVASSHKSKKDQEAYFKNRAVRLGVL

SEQ ID NO: 129071 - protein, 103 aa, Artificial Sequence
  derived and/or modified sequence
MAQQAADKYLYVDKNFINNPLAQADWAAKKLVWVPSDKSGFEPASLKEEVGEEAIVELVENGKKVKVNKDDIQKMNPPKFSKVEDMAELTCLNEASVLHNLKE

SEQ ID NO: 129072 - DNA, 5883 bp, Artificial Sequence
  derived and/or modified sequence
atggcccagcaggccgccgacaagtacctgtacgtggacaagaacttcatcaacaaccccctggcccaggccgactgggccgccaagaagctggtgtgggtgcccagcgacaagagcggcttcgagcccgccagcctgaaggaggaggtgggcgaggaggccatcgtggagctggtggagaacggcaagaaggtgaaggtgaacaaggacgacatccagaagatgaacccccccaagttcagcaaggtggaggacatggccgagctgacctgcctgaacgaggccagcgtgctgcacaacctgaaggagagatactacagcggcctgatctacacctacagcggcctgttctgcgtggtgatcaacccctacaagaacctgcccatctacagcgaggagatcgtggagatgtacaagggcaagaagagacacgagatgcccccccacatctacgccatcaccgacaccgcctacagaagcatgatgcaggacagagaggaccagagcatcctgtgcaccggcgagagcggcgccggcaagaccgagaacaccaagaaggtgatccagtacctggcctacgtggccagcagccacaagagcaagaaggaccagggcgagctggagagacagctgctgcaggccaaccccatcctggaggccttcggcaacgccaagaccgtgaagaacgacaacagcagcagattcggcaagttcatcagaatcaacttcgacgtgaacggctacatcgtgggcgccaacatcgagacctacctgctggagaagagcagagccatcagacaggccaaggaggagagaaccttccacatcttctactacctgctgagcggcgccggcgagcacctgaagaccgacctgctgctggagccctacaacaagtacagattcctgagcaacggccacgtgaccatccccggccagcaggacaaggacatgttccaggagaccatggaggccatgagaatcatgggcatccccgaggaggagcagatgggcctgctgagagtgatcagcggcgtgctgcagctgggcaacatcgtgttcaagaaggagagaaacaccgaccaggccagcatgcccgacaacaccgccgcccagaaggtgagccacctgctgggcatcaacgtgaccgacttcaccagaggcatcctgacccccagaatcaaggtgggcagagactacgtgcagaaggcccagaccaaggagcaggccgacttcgccatcgaggccctggccaaggccacctacgagagaatgttcagatggctggtgctgagaatcaacaaggccctggacaagaccaagagacagggcgccagcttcatcggcatcctggacatcgccggcttcgagatcttcgacctgaacagcttcgagcagctgtgcatcaactacaccaacgagaagctgcagcagctgttcaaccacaccatgttcatcctggagcaggaggagtaccagagagagggcatcgagtggaacttcatcgacttcggcctggacctgcagccctgcatcgacctgatcgagaagcccgccggcccccccggcatcctggccctgctggacgaggagtgctggttccccaaggccaccgacaagagcttcgtggagaaggtgatgcaggagcagggcacccaccccaagttccagaagcccaagcagctgaaggacaaggccgacttctgcatcatccactacgccggcaaggtggactacaaggccgacgagtggctgatgaagaacatggaccccctgaacgacaacatcgccaccctgctgcaccagagcagcgacaagttcgtgagcgagctgtggaaggacgtggacagaatcatcggcctggaccaggtggccggcatgagcgagaccgccctgcccggcgccttcaagaccagaaagggcatgttcagaaccgtgggccagctgtacaaggagcagctggccaagctgatggccaccctgagaaacaccaaccccaacttcgtgagatgcatcatccccaaccacgagaagaaggccggcaagctggacccccacctggtgctggaccagctgagatgcaacggcgtgctggagggcatcagaatctgcagacagggcttccccaacagagtggtgttccaggagttcagacagagatacgagatcctgacccccaacagcatccccaagggcttcatggacggcaagcaggcctgcgtgctgatgatcaaggccctggagctggacagcaacctgtacagaatcggccagagcaaggtgttcttcagagccggcgtgctggcccacctggaggaggagagagacctgaagatcaccgacgtgatcatcggcttccaggcctgctgcagaggctacctggccagaaaggccttcgccaagagacagcagcagctgaccgccatgaaggtgctgcagagaaactgcgccgcctacctgaagctgagaaactggcagtggtggagactgttcaccaaggtgaagcccctgctgcaggtgagcagacaggaggaggagatgatggccaaggaggaggagctggtgaaggtgagagagaagcagctggccgccgagaacagactgaccgagatggagaccctgcagagccagctgatggccgagaagctgcagctgcaggagcagctgcaggccgagaccgagctgtgcgccgaggccgaggagctgagagccagactgaccgccaagaagcaggagctggaggagatctgccacgacctggaggccagagtggaggaggaggaggagagatgccagcacctgcaggccgagaagaagaagatgcagcagaacatccaggagctggaggagcagctggaggaggaggagagcgccagacagaagctgcagctggagaaggtgaccaccgaggccaagctgaagaagctggaggaggagcagatcatcctggaggaccagaactgcaagctggccaaggagaagaagctgctggaggacagaatcgccgagttcaccaccaacctgaccgaggaggaggagaagagcaagagcctggccaagctgaagaacaagcacgaggccatgatcaccgacctggaggagagactgagaagagaggagaagcagagacaggagctggagaagaccagaagaaagctggagggcgacagcaccgacctgagcgaccagatcgccgagctgcaggcccagatcgccgagctgaagatgcagctggccaagaaggaggaggagctgcaggccgccctggccagagtggaggaggaggccgcccagaagaacatggccctgaagaagatcagagagctggagagccagatcagcgagctgcaggaggacctggagagcgagagagccagcagaaacaaggccgagaagcagaagagagacctgggcgaggagctggaggccctgaagaccgagctggaggacaccctggacagcaccgccgcccagcaggagctgagaagcaagagagagcaggaggtgaacatcctgaagaagaccctggaggaggaggccaagacccacgaggcccagatccaggagatgagacagaagcacagccaggccgtggaggagctggccgagcagctggagcagaccaagagagtgaaggccaacctggagaaggccaagcagaccctggagaacgagagaggcgagctggccaacgaggtgaaggtgctgctgcagggcaagggcgacagcgagcacaagagaaagaaggtggaggcccagctgcaggagctgcaggtgaagttcaacgagggcgagagagtgagaaccgagctggccgacaaggtgaccaagctgcaggtggagctggacaacgtgaccggcctgctgagccagagcgacagcaagagcagcaagctgaccaaggacttcagcgccctggagagccagctgcaggacacccaggagctgctgcaggaggagaacagacagaagctgagcctgagcaccaagctgaagcaggtggaggacgagaagaacagcttcagagagcagctggaggaggaggaggaggccaagcacaacctggagaagcagatcgccaccctgcacgcccaggtggccgacatgaagaagaagatggaggacagcgtgggctgcctggagaccgccgaggaggtgaagagaaagctgcagaaggacctggagggcctgagccagagacacgaggagaaggtggccgcctacgacaagctggagaagaccaagaccagactgcagcaggagctggacgacctgctggtggacctggaccaccagagacagagcgcctgcaacctggagaagaagcagaagaagttcgaccagctgctggccgaggagaagaccatcagcgccaagtacgccgaggagagagacagagccgaggccgaggccagagagaaggagaccaaggccctgagcctggccagagccctggaggaggccatggagcagaaggccgagctggagagactgaacaagcagttcagaaccgagatggaggacctgatgagcagcaaggacgacgtgggcaagagcgtgcacgagctggagaagagcaagagagccctggagcagcaggtggaggagatgaagacccagctggaggagctggaggacgagctgcaggccaccgaggacgccaagctgagactggaggtgaacctgcaggccatgaaggcccagttcgagagagacctgcagggcagagacgagcagagcgaggagaagaagaagcagctggtgagacaggtgagagagatggaggccgagctggaggacgagagaaagcagagaagcatggccgtggccgccagaaagaagctggagatggacctgaaggacctggaggcccacatcgacagcgccaacaagaacagagacgaggccatcaagcagctgagaaagctgcaggcccagatgaaggactgcatgagagagctggacgacaccagagccagcagagaggagatcctggcccaggccaaggagaacgagaagaagctgaagagcatggaggccgagatgatccagctgcaggaggagctggccgccgccgagagagccaagagacaggcccagcaggagagagacgagctggccgacgagatcgccaacagcagcggcaagggcgccctggccctggaggagaagagaagactggaggccagaatcgcccagctggaggaggagctggaggaggagcagggcaacaccgagctgatcaacgacagactgaagaaggccaacctgcagatcgaccagatcaacaccgacctgaacctggagagaagccacgcccagaagaacgagaacgccagacagcagctggagagacagaacaaggagctgaaggtgaagctgcaggagatggagggcaccgtgaagagcaagtacaaggccagcatcaccgccctggaggccaagatcgcccagctggaggagcagctggacaacgagaccaaggagagacaggccgcctgcaagcaggtgagaagaaccgagaagaagctgaaggacgtgctgctgcaggtggacgacgagagaagaaacgccgagcagtacaaggaccaggccgacaaggccagcaccagactgaagcagctgaagagacagctggaggaggccgaggaggaggcccagagagccaacgccagcagaagaaagctgcagagagagctggaggacgccaccgagaccgccgacgccatgaacagagaggtgagcagcctgaagaacaagctgagaagaggcgacctgcccttcgtggtgcccagaagaatggccagaaagggcgccggcgacggcagcgacgaggaggtggacggcaaggccgacggcgccgaggccaagcccgccgagtag

SEQ ID NO: 129073 - DNA, 5883 bp, Artificial Sequence
  derived and/or modified sequence
atggctcagcaagcagccgataaatacctgtatgtggataagaactttattaacaaccctctggctcaggctgattgggcagccaagaaactcgtttgggtgccaagcgacaaatccgggttcgaaccagcatcactcaaagaagaggttggtgaggaggcaatcgtcgagctcgtggaaaacgggaaaaaagtaaaggtgaataaagacgacattcagaaaatgaacccgcccaaatttagcaaggtcgaggacatggcagaactgacttgtttgaacgaggcctccgtcctgcacaatttgaaggaacgctattacagcggtctgatctatacatattcaggactgttttgtgtcgtgattaatccatacaagaatttgcctatttatagcgaagagattgtggagatgtacaaaggcaagaaacgccacgaaatgcctccacacatttacgccatcacagataccgcttatcggtctatgatgcaagaccgcgaggatcagtctatcctgtgtaccggcgaatctggggcaggaaagaccgaaaatactaagaaggtgattcagtatctggcatacgtcgcctcaagtcataaaagcaaaaaagatcagggagaactggaacggcagttattacaagcgaaccccatactcgaagccttcggaaatgctaagacagttaagaatgacaactccagtcgttttggtaagttcatacgcatcaatttcgacgtgaatggctatattgtgggcgccaacattgaaacatatctcttagaaaagagccgggcgattcggcaagctaaggaggagagaactttccacatcttttattatttactctcgggagccggagagcacctgaagacagaccttctactggagccctacaacaagtacaggttcctgtccaacgggcacgtcacaatcccggggcagcaagataaagacatgttccaagagacgatggaggccatgaggattatgggtattcccgaggaggaacagatgggcctgctgagagtgatcagcggagtcttacagttgggcaatattgtgttcaaaaaagagcgtaacactgaccaggcctctatgcctgataataccgcagcccagaaggtgtctcatctgctgggcatcaatgtcaccgacttcactagagggatcctgacgccgcgaattaaggtcggccgggattatgtccagaaagcccaaacaaaggagcaggctgactttgcgatcgaggccctagctaaagccacatacgaacgcatgttcaggtggcttgtgttgcgcattaacaaagcgctcgataaaacgaaacggcaaggcgcctcctttataggcatcttggatatagctggattcgagatcttcgatcttaattcgtttgagcagttgtgcatcaattatactaacgagaagttacagcagctttttaatcatactatgttcatcctggagcaggaggagtaccagcgcgaggggattgaatggaactttattgattttggcctcgacctacagccttgtatcgatttaatagagaagcccgctggccccccagggatcctcgcattgctggacgaggaatgctggttcccaaaggccacagacaagtccttcgtagagaaagttatgcaggagcagggaactcatccaaaattccaaaagcccaaacagctgaaagacaaagcagatttttgtattattcattacgccgggaaagttgattataaagccgacgaatggcttatgaagaatatggacccacttaacgacaacatcgcgacactgttacaccagagcagcgacaagtttgtgagtgaactgtggaaggatgtggaccgcattatcgggctggaccaggttgcagggatgagcgagactgccctgcccggtgcctttaagacaaggaaaggtatgttcagaacggtgggccaactgtataaggagcagctcgctaaattgatggcgacgctgcgtaacactaatccaaatttcgttagatgcataatacctaatcacgagaagaaggccggaaaactggacccccatctggtacttgatcagcttagatgtaacggagttctggaaggaataagaatatgtcgtcagggatttccaaaccgggtggtgtttcaggagttcagacaaaggtatgagattcttacacccaacagcattccaaaagggttcatggatggcaaacaagcctgtgtgctgatgatcaaagccttggaactggatagcaacctgtacagaattgggcagtcaaaggtatttttccgggccggcgtattagcccacctggaagaagaacgtgatctgaagattaccgacgtcatcattgggttccaagcttgctgcagaggatacctggcgagaaaagcctttgcaaagcggcaacagcagctgacagctatgaaggtgctgcagagaaattgcgccgcttatctcaagcttcgaaactggcaatggtggagactgtttactaaggtgaaacctctcttacaggtcagtagacaagaggaagaaatgatggccaaggaggaagagctggtgaaggtgcgcgaaaagcaactcgcggccgagaacaggctgaccgagatggagaccctgcaaagccagctgatggcagagaagctgcagctccaagaacagctgcaggcggaaaccgaactctgtgccgaggccgaggaacttcgcgcacgacttaccgccaagaagcaagagctggaggagatttgccacgatctcgaggccagggtggaggaggaggaagagcgctgtcaacacttgcaggctgaaaaaaagaaaatgcaacagaacatccaggagcttgaagagcagttggaggaggaggaatctgcaagacagaaactgcagttggagaaagttaccacagaagccaagttaaagaagctggaagaagagcagattatcctcgaggaccaaaattgcaagttggctaaggaaaagaaactgctggaggaccggattgctgagtttaccacaaacctaaccgaagaggaagagaagtccaaaagtctcgccaaattgaaaaataaacacgaagctatgattactgacctggaggaaaggttgaggcgagaagaaaagcaacggcaggaactggagaaaacacgacgaaagctggaaggcgactccaccgacttatcagaccaaatagccgagttacaggctcagattgcggagcttaagatgcagctcgccaaaaaagaggaggaactccaagccgcattggctagagttgaggaagaagccgcacagaaaaacatggcgctgaagaagatcagagaattggagagtcagatcagcgagctgcaagaggacctggagtcggagcgcgcttccaggaacaaagctgagaaacaaaagcgtgacttaggggaggagttagaggctctgaagacagaactcgaagacacgttagacagcactgctgcccagcaggaattgcgctccaagagagaacaggaggtgaacatcctgaaaaagaccttggaggaggaggcaaagactcatgaagcccagatacaggagatgcgacagaagcattcccaggctgtcgaggaacttgccgaacagctagagcagaccaaaagagtgaaagccaacctggagaaggctaaacagacactggagaacgagagaggagaactcgctaatgaggtgaaagtgctcctgcaaggaaaaggcgatagtgagcacaagagaaagaaagtggaggcccagcttcaagaactgcaggttaaatttaacgaaggggagcgcgtcaggactgaacttgccgacaaggtgactaagcttcaagttgagcttgacaacgtgaccgggctcttgtcccagtcagactctaaaagctcaaaactgaccaaggatttctccgcgttggaatctcagttgcaagatactcaggagctccttcaggaggaaaatcgccagaaactcagcctgtccacaaaactcaaacaggttgaggatgagaaaaattcatttcgggaacagctagaagaagaggaggaggccaaacataatcttgaaaagcagattgctaccttacatgcccaggtggccgatatgaagaagaagatggaagactctgtaggatgtctagaaacggctgaagaggtgaagcggaaattacaaaaggacttggaaggactgagccagcgtcacgaagaaaaggtcgctgcgtacgacaagctcgagaagacaaagaccagactgcagcaagagttggacgacttgctggtggacctggatcaccagaggcagtccgcatgcaacctagaaaagaaacaaaaaaagtttgatcagctgctggcggaagaaaagactattagcgccaagtatgctgaggaacgcgatcgcgccgaagctgaggctcgtgagaaggagaccaaagccctatcactagcccgggcccttgaagaggcgatggagcaaaaggcggaactcgaaaggctcaataaacaatttcgcacagagatggaggatttgatgagttcaaaagacgacgtaggcaagagcgttcatgaattggaaaagtctaagcgagccctggagcagcaagttgaagagatgaagacgcagctggaggaactagaggatgagctccaggctaccgaagatgccaagctgcgcctggaagtgaacctgcaggcaatgaaggctcagttcgagcgggatctacagggaagagatgaacaatccgaggagaagaaaaagcagttggtgcgccaggtgagggagatggaggccgagctcgaagacgagaggaagcagaggagtatggctgtggccgcaaggaagaagctggaaatggatcttaaggacttggaagcacatattgatagcgctaataagaacagggatgaggcaatcaagcagcttcgcaaactccaggcccagatgaaggactgtatgagggaactagacgacacaagggcttcacgcgaggagatccttgcacaggctaaggagaatgaaaagaagctcaaatcaatggaagcggagatgattcagctccaggaagaattagctgcagccgagcgagctaagcgacaggcacagcaggagcgtgacgagttggcggatgagatcgcgaacagttcgggtaaaggagccctcgccctggaagagaagaggcgtctggaggccaggatcgcgcaactggaggaagaactcgaagaagagcaaggcaacactgagttgattaacgatcggttgaaaaaggcaaacctgcaaatagaccagattaatacagatttgaacttagagagatcccacgcacagaagaatgagaatgctcgtcagcagttagagagacagaataaggagctgaaagtaaaactgcaggaaatggagggaacagttaagtccaaatataaagctagcatcaccgccctcgaagccaagatcgcccagctcgaggagcagctcgacaatgagaccaaggagagacaggctgcctgtaaacaggtcagaagaaccgaaaagaaacttaaagacgtgcttctgcaggttgatgatgaacgcagaaatgccgaacaatataaggaccaggctgataaagcctccactcggctgaagcagttgaaacgccagctggaggaggccgaggaggaagctcagcgagcaaacgcctccaggagaaagctccagcgagaattggaggacgctaccgagacggctgacgctatgaatcgggaagtcagttcattgaaaaataaattgaggcgaggcgatttgcccttcgtcgtaccaagaagaatggctaggaagggagccggagatggttctgacgaggaagtcgacgggaaagccgacggagcggaggccaaacctgcagagtag

SEQ ID NO: 129074 - DNA, 5883 bp, Artificial Sequence
  derived and/or modified sequence
atggcccagcaggccgctgacaagtacctgtatgtggacaagaacttcatcaacaaccccctggcccaggccgactgggccgccaagaagctggtgtgggtgcccagcgacaagagcggctttgagcccgccagcctgaaggaggaggtgggggaggaggccatcgtggagctggtggagaatggcaagaaggtgaaggtgaacaaggatgacatccagaagatgaacccccccaagttcagcaaggtggaggacatggccgagctgacctgcctgaatgaggcctctgtgctgcacaacctgaaggagcgctactacagcggcctcatctacacctacagcggcctcttctgtgtggtgatcaacccctacaagaacctgcccatctacagcgaggagatcgtggagatgtacaagggcaagaagagacatgagatgccaccccacatctatgccatcacagacacagcctaccgctccatgatgcaggaccgggaggaccagagcatcctgtgcacaggagagagcggggccggcaagacagagaacaccaagaaggtgatccagtacctggcctacgtggccagcagccacaagagcaagaaggaccagggcgagctggagcggcagctgctgcaggccaaccccatcctggaggcctttggaaatgccaagacagtgaagaatgacaacagcagcagatttgggaagttcatccgcatcaactttgatgtgaatggctacatcgtgggcgccaacatcgagacctacctgctggagaagagccgggccatccggcaggccaaggaggagaggaccttccacatcttctactacctgctgagcggggccggggagcacctgaagacagacctgctgctggagccctacaacaagtaccgcttcctgagcaatggacatgtgaccatccctggccagcaggacaaggacatgttccaggagaccatggaggccatgaggatcatgggcatccctgaggaggagcagatgggcctgctgcgggtcatcagcggcgtgctgcagctgggcaacatcgtgttcaagaaggagaggaacacagaccaggcctccatgccagacaacacagctgcccagaaggtgagccacctgctgggcatcaacgtgacagacttcacccggggcatcctgaccccccgcatcaaggtgggccgggactatgtgcagaaggcccagaccaaggagcaggccgactttgccatcgaggccctggccaaggccacctatgaaagaatgttccgctggctggtgctgcgcatcaacaaggccctggacaagaccaagaggcagggcgccagcttcatcggcatcctggacattgctggctttgagatctttgacctgaacagctttgagcagctgtgcatcaactacaccaatgagaagctgcagcagctgttcaaccacaccatgttcatcctggagcaggaggagtaccagcgggagggcatcgagtggaacttcatcgactttggcctggacctgcagccctgcatcgacctgattgagaagccagctggccccccaggcatcctggccctgctggatgaggagtgctggttccccaaggccacagacaagagctttgtggagaaggtgatgcaggagcagggcacccaccccaagttccagaagcccaagcagctgaaggacaaggctgacttctgcatcatccactacgccggcaaggtggactacaaggcagatgagtggctgatgaagaacatggaccccctgaatgacaacatcgccaccctgctgcaccagagcagtgacaagtttgtgtctgagctgtggaaggatgtggaccgcatcatcggcctggaccaggtggccggcatgtctgaaacagccctgcccggggccttcaagaccaggaagggcatgttcagaacagtgggccagctgtacaaggagcagctggccaagctgatggccaccctgaggaacaccaaccccaactttgtgcgctgcatcatccccaaccacgagaagaaggccggcaagctggacccccacctggtgctggaccagctgcgctgcaatggagtgctggagggcatccgcatctgccggcagggcttccccaacagagtggtgttccaggagttccggcagagatatgagatcctgacccccaacagcatccccaagggcttcatggatggcaagcaggcctgtgtgctgatgatcaaggccctggagctggacagcaacctgtaccgcatcggccagagcaaggtgttcttccgggccggcgtgctggcccacctggaggaggagcgggacctgaagatcacagatgtgatcatcggcttccaggcctgctgccggggctacctggccaggaaggcctttgccaagaggcagcagcagctgacagccatgaaggtgctgcagaggaactgtgccgcctacctgaagctgaggaactggcagtggtggaggctcttcaccaaggtgaagcccctgctgcaggtgtcccggcaggaggaggagatgatggccaaggaggaggagctggtgaaggtgcgggagaagcagctggccgcagaaaatcggctgacagagatggagaccctgcagagccagctgatggccgagaagctgcagctgcaggagcagctgcaggccgagacagagctgtgtgccgaggccgaggagctgcgggcccggctgacagccaagaagcaggagctggaggagatctgccacgacctggaggcccgggtggaggaggaggaggagcgctgccagcacctgcaggccgagaagaagaagatgcagcagaacatccaggagctggaggagcagctggaggaggaggagagcgcccggcagaagctgcagctggagaaggtgaccacagaggccaagctgaagaagctggaggaggagcagatcatcctggaggaccagaactgcaagctggccaaggagaagaagctgctggaggacagaattgctgagttcaccaccaacctgacagaggaggaggagaagagcaagagcctggccaagctgaagaacaagcatgaggccatgatcacagacctggaggagcggctgcggcgggaggagaagcagaggcaggagctggagaagaccaggaggaagctggagggggacagcacagacctgagtgaccagattgctgagctgcaggcccagattgctgagctgaagatgcagctggccaagaaggaggaggagctgcaggccgccctggcccgggtggaggaggaggccgcccagaagaacatggccctgaagaagatccgggagctggagagccagatcagcgagctgcaggaggacctggagagcgagcgggccagcaggaacaaggccgagaagcagaagagggacctgggggaggagctggaggccctgaagacagagctggaggacaccctggacagcacagctgcccagcaggagctgcggagcaagcgggagcaggaggtgaacatcctgaagaagaccctggaggaggaggccaagacccatgaggcccagatccaggagatgaggcagaagcacagccaggccgtggaggagctggccgagcagctggagcagaccaagagggtgaaggccaacctggagaaggccaagcagaccctggagaatgaaagaggagagctggccaatgaggtgaaggtgctgctgcagggcaagggggacagcgagcacaagaggaagaaggtggaggcccagctgcaggagctgcaggtgaagttcaatgaaggagagcgggtgaggacagagctggccgacaaggtgaccaagctgcaggtggagctggacaacgtgacaggcctgctgagccagagcgacagcaagagcagcaagctgaccaaggacttcagcgccctggagagccagctgcaggacacccaggagctgctgcaggaggagaaccggcagaagctgagcctgagcaccaagctgaagcaggtggaggatgagaagaacagcttccgggagcagctggaggaggaggaggaggccaagcacaacctggagaagcagatcgccaccctgcacgcccaggtggccgacatgaagaagaagatggaggacagcgtgggctgcctggagacagctgaggaggtgaagaggaagctgcagaaggacctggagggcctgagccagagacatgaggagaaggtggccgcctatgacaagctggagaagaccaagacccggctgcagcaggagctggatgacctgctggtggacctggaccaccagaggcagagcgcctgcaacctggagaagaagcagaagaagtttgaccagctgctggccgaggagaagaccatcagcgccaagtatgcagaggagcgggacagagctgaggccgaggcccgggagaaggagaccaaggccctgagcctggcccgggccctggaggaggccatggagcagaaggccgagctggagcggctgaacaagcagttcagaacagagatggaggacctgatgagcagcaaggatgatgtgggcaagtctgtgcatgagctggagaagagcaagagggccctggagcagcaggtggaggagatgaagacccagctggaggagctggaggatgagctgcaggccacagaagatgccaagctgcggctggaggtgaacctgcaggccatgaaggcccagtttgagcgggacctgcagggcagagatgagcagagcgaggagaagaagaagcagctggtgcggcaggtgcgggagatggaggccgagctggaggatgagaggaagcagaggtccatggctgtggccgccaggaagaagctggagatggacctgaaggacctggaggcccacatcgacagcgccaacaagaacagagatgaggccatcaagcagctgaggaagctgcaggcccagatgaaggactgcatgagggagctggatgacacccgggccagccgggaggagatcctggcccaggccaaggaaaatgagaagaagctgaagtccatggaggccgagatgatccagctgcaggaggagctggccgctgctgagcgggccaagaggcaggcccagcaggagagagatgagctggctgatgagatcgccaacagcagcggcaagggggccctggccctggaggagaagaggcggctggaggccagaattgcccagctggaggaggagctggaggaggagcagggcaacacagagctgatcaatgaccggctgaagaaggccaacctgcagattgaccagatcaacacagacctgaacctggagaggagccacgcccagaagaatgaaaatgcccggcagcagctggagcggcagaacaaggagctgaaggtgaagctgcaggagatggagggcaccgtgaagagcaagtacaaggccagcatcacagccctggaggccaagatcgcccagctggaggagcagctggacaatgagaccaaggagcggcaggccgcctgcaagcaggtgcggaggacagagaagaagctgaaggatgtgctgctgcaggtggatgatgaaagaagaaatgctgagcagtacaaggaccaggccgacaaggccagcacccggctgaagcagctgaagaggcagctggaggaggccgaggaggaggcccagagggccaatgccagcaggaggaagctgcagcgggagctggaggatgccacagaaacagcagatgccatgaaccgggaggtgagcagcctgaagaacaagctgcggcggggggacctgccctttgtggtgcccaggaggatggccaggaaaggagctggagatggcagtgatgaggaggtggatggcaaggcagatggagctgaggccaagccagctgagtag

SEQ ID NO: 129075 - DNA, 5883 bp, Artificial Sequence
  derived and/or modified sequence
atggcccagcaggccgccgacaagtacctgtacgtggacaagaactttataaataaccctctggctcaagctgattgggcggccaaaaagctggtgtgggtgcctagcgacaagtcaggtttcgaacctgccagccttaaggaagaagtgggagaggaggctatcgtggaactcgtggagaacggcaagaaggtgaaagtaaataaagacgacatacagaaaatgaatcctcccaagttcagtaaggttgaggacatggcggagttgacctgtctgaatgaggcaagcgtcttgcacaacctaaaagagaggtactatagcggcttaatctacacttattcagggctgttctgcgtggttatcaatccatacaaaaatcttccgatctactctgaggaaatcgtcgagatgtacaagggaaagaagcggcatgagatgccgccccacatctatgctataacagacactgcatacagaagtatgatgcaggaccgggaggaccaaagtatcctctgtactggcgagagcggcgcaggtaagacggaaaacaccaagaaggtgatccagtatctcgcatacgtcgcttcttcgcacaagtccaagaaggatcagggtgaattggagcgccaactgcttcaggctaatccaatattggaggcgtttgggaatgccaaaaccgtgaaaaatgataactcttctaggtttggtaaatttatccgcattaattttgatgtcaatggttacatagtaggagcaaatatagaaacctatctgctcgaaaaatctcgcgcaatccggcaggccaaagaagagaggaccttccacattttttattacctcctgtcaggggcaggcgagcatctgaagactgaccttttgctggaaccatacaataaatacagattcctcagcaacggccacgtaaccattcctggacagcaagataaggatatgttccaggagacaatggaagcaatgcgaattatgggcatacctgaggaagagcagatgggccttttacgagttatttctggggtattacagctgggtaacatcgtttttaagaaggagagaaatacagaccaggcgtcaatgcctgacaacaccgctgcccaaaaagtctcacatcttctgggcataaatgtgacagatttcacccggggaattcttacacctagaattaaggtgggacgggattatgtgcagaaggcccagactaaggagcaggccgattttgctatcgaggcactggcaaaagccacctacgaacggatgttccgctggctagtgcttagaattaataaagcgcttgataaaacaaagcgacagggagcatcttttatcgggatcctggacatcgcagggtttgagatttttgatttgaatagtttcgaacagctatgtattaactacacgaatgagaaattgcagcagctgtttaatcatacaatgttcatattagaacaggaggagtaccaacgggagggtatcgagtggaatttcatcgactttggtcttgatctgcagccatgcatcgacctaatcgagaaaccggccggcccaccaggaatcctggccctactggatgaggagtgttggtttcctaaagccaccgacaagtcttttgtcgaaaaggttatgcaggagcagggcacgcaccctaaatttcagaagcctaaacagctcaaagataaagctgacttctgtataatccactacgcgggcaaggtcgattataaggctgatgaatggttgatgaaaaacatggaccccctgaacgataacatagccactctactccatcagtccagtgacaagttcgtatccgagctttggaaggacgtcgaccggataatcgggctagaccaagtagctggaatgagtgagacggcactgccaggcgcattcaagacacgcaagggcatgtttaggacagtgggtcagttgtacaaagaacagctggccaagctgatggccacactccgaaataccaaccccaacttcgtacggtgcatcattcccaaccatgagaagaaagccggcaaactcgatccacacctggtccttgatcagctacggtgtaacggagtccttgagggtatccggatttgcagacagggctttcccaatagggtcgtgttccaggaatttcgacaaagatacgaaatcctgacccctaatagcatccctaaaggttttatggacgggaaacaggcatgcgtgttgatgattaaggcgcttgaactggatagcaacctttacaggatcggccagtccaaggtcttctttagagcaggggtcttggctcatctcgaggaggagcgcgatctgaagataaccgatgtgatcatcggattccaggcatgctgtcggggctatcttgcccgaaaggcttttgccaaaagacagcaacagctcaccgctatgaaggtcttgcaaaggaattgcgctgcctatctaaagcttcggaactggcagtggtggcggctgtttactaaagtgaaacccctcctacaggttagcagacaggaagaagagatgatggcgaaggaagaagagctggttaaggtgagggagaaacagctggccgctgagaatagattgacagagatggagacgctccagagtcagttgatggccgaaaagctccagttgcaggagcagttacaggccgagaccgagctgtgtgctgaggcagaagaattacgcgcccggctcacagcaaagaagcaggagctcgaggagatatgtcatgacttagaggctcgtgtggaggaagaagaggagcggtgccaacaccttcaggccgagaagaagaaaatgcagcaaaacattcaagagctcgaagaacaactggaagaagaggagtctgccagacaaaagctccagctggaaaaagtgaccaccgaggccaagctcaagaaactggaggaagagcagattatcctggaagaccagaactgcaagcttgcaaaagaaaaaaaattgctggaagatcgcattgctgagttcactaccaacttgacagaggaagaggagaaatccaagtctcttgcaaagctcaaaaacaagcacgaggctatgatcactgacctggaggaaaggctccggcgcgaggagaaacagcggcaggagctggagaagaccaggcggaagcttgagggagacagtaccgacctgagcgaccaaatcgcagagctgcaggcccagatcgccgagcttaagatgcagctcgctaaaaaagaggaagaactccaggctgccctcgcaagagttgaggaggaggctgcacagaagaacatggccttaaaaaaaatccgggagctggagtctcagatctcagagcttcaagaggatctggagtctgagagggctagcaggaataaagcagagaaacagaaacgagacttgggtgaagagttggaggctttaaagaccgaactagaggatacgttggattccactgctgctcagcaggaactgcggtctaagcgggagcaggaggtcaacattttgaagaagacattggaagaggaggccaagacacacgaggcacagattcaagagatgcggcagaaacattcccaggccgtggaggagctcgctgaacaactcgagcaaacaaagcgggtgaaggccaacctcgaaaaggccaaacaaacactggagaacgaacgcggtgaactggccaacgaagtgaaggttctgttgcagggcaagggcgacagtgaacacaagagaaagaaagttgaagcccaactacaggagttacaggttaagtttaacgagggggagagagtgaggaccgaacttgctgataaggtgaccaagctgcaggtggaactcgacaatgtgaccggccttctcagtcagagtgatagcaagtccagcaagttgacaaaggatttcagcgctctggagagtcagttacaggacacccaggaactgctccaagaggagaatagacagaaactgtctctctctactaaactaaagcaggtagaggatgagaagaattcctttcgagaacagctggaggaggaagaggaagccaagcacaacctagaaaagcagatagccacccttcatgcacaggtggcagatatgaaaaagaaaatggaggacagtgtcggctgtctggagaccgcggaagaggtgaagcgcaagctgcagaaagacctcgaaggcctctctcagaggcatgaagagaaagtcgcagcctatgataaactcgaaaaaacaaagactcggttacagcaggaactcgatgatctgcttgttgacctggaccatcagcggcagagcgcgtgcaacctcgaaaagaaacagaagaagtttgatcaactcctggcagaagaaaagaccatttctgcaaagtacgccgaggagcgtgatagggccgaggctgaagctcgggagaaggagaccaaggctctgtccctcgccagagcgctggaagaggcaatggagcaaaaagccgagctggaaaggctgaacaagcagttcagaacagaaatggaagatttgatgtcctcaaaggatgatgtaggcaagtctgtgcacgagctcgagaaatccaagagggctcttgaacagcaagtcgaggaaatgaagacacagctggaagaattggaggatgagctgcaggccacagaggatgccaaacttcgcctcgaagttaatctgcaagctatgaaggcccaatttgaacgcgatctgcaagggcgagatgagcaatcagaggaaaaaaaaaaacagctggtgaggcaggtgcgcgagatggaggctgagctcgaggatgagcgcaagcagcggagcatggccgtagcagcccggaagaagctcgagatggatcttaaagacctcgaggcgcacatcgattccgctaacaagaatagagatgaagcgataaagcagcttcgaaaacttcaggcccagatgaaagattgcatgcgcgagttagacgacaccagggcgtctagagaggagatcttggctcaggccaaagagaacgaaaagaagctgaagagcatggaagcggaaatgatccagctgcaagaggaattagctgctgcagagcgcgccaaacggcaggcccaacaggagcgagacgaactggccgacgagattgccaactcatcaggcaaaggggcccttgctctcgaagagaagcggaggctagaagcgaggattgcccaactcgaggaggaactagaagaggaacaggggaacacagagctaatcaatgaccggctcaagaaagcgaacctgcagatcgaccagattaacaccgatctgaaccttgagagatcccacgcccagaaaaacgagaacgcaaggcagcaattagaaaggcaaaataaggagctcaaagttaagctgcaggagatggagggcaccgtcaagtcaaagtacaaagccagcattactgcactcgaagcaaagattgcccaactggaagaacagctcgataacgaaacaaaagagaggcaagcagcttgtaagcaggtgcgacggaccgagaagaaactcaaagatgtgctgctccaagttgacgatgagcgccgcaatgcagagcagtacaaagatcaggcagataaggcctcaactaggttaaaacagctgaagcgccagttggaagaggccgaagaggaagcccaacgggccaatgcatcccggcgcaaactgcagcgcgaactggaggacgctaccgaaacggccgatgcaatgaacagggaggtgtccagcctgaagaacaaactgcgtagaggcgatttgcccttcgttgtgccacgtcgcatggcacgaaaaggagccggggatggcagcgatgaagaggttgatgggaaggccgacggtgccgaagctaagcctgccgagtag

SEQ ID NO: 129076 - DNA, 5883 bp, Artificial Sequence
  derived and/or modified sequence
atggcacagcaggctgcagacaagtatctctatgtcgataagaattttattaataatcctcttgctcaggctgattgggcggctaagaagctagtgtgggttccgtccgataagtcaggcttcgaacccgcaagcttgaaggaagaggtgggcgaggaggctatcgttgaactcgtggagaatggtaagaaggtcaaggtcaacaaggacgatattcagaaaatgaatccaccgaaattcagtaaagtggaagatatggccgaactcacatgtctgaatgaagcctcagttttacacaatttaaaggagcggtattatagtgggctgatatatacatactccgggttgttctgcgtcgtaatcaatccttacaaaaacctgcctatatactccgaagagattgtggaaatgtataaagggaaaaagaggcacgagatgcccccacacatttacgccatcaccgacaccgcatataggtccatgatgcaggacagggaagatcaatcaatcctctgtaccggcgaatcgggcgctggaaagaccgagaacacaaaaaaagtgattcaatacttggcgtacgtggcgtcatcccataagtcaaaaaaagatcagggcgagttggagcgccagttgctgcaggcgaatcccatccttgaagccttcgggaacgcaaaaaccgtcaagaacgataacagcagccgattcgggaagttcatccggataaacttcgatgtgaacggttatatcgttggcgcaaatatcgagacctacctgctggagaagagtcgagcaattcgccaggccaaggaggagcgcacatttcacatattttattacttgctcagtggtgctggcgagcatcttaagacagacctcctgttagaaccttacaacaagtatcggttcttgtctaacgggcacgtgacgattcccggacagcaggataaagatatgttccaggaaaccatggaggctatgcgcattatgggtattcccgaagaggagcaaatggggctgctgcgcgtgatctccggggttctccagctgggcaacattgtgtttaaaaaggagcgcaacaccgatcaagcgtctatgccagacaacactgctgcccagaaggtatctcacctgttgggcattaatgtgactgacttcaccaggggaatcctgactcctcggatcaaagttggtagagattacgtgcagaaggcccagacaaaagagcaggccgattttgctatcgaggcccttgccaaggccacatatgaaagaatgttcagatggctggtgctccgaatcaataaagctcttgacaaaacaaaacggcaaggcgcatctttcattggtatcttggatatagctgggtttgaaatcttcgatttgaattcttttgaacagctatgcatcaattacacgaacgaaaaactgcagcaactgtttaatcatactatgttcatcctggagcaggaggaataccagcgggaagggattgaatggaacttcatagacttcggcttagatttacagccatgtattgatctcattgagaagccagctggtccaccagggatcctggctcttctggatgaagagtgttggtttcctaaagccaccgataaatcttttgttgaaaaggtcatgcaggagcagggcacccatccaaagttccagaagcctaagcagttaaaagacaaagccgatttctgtattattcactatgccggaaaggtagattacaaggcagacgagtggctgatgaaaaacatggatcccctgaatgacaatattgccactctgttgcatcagagttctgacaagtttgtttctgagctgtggaaggatgtagacagaatcatagggctggaccaggtagctggcatgtctgagacagcactgcctggcgcattcaaaacccgcaaggggatgtttcggaccgtcgggcagctgtacaaggagcagctggccaagttaatggcgacactgaggaatactaaccctaactttgtgagatgtatcattcccaatcacgagaagaaagccggaaaactggacccgcacctagtactagaccagctacgatgtaatggtgttttagagggaattcggatatgccgccagggattccctaacagagtggtgttccaggaatttaggcaaagatatgaaatccttacacccaactctattcccaaaggtttcatggacggcaagcaggcctgcgtccttatgataaaagctttagagctggattcaaacctgtacaggatcggtcagtcaaaagtgttttttagagccggagtactcgctcaccttgaggaagagagggatctcaaaattacggatgtaatcattggtttccaggcctgttgtcgaggataccttgccagaaaagcctttgcaaagagacaacagcagttaaccgctatgaaggtgcttcaaagaaattgtgccgcttaccttaaacttcggaattggcagtggtggagattattcactaaagttaaaccgctgttgcaggtgtctcgacaggaggaagaaatgatggccaaggaggaggaactcgtgaaagtcagggagaaacagctagcagccgagaatcggctgactgagatggaaaccctgcagagtcagttgatggccgagaagctgcagctacaggagcagctgcaggccgaaaccgaactctgcgcagaggcagaagagttgagagctaggctgacagccaagaagcaagaactcgaagagatttgccatgacctcgaggctcgcgtggaagaggaggaagagcgttgccagcacctgcaggcagagaaaaaaaagatgcagcagaacatacaggaactagaggaacagctggaggaggaagagagcgcacgtcagaagctgcagctggagaaggtgacgaccgaggctaagctgaaaaagctcgaagaagaacagataatcctggaggatcaaaactgcaagctcgccaaggaaaagaagctcctagaggacagaattgcagagtttactacaaacctcactgaggaggaggagaagagcaagtcactggctaagctcaagaacaagcatgaggcaatgattacagacctcgaggagaggttgcggagagaggagaagcaacgacaggagttggagaaaacccgcaggaagctcgagggcgattcaactgacctctcagatcagattgctgagctgcaggctcagatcgctgagttaaaaatgcaattagctaagaaagaagaggaactgcaggccgctctggctcgggtggaggaggaggctgcacagaagaatatggccctcaagaaaatcagagaattggagtcccagatctccgaactccaggaggacctggaaagcgaacgcgcatctcgcaacaaggctgagaagcagaaacgggacctgggggaggaactggaggcacttaaaaccgagctcgaagacactctcgatagcacagcggcacaacaggaacttcgctccaagcgggaacaggaagtgaatatactgaaaaaaaccctagaggaggaggcgaaaacccatgaagcccaaatacaagaaatgaggcaaaaacatagtcaggcggtggaggaactggccgagcagctagaacaaactaagcgggtgaaggccaacctggagaaggcaaaacagacccttgaaaacgagagaggggagctggccaacgaggtgaaggtgctcctccaagggaagggagacagcgagcacaagcgcaagaaagttgaggcgcagttgcaggaattgcaggttaagttcaacgagggagagagagttcggactgagctagctgataaggtaactaagctgcaggtggagctagacaatgtcacaggcctcctgtctcaaagcgacagcaagtcctcaaagttgacaaaggatttctcggccctcgagtcccagctgcaggatacccaggagttgttgcaagaggaaaaccggcaaaaactttcgcttagtaccaaactgaaacaggtggaggatgagaaaaactcctttagggagcagctggaggaagaggaggaagccaaacacaacctcgagaaacagatcgctaccttgcatgcccaggttgctgatatgaagaaaaagatggaggatagcgttggctgtctggagactgcggaggaggtcaagcggaagctgcagaaagacctggaaggcctctctcaacggcacgaagagaaagtagctgcctatgataagcttgagaaaacgaagactcgcctacagcaggaactggatgatcttttggtcgatctggaccaccagaggcagtctgcatgcaacttggaaaaaaagcagaagaagtttgaccagctgctggcagaagagaagactatttctgccaagtacgctgaagaaagggaccgcgcagaagcggaagcacgagagaaggagacaaaagcactgtctttggccagggccttggaggaggcaatggaacagaaggctgagcttgagaggctaaataagcagtttcgaacagaaatggaggatttaatgtcttccaaggacgatgtcggcaaatccgtccacgagctggagaagtcaaagcgggcattagaacaacaggttgaggaaatgaaaacccagctggaagagctggaggacgagctccaagcaaccgaggacgccaaactcaggcttgaggtgaacctccaggcaatgaaggcccagttcgaacgcgacctccaaggaagagacgagcagtccgaagagaaaaaaaaacaactagtgagacaggtaagagaaatggaagctgagttggaagacgagaggaagcaacgctcaatggctgtagcggctagaaagaagctggaaatggacttgaaagacttagaggctcatattgacagtgccaataaaaatagagatgaagctataaagcagctccggaagttgcaagcgcagatgaaggactgcatgagggaattggacgatacccgggcttcaagggaagagattctagcacaggccaaagagaatgaaaagaaacttaaatccatggaagcggagatgatccagttacaggaggaactggccgcagccgaacgggctaagcgccaagcccagcaagagcgagacgaattggcagacgagatcgcaaatagctcggggaagggtgcactcgccttggaagagaaaaggaggctggaggcccgaattgcacagctggaggaggaattagaggaggaacaaggtaacacggaactgatcaatgaccggctaaagaaggcaaatctgcagattgaccaaattaacactgacctgaatctggaacggtctcatgcccagaaaaacgagaacgcacggcagcaactagaaagacagaataaggaactgaaagtgaaactccaggagatggagggtaccgtgaaaagcaagtataaggcctctattaccgcccttgaggctaagattgctcagcttgaagagcagctggacaacgagacgaaggagaggcaggccgcttgcaagcaggtgagacggaccgagaaaaaactgaaggatgtgctgctgcaagtggatgacgagcgacgcaatgccgagcagtacaaagaccaggccgacaaagcctctactcgtttaaagcagctcaaaagacagctcgaagaggcagaagaagaagctcaacgggcaaacgcgagcagacggaaactgcagcgtgaattggaggacgctactgaaacagccgacgcgatgaatagggaggtgagcagcctgaagaacaagttaagacgcggagatctgccttttgtggttccacggaggatggccagaaagggagccggagacggctccgacgaagaagtggacggcaaggcagacggggcagaagctaaacctgctgagtat

SEQ ID NO: 129077 - DNA, 4149 bp, Artificial Sequence
  derived and/or modified sequence
atgtacaagggcaagaagagacacgagatgcccccccacatctacgccatcaccgacaccgcctacagaagcatgatgcaggacagagaggaccagagcatcctgtgcaccggcgagagcggcgccggcaagaccgagaacaccaagaaggtgatccagtacctggcctacgtggccagcagccacaagagcaagaaggaccagggcgagctggagagacagctgctgcaggccaaccccatcctggaggccttcggcaacgccaagaccgtgaagaacgacaacagcagcagattcggcaagttcatcagaatcaacttcgacgtgaacggctacatcgtgggcgccaacatcgagacctacctgctggagaagagcagagccatcagacaggccaaggaggagagaaccttccacatcttctactacctgctgagcggcgccggcgagcacctgaagaccgacctgctgctggagccctacaacaagtacagattcctgagcaacggccacgtgaccatccccggccagcaggacaaggacatgttccaggagaccatggaggccatgagaatcatgggcatccccgaggaggagcagatgggcctgctgagagtgatcagcggcgtgctgcagctgggcaacatcgtgttcaagaaggagagaaacaccgaccaggccagcatgcccgacaacaccgccgcccagaaggtgagccacctgctgggcatcaacgtgaccgacttcaccagaggcatcctgacccccagaatcaaggtgggcagagactacgtgcagaaggcccagaccaaggagcaggccgacttcgccatcgaggccctggccaaggccacctacgagagaatgttcagatggctggtgctgagaatcaacaaggccctggacaagaccaagagacagggcgccagcttcatcggcatcctggacatcgccggcttcgagatcttcgacctgaacagcttcgagcagctgtgcatcaactacaccaacgagaagctgcagcagctgttcaaccacaccatgttcatcctggagcaggaggagtaccagagagagggcatcgagtggaacttcatcgacttcggcctggacctgcagccctgcatcgacctgatcgagaagcccgccggcccccccggcatcctggccctgctggacgaggagtgctggttccccaaggccaccgacaagagcttcgtggagaaggtgatgcaggagcagggcacccaccccaagttccagaagcccaagcagctgaaggacaaggccgacttctgcatcatccactacgccggcaaggtggactacaaggccgacgagtggctgatgaagaacatggaccccctgaacgacaacatcgccaccctgctgcaccagagcagcgacaagttcgtgagcgagctgtggaaggacgtggacagaatcatcggcctggaccaggtggccggcatgagcgagaccgccctgcccggcgccttcaagaccagaaagggcatgttcagaaccgtgggccagctgtacaaggagcagctggccaagctgatggccaccctgagaaacaccaaccccaacttcgtgagatgcatcatccccaaccacgagaagaaggccggcaagctggacccccacctggtgctggaccagctgagatgcaacggcgtgctggagggcatcagaatctgcagacagggcttccccaacagagtggtgttccaggagttcagacagagatacgagatcctgacccccaacagcatccccaagggcttcatggacggcaagcaggcctgcgtgctgatgatcaaggccctggagctggacagcaacctgtacagaatcggccagagcaaggtgttcttcagagccggcgtgctggcccacctggaggaggagagagacctgaagatcaccgacgtgatcatcggcttccaggcctgctgcagaggctacctggccagaaaggccttcgccaagagacagcagcagctgaccgccatgaaggtgctgcagagaaactgcgccgcctacctgaagctgagaaactggcagtggtggagactgttcaccaaggtgaagcccctgctgcaggtgagcagacaggaggaggagatgatggccaaggaggaggagctggtgaaggtgagagagaagcagctggccgccgagaacagactgaccgagatggagaccctgcagagccagctgatggccgagaagctgcagctgcaggagcagctgcaggccgagaccgagctgtgcgccgaggccgaggagctgagagccagactgaccgccaagaagcaggagctggaggagatctgccacgacctggaggccagagtggaggaggaggaggagagatgccagcacctgcaggccgagaagaagaagatgcagcagaacatccaggagctggaggagcagctggaggaggaggagagcgccagacagaagctgcagctggagaaggtgaccaccgaggccaagctgaagaagctggaggaggagctggacgacctgctggtggacctggaccaccagagacagagcgcctgcaacctggagaagaagcagaagaagttcgaccagctgctggccgaggagaagaccatcagcgccaagtacgccgaggagagagacagagccgaggccgaggccagagagaaggagaccaaggccctgagcctggccagagccctggaggaggccatggagcagaaggccgagctggagagactgaacaagcagttcagaaccgagatggaggacctgatgagcagcaaggacgacgtgggcaagagcgtgcacgagctggagaagagcaagagagccctggagcagcaggtggaggagatgaagacccagctggaggagctggaggacgagctgcaggccaccgaggacgccaagctgagactggaggtgaacctgcaggccatgaaggcccagttcgagagagacctgcagggcagagacgagcagagcgaggagaagaagaagcagctggtgagacaggtgagagagatggaggccgagctggaggacgagagaaagcagagaagcatggccgtggccgccagaaagaagctggagatggacctgaaggacctggaggcccacatcgacagcgccaacaagaacagagacgaggccatcaagcagctgagaaagctgcaggcccagatgaaggactgcatgagagagctggacgacaccagagccagcagagaggagatcctggcccaggccaaggagaacgagaagaagctgaagagcatggaggccgagatgatccagctgcaggaggagctggccgccgccgagagagccaagagacaggcccagcaggagagagacgagctggccgacgagatcgccaacagcagcggcaagggcgccctggccctggaggagaagagaagactggaggccagaatcgcccagctggaggaggagctggaggaggagcagggcaacaccgagctgatcaacgacagactgaagaaggccaacctgcagatcgaccagatcaacaccgacctgaacctggagagaagccacgcccagaagaacgagaacgccagacagcagctggagagacagaacaaggagctgaaggtgaagctgcaggagatggagggcaccgtgaagagcaagtacaaggccagcatcaccgccctggaggccaagatcgcccagctggaggagcagctggacaacgagaccaaggagagacaggccgcctgcaagcaggtgagaagaaccgagaagaagctgaaggacgtgctgctgcaggtggacgacgagagaagaaacgccgagcagtacaaggaccaggccgacaaggccagcaccagactgaagcagctgaagagacagctggaggaggccgaggaggaggcccagagagccaacgccagcagaagaaagctgcagagagagctggaggacgccaccgagaccgccgacgccatgaacagagaggtgagcagcctgaagaacaagctgagaagaggcgacctgcccttcgtggtgcccagaagaatggccagaaagggcgccggcgacggcagcgacgaggaggtggacggcaaggccgacggcgccgaggccaagcccgccgagtag

SEQ ID NO: 129078 - DNA, 1689 bp, Artificial Sequence
  derived and/or modified sequence
gccagcggcaccagaagaagatggccccccaccaccagctggagaagacccagaagaggctgcagcagaagctggaccacctgctggtggacctggaccaccagcgccagagccagagccacctggagaagaagcagaagaagcctgaccagcagctggagaagaagaagacccagcctgcccagcatgcagagaagcgccaccggcctgagaagaagacccgagagaagaagacccagactgtgcagatggcccggccccgaggaggccatggagcagaaggccgagctggagagactgaacaagcagttcagaaccgagatggaggacctgatgagcagcaaggacgacgtgggcaagagcgtgcacgagctggagaagagcaagagagccctggagcagcaggtggaggagatgaagacccagctggaggagctggaggacgagctgcaggccaccgaggacgccaagctgagactggaggtgaacctgcaggccatgaaggcccagttcgagagagacctgcagggcagagacgagcagagcgaggagaagaagaagcagctggtgagacaggtgagagagatggaggccgagctggaggacgagagaaagcagagaagcatggccgtggccgccagaaagaagctggagatggacctgaaggacctggaggcccacatcgacagcgccaacaagaacagagacgaggccatcaagcagctgagaaagctgcaggcccagatgaaggactgcatgagagagctggacgacaccagagccagcagagaggagatcctggcccaggccaaggagaacgagaagaagctgaagagcatggaggccgagatgatccagctgcaggaggagctggccgccgccgagagagccaagagacaggcccagcaggagagagacgagctggccgacgagatcgccaacagcagcggcaagggcgccctggccctggaggagaagagaagactggaggccagaatcgcccagctggaggaggagctggaggaggagcagggcaacaccgagctgatcaacgacagactgaagaaggccaacctgcagatcgaccagatcaacaccgacctgaacctggagagaagccacgcccagaagaacgagaacgccagacagcagctggagagacagaacaaggagctgaaggtgaagctgcaggagatggagggcaccgtgaagagcaagtacaaggccagcatcaccgccctggaggccaagatcgcccagctggaggagcagctggacaacgagaccaaggagagacaggccgcctgcaagcaggtgagaagaaccgagaagaagctgaaggacgtgctgctgcaggtggacgacgagagaagaaacgccgagcagtacaaggaccaggccgacaaggccagcaccagactgaagcagctgaagagacagctggaggaggccgaggaggaggcccagagagccaacgccagcagaagaaagctgcagagagagctggaggacgccaccgagaccgccgacgccatgaacagagaggtgagcagcctgaagaacaagctgagaagaggcgacctgcccttcgtggtgcccagaagaatggccagaaagggcgccggcgacggcagcgacgaggaggtggacggcaaggccgacggcgccgaggccaagcccgccgagtag

SEQ ID NO: 129079 - DNA, 657 bp, Artificial Sequence
  derived and/or modified sequence
atggcccagcaggccgccgacaagtacctgtacgtggacaagaacttcatcaacaaccccctggcccaggccgactgggccgccaagaagctggtgtgggtgcccagcgacaagagcggcttcgagcccgccagcctgaaggaggaggtgggcgaggaggccatcgtggagctggtggagaacggcaagaaggtgaaggtgaacaaggacgacatccagaagatgaacccccccaagttcagcaaggtggaggacatggccgagctgacctgcctgaacgaggccagcgtgctgcacaacctgaaggagagatactacagcggcctgatctacacctacagcggcctgttctgcgtggtgatcaacccctacaagaacctgcccatctacagcgaggagatcgtggagatgtacaagggcaagaagagacacgagatgcccccccacatctacgccatcaccgacaccgcctacagaagcatgatgcaggacagagaggaccagagcatcctgtgcaccggcgagagcggcgccggcaagaccgagaacaccaagaaggtgatccagtacctggcctacgtggccagcagccacaagagcaagaaggaccaggaggcctacttcaagaacagagccgtgagactgggcgtgctgtag

SEQ ID NO: 129080 - DNA, 312 bp, Artificial Sequence
  derived and/or modified sequence
atggcccagcaggccgccgacaagtacctgtacgtggacaagaacttcatcaacaaccccctggcccaggccgactgggccgccaagaagctggtgtgggtgcccagcgacaagagcggcttcgagcccgccagcctgaaggaggaggtgggcgaggaggccatcgtggagctggtggagaacggcaagaaggtgaaggtgaacaaggacgacatccagaagatgaacccccccaagttcagcaaggtggaggacatggccgagctgacctgcctgaacgaggccagcgtgctgcacaacctgaaggagtag

SEQ ID NO: 129081 - DNA, 4149 bp, Artificial Sequence
  derived and/or modified sequence
atgtacaaaggtaagaagagacatgaaatgccgccccacatctacgctatcacagacaccgcttatcggagcatgatgcaggatagggaagatcagtccatcttgtgtaccggggagtccggagccggcaagaccgaaaataccaaaaaagtgatacagtatctcgcgtatgttgcttcatcacataaatcgaagaaagatcaaggcgagctggagagacagctcctacaggctaaccccattttagaagctttcggaaatgccaagaccgtgaaaaatgacaacagcagcagattcggtaagttcattagaatcaatttcgatgttaacggctacattgttggggccaatatcgagacatacctgctggagaaaagcagagctatccgccaggccaaagaggagaggacctttcacatcttttactacttgctgagcggtgccggtgagcacctcaaaaccgatctgttactagaaccctataataagtaccggtttttgtcaaacgggcacgtgactatcccaggtcagcaggataaggatatgttccaggagaccatggaagcgatgcgcattatgggcatacctgaggaggaacaaatggggctgctgcgggtgatcagcggggtcctgcaactcgggaacattgtgtttaagaaggaaagaaatacagaccaggcatctatgcccgataacacggcggcccagaaggtgagtcacctgctcggaatcaacgtgacagactttacaagagggatacttactccacggatcaaggtcggacgtgattatgtccagaaagcgcaaactaaggaacaggccgattttgctatagaggctctggccaaggcaacgtatgaacggatgttcagatggttagtcctgcggatcaataaggcgctggacaagacgaagaggcagggcgcctctttcattggtatcttagacatcgctggcttcgaaatctttgacctgaactcttttgagcagctctgcatcaattacacaaacgagaaattgcaacagctcttcaatcacacaatgtttattctcgagcaggaagagtatcagcgagaagggatcgaatggaattttatagatttcggcctcgacttgcagccttgcatagaccttatcgaaaagcctgcggggccccctggaatcttggcactccttgatgaggaatgctggttcccaaaggcgacggataagtccttcgttgagaaggtgatgcaggaacaaggaacccacccaaagttccagaagcccaaacagctgaaggataaggccgatttctgcatcattcactacgccggaaaagtggactacaaggccgacgaatggctgatgaagaatatggaccctctcaacgacaacatagcaactttgctgcaccagtccagtgacaagtttgtgtcagagttatggaaagacgtcgatcggatcatcggcctagaccaagtcgccggaatgtctgaaacggccctacccggtgccttcaaaaccaggaaggggatgttcaggacagtcggtcagctgtataaagagcagttggccaagctgatggctactctccggaacaccaaccccaacttcgtgcggtgtatcattcccaaccacgaaaaaaaagctggcaagttagacccacacctggtcttagatcagctccggtgtaacggagtgttagagggaattagaatctgtagacagggctttccaaaccgtgtggtctttcaagagttcaggcaacggtatgaaattctgacgcccaattctattccaaaagggtttatggacggtaagcaggcctgcgtgctcatgatcaaggcactggagctggattccaacctatacagaattggtcaaagcaaggtcttctttagggcgggcgtccttgcccatctggaggaggaacgggacctgaagatcactgatgtgattataggattccaagcctgttgtcgcgggtatcttgccaggaaagcattcgccaagagacagcaacagctgaccgctatgaaggttctgcagcgcaattgcgctgcatacctcaagctgcggaattggcaatggtggaggctgttcacgaaggtgaaaccactgctgcaggtatcccgtcaggaggaggagatgatggccaaggaagaggaactggtgaaggtgcgagagaaacaactggcagcagagaaccggctgacagagatggaaaccctgcagtcgcagcttatggcagagaaacttcagttacaggaacagctccaagccgaaaccgagctttgtgccgaagctgaggaattaagagccaggctgactgccaagaagcaagaacttgaggagatatgccacgatctggaggccagagtcgaagaggaggaagaacgctgtcaacacctgcaggcagaaaagaaaaagatgcagcagaacattcaagaattggaggagcaacttgaagaggaggaaagcgccaggcagaagctgcagctggagaaggtgacaaccgaggcgaaactgaaaaagttggaggaagagctggacgatctcctggttgacttggatcatcagcggcaatcagcgtgtaatctggaaaagaaacagaagaagttcgatcaactgcttgcggaagaaaagaccataagtgctaaatacgccgaggaaagagacagagctgaggcagaggctcgggaaaaagagaccaaggccctgtctctggcccgagcactcgaagaggctatggagcaaaaggccgaattggagcgcctgaacaagcaattccggacagaaatggaggacctcatgtctagcaaggacgatgtcgggaagagtgtacacgagctggaaaaaagcaaacgcgccttagagcagcaagtggaggaaatgaagacacagctcgaagagttagaggatgaactgcaggcgacagaagatgctaagctgcgtctggaggtaaatctgcaggccatgaaggcacaatttgagagggacctgcagggacgggatgaacagtctgaagagaaaaagaagcagctggtaagacaggtcagggagatggaggctgagttggaagatgaacggaaacagcggagcatggccgtcgccgcacggaagaagctcgaaatggacctcaaggatttagaagctcacatagactcagcaaataaaaatcgcgacgaggctattaagcagctaaggaagctacaggcccagatgaaggattgcatgcgggagctagatgacacccgcgcctcccgggaagagattctggcgcaggccaaggaaaatgaaaagaaactgaagagcatggaggctgaaatgatccaattgcaggaagaactcgcagccgcagaaagggccaagagacaggcccagcaggagcgagacgagctggcagacgagattgccaactcgtcaggcaagggcgcattggcgctcgaggagaagcgcagactggaggcccgtattgcccaactggaagaggagctggaagaagaacaggggaacacagagctgattaacgatagactgaaaaaagctaatttgcagatcgatcagattaacacagatttgaacctggagcggtcacacgcccagaagaacgaaaacgcaagacagcagctggaaaggcagaataaagagttgaaagtcaagttgcaggagatggaagggactgttaaaagcaagtacaaagcaagcattacagcgctggaggctaaaattgctcagctcgaagaacagctcgacaacgaaactaaagagagacaggccgcctgtaagcaggtgagacgtacagaaaagaagctgaaggacgttcttcttcaagtcgatgatgaaaggagaaatgccgagcagtacaaggaccaggccgacaaggctagtactcggctcaaacagctcaaaagacagctcgaagaggccgaggaggaagcccagcgggcaaatgcttctcggcgcaaactccagcgcgaacttgaggacgcaactgaaactgccgacgcaatgaacagggaggtatctagtctgaaaaacaagcttcgccgcggcgacctgcccttcgtcgtgccccgcaggatggctaggaagggggcaggggacggctccgacgaggaggtggacggaaaagctgatggggctgaggccaagcctgccgaatag

SEQ ID NO: 129082 - DNA, 1689 bp, Artificial Sequence
  derived and/or modified sequence
gcttcaggaaccagaaggcgatggccacccacgacttcttggaggaggccacgcagaggatgcagcaggtcttggaccacctgctggtggacctggacgaccagtgctcgggccagggcgacctggaggcggtcccgtaggtccctaacctctagctggaggcgaagacgcccttcgctgcccagcatgcagcgaagcgcaacaggattgcggcgacggccggagcgtaggagaccccgcctctgcagatggcccggacccgaagaagctatggaacagaaagccgaactcgagcgcctgaacaagcagtttagaaccgagatggaagaccttatgtcttccaaggatgacgtcgggaagagtgtacatgagctggaaaaaagcaagagagctctggaacaacaggtagaggagatgaagacacagctggaggagctggaggatgagctacaagctaccgaggatgccaaacttcgtcttgaagtgaacttgcaagctatgaaggcccagtttgagcgcgacttgcagggaagggacgagcagtctgaagagaagaagaagcagttggttcgccaggtgcgcgagatggaggccgaactcgaagacgaacgcaagcagaggagtatggccgtagctgcacgcaaaaagctggaaatggaccttaaagacctggaggcacacattgatagtgcaaacaagaacagagacgaggccatcaaacagcttagaaaactacaagcgcagatgaaggactgcatgcgagagcttgatgacacacgggccagtcgcgaagagattctcgcccaggcaaaggaaaacgaaaagaaactgaaatctatggaggctgaaatgatccagctgcaagaggagctcgcagcggcagagagagctaagaggcaggcccagcaggaacgggacgagctggccgacgagatcgcgaattcgtcagggaaaggtgctttagccctcgaagagaaaaggagactagaggctcgaatcgcccagttggaggaagagctggaagaggagcaggggaacacagaactgattaacgaccggcttaagaaggccaatctacaaatcgaccaaataaacacagatttgaacctggagcggtctcatgctcagaaaaatgaaaacgcaagacagcagctggaacgacagaataaggaattgaaggtgaaactgcaagaaatggagggcaccgttaaaagcaaatataaggcgtccattactgcacttgaggctaaaattgcacaactcgaagagcagctggacaacgaaacaaaagaaagacaggccgcatgtaaacaggtgaggcgtactgaaaaaaaacttaaggatgtcctcctgcaggtcgatgatgagaggcgtaacgctgaacagtacaaggaccaggccgataaagcttccaccaggttgaagcaactgaagaggcagttggaagaggccgaagaggaggcccagcgggcaaatgcgagcagacgcaaactgcaaagagagctggaagacgctacagaaaccgctgatgctatgaatcgggaggtcagctcactcaagaacaaactgcggcggggagacctgccttttgtggtgccccgcagaatggcccgaaaaggtgccggcgatgggagcgacgaggaggtggatgggaaagcagatggtgccgaggctaagcctgcagagtag

SEQ ID NO: 129083 - DNA, 657 bp, Artificial Sequence
  derived and/or modified sequence
atggcccagcaggccgcggataagtacctgtatgtggataaaaatttcatcaacaaccccttggcgcaggctgactgggccgccaaaaagctggtctgggtcccctccgacaaatcaggattcgagcccgcatctctgaaggaggaggtgggagaagaggccatcgtggagctggtcgaaaatggcaaaaaagtgaaagtcaataaagatgacatacagaagatgaaccctccaaaattttcaaaagtggaagatatggccgagctaacatgcctgaacgaagcgtctgttctacacaaccttaaggagcgttattactctgggcttatctacacctatagcggcctgttctgtgtggtcatcaacccatataaaaatctcccaatatactccgaggagatcgtcgaaatgtataagggaaagaagagacacgagatgcctccgcatatctacgccattactgacacggcctaccggagcatgatgcaggatcgggaggatcagagtattttatgtacaggcgagtcaggggccgggaaaaccgagaacacaaagaaggtgattcagtacttggcctatgttgcctctagccacaagtccaagaaagatcaggaagcttatttcaagaacagggccgtcagactcggtgtactctag

SEQ ID NO: 129084 - DNA, 312 bp, Artificial Sequence
  derived and/or modified sequence
atggctcagcaagctgcagacaaatatctgtatgttgataagaacttcattaacaatcctctggcacaggccgactgggccgcaaaaaagctggtttgggtcccctccgataaaagcggtttcgaaccagcctcactaaaagaagaggtgggggaagaggcaatagttgaattggtagaaaatggaaagaaggtgaaagtaaacaaggatgatatccagaaaatgaacccacctaaatttagcaaagtggaagacatggcggaactcacctgcctgaatgaagctagtgtgctgcataatctcaaagagtag

SEQ ID NO: 129085 - DNA, 4149 bp, Artificial Sequence
  derived and/or modified sequence
atgtacaagggcaagaagagacatgagatgccaccccacatctatgccatcacagacacagcctaccgctccatgatgcaggaccgggaggaccagagcatcctgtgcacaggagagagcggggccggcaagacagagaacaccaagaaggtgatccagtacctggcctacgtggccagcagccacaagagcaagaaggaccagggcgagctggagcggcagctgctgcaggccaaccccatcctggaggcctttggaaatgccaagacagtgaagaatgacaacagcagcagatttgggaagttcatccgcatcaactttgatgtgaatggctacatcgtgggcgccaacatcgagacctacctgctggagaagagccgggccatccggcaggccaaggaggagaggaccttccacatcttctactacctgctgagcggggccggggagcacctgaagacagacctgctgctggagccctacaacaagtaccgcttcctgagcaatggacatgtgaccatccctggccagcaggacaaggacatgttccaggagaccatggaggccatgaggatcatgggcatccctgaggaggagcagatgggcctgctgcgggtcatcagcggcgtgctgcagctgggcaacatcgtgttcaagaaggagaggaacacagaccaggcctccatgccagacaacacagctgcccagaaggtgagccacctgctgggcatcaacgtgacagacttcacccggggcatcctgaccccccgcatcaaggtgggccgggactatgtgcagaaggcccagaccaaggagcaggccgactttgccatcgaggccctggccaaggccacctatgaaagaatgttccgctggctggtgctgcgcatcaacaaggccctggacaagaccaagaggcagggcgccagcttcatcggcatcctggacattgctggctttgagatctttgacctgaacagctttgagcagctgtgcatcaactacaccaatgagaagctgcagcagctgttcaaccacaccatgttcatcctggagcaggaggagtaccagcgggagggcatcgagtggaacttcatcgactttggcctggacctgcagccctgcatcgacctgattgagaagccagctggccccccaggcatcctggccctgctggatgaggagtgctggttccccaaggccacagacaagagctttgtggagaaggtgatgcaggagcagggcacccaccccaagttccagaagcccaagcagctgaaggacaaggctgacttctgcatcatccactacgccggcaaggtggactacaaggcagatgagtggctgatgaagaacatggaccccctgaatgacaacatcgccaccctgctgcaccagagcagtgacaagtttgtgtctgagctgtggaaggatgtggaccgcatcatcggcctggaccaggtggccggcatgtctgaaacagccctgcccggggccttcaagaccaggaagggcatgttcagaacagtgggccagctgtacaaggagcagctggccaagctgatggccaccctgaggaacaccaaccccaactttgtgcgctgcatcatccccaaccacgagaagaaggccggcaagctggacccccacctggtgctggaccagctgcgctgcaatggagtgctggagggcatccgcatctgccggcagggcttccccaacagagtggtgttccaggagttccggcagagatatgagatcctgacccccaacagcatccccaagggcttcatggatggcaagcaggcctgtgtgctgatgatcaaggccctggagctggacagcaacctgtaccgcatcggccagagcaaggtgttcttccgggccggcgtgctggcccacctggaggaggagcgggacctgaagatcacagatgtgatcatcggcttccaggcctgctgccggggctacctggccaggaaggcctttgccaagaggcagcagcagctgacagccatgaaggtgctgcagaggaactgtgccgcctacctgaagctgaggaactggcagtggtggaggctcttcaccaaggtgaagcccctgctgcaggtgtcccggcaggaggaggagatgatggccaaggaggaggagctggtgaaggtgcgggagaagcagctggccgcagaaaatcggctgacagagatggagaccctgcagagccagctgatggccgagaagctgcagctgcaggagcagctgcaggccgagacagagctgtgtgccgaggccgaggagctgcgggcccggctgacagccaagaagcaggagctggaggagatctgccacgacctggaggcccgggtggaggaggaggaggagcgctgccagcacctgcaggccgagaagaagaagatgcagcagaacatccaggagctggaggagcagctggaggaggaggagagcgcccggcagaagctgcagctggagaaggtgaccacagaggccaagctgaagaagctggaggaggagctggatgacctgctggtggacctggaccaccagaggcagagcgcctgcaacctggagaagaagcagaagaagtttgaccagctgctggccgaggagaagaccatcagcgccaagtatgcagaggagcgggacagagctgaggccgaggcccgggagaaggagaccaaggccctgagcctggcccgggccctggaggaggccatggagcagaaggccgagctggagcggctgaacaagcagttcagaacagagatggaggacctgatgagcagcaaggatgatgtgggcaagtctgtgcatgagctggagaagagcaagagggccctggagcagcaggtggaggagatgaagacccagctggaggagctggaggatgagctgcaggccacagaagatgccaagctgcggctggaggtgaacctgcaggccatgaaggcccagtttgagcgggacctgcagggcagagatgagcagagcgaggagaagaagaagcagctggtgcggcaggtgcgggagatggaggccgagctggaggatgagaggaagcagaggtccatggctgtggccgccaggaagaagctggagatggacctgaaggacctggaggcccacatcgacagcgccaacaagaacagagatgaggccatcaagcagctgaggaagctgcaggcccagatgaaggactgcatgagggagctggatgacacccgggccagccgggaggagatcctggcccaggccaaggaaaatgagaagaagctgaagtccatggaggccgagatgatccagctgcaggaggagctggccgctgctgagcgggccaagaggcaggcccagcaggagagagatgagctggctgatgagatcgccaacagcagcggcaagggggccctggccctggaggagaagaggcggctggaggccagaattgcccagctggaggaggagctggaggaggagcagggcaacacagagctgatcaatgaccggctgaagaaggccaacctgcagattgaccagatcaacacagacctgaacctggagaggagccacgcccagaagaatgaaaatgcccggcagcagctggagcggcagaacaaggagctgaaggtgaagctgcaggagatggagggcaccgtgaagagcaagtacaaggccagcatcacagccctggaggccaagatcgcccagctggaggagcagctggacaatgagaccaaggagcggcaggccgcctgcaagcaggtgcggaggacagagaagaagctgaaggatgtgctgctgcaggtggatgatgaaagaagaaatgctgagcagtacaaggaccaggccgacaaggccagcacccggctgaagcagctgaagaggcagctggaggaggccgaggaggaggcccagagggccaatgccagcaggaggaagctgcagcgggagctggaggatgccacagaaacagcagatgccatgaaccgggaggtgagcagcctgaagaacaagctgcggcggggggacctgccctttgtggtgcccaggaggatggccaggaaaggagctggagatggcagtgatgaggaggtggatggcaaggcagatggagctgaggccaagccagctgagtag

SEQ ID NO: 129086 - DNA, 1689 bp, Artificial Sequence
  derived and/or modified sequence
gccagcggcacccggcggcgctggccacccaccacctcctggaggcggccccggcggggctgcagccgctcctggaccacctgctggtggacctggaccaccagcgcccgggcccgggccacctggaggaggagccgccgcagcctgaccagctcctggaggagaagaagacccagcctgcccagcatgcagaggtctgccaccggcctgcggcggcggcctgagaggagaagaccccggctgtgccgctggccaggccctgaggaggccatggagcagaaggccgagctggagcggctgaacaagcagttcagaacagagatggaggacctgatgagcagcaaggatgatgtgggcaagtctgtgcatgagctggagaagagcaagagggccctggagcagcaggtggaggagatgaagacccagctggaggagctggaggatgagctgcaggccacagaagatgccaagctgcggctggaggtgaacctgcaggccatgaaggcccagtttgagcgggacctgcagggcagagatgagcagagcgaggagaagaagaagcagctggtgcggcaggtgcgggagatggaggccgagctggaggatgagaggaagcagaggtccatggctgtggccgccaggaagaagctggagatggacctgaaggacctggaggcccacatcgacagcgccaacaagaacagagatgaggccatcaagcagctgaggaagctgcaggcccagatgaaggactgcatgagggagctggatgacacccgggccagccgggaggagatcctggcccaggccaaggaaaatgagaagaagctgaagtccatggaggccgagatgatccagctgcaggaggagctggccgctgctgagcgggccaagaggcaggcccagcaggagagagatgagctggctgatgagatcgccaacagcagcggcaagggggccctggccctggaggagaagaggcggctggaggccagaattgcccagctggaggaggagctggaggaggagcagggcaacacagagctgatcaatgaccggctgaagaaggccaacctgcagattgaccagatcaacacagacctgaacctggagaggagccacgcccagaagaatgaaaatgcccggcagcagctggagcggcagaacaaggagctgaaggtgaagctgcaggagatggagggcaccgtgaagagcaagtacaaggccagcatcacagccctggaggccaagatcgcccagctggaggagcagctggacaatgagaccaaggagcggcaggccgcctgcaagcaggtgcggaggacagagaagaagctgaaggatgtgctgctgcaggtggatgatgaaagaagaaatgctgagcagtacaaggaccaggccgacaaggccagcacccggctgaagcagctgaagaggcagctggaggaggccgaggaggaggcccagagggccaatgccagcaggaggaagctgcagcgggagctggaggatgccacagaaacagcagatgccatgaaccgggaggtgagcagcctgaagaacaagctgcggcggggggacctgccctttgtggtgcccaggaggatggccaggaaaggagctggagatggcagtgatgaggaggtggatggcaaggcagatggagctgaggccaagccagctgagtag

SEQ ID NO: 129087 - DNA, 657 bp, Artificial Sequence
  derived and/or modified sequence
atggcccagcaggccgctgacaagtacctgtatgtggacaagaacttcatcaacaaccccctggcccaggccgactgggccgccaagaagctggtgtgggtgcccagcgacaagagcggctttgagcccgccagcctgaaggaggaggtgggggaggaggccatcgtggagctggtggagaatggcaagaaggtgaaggtgaacaaggatgacatccagaagatgaacccccccaagttcagcaaggtggaggacatggccgagctgacctgcctgaatgaggcctctgtgctgcacaacctgaaggagcgctactacagcggcctcatctacacctacagcggcctcttctgtgtggtgatcaacccctacaagaacctgcccatctacagcgaggagatcgtggagatgtacaagggcaagaagagacatgagatgccaccccacatctatgccatcacagacacagcctaccgctccatgatgcaggaccgggaggaccagagcatcctgtgcacaggagagagcggggccggcaagacagagaacaccaagaaggtgatccagtacctggcctacgtggccagcagccacaagagcaagaaggaccaggaggcctacttcaagaacagagctgtgcggctgggcgtgctgtag

SEQ ID NO: 129088 - DNA, 312 bp, Artificial Sequence
  derived and/or modified sequence
atggcccagcaggccgctgacaagtacctgtatgtggacaagaacttcatcaacaaccccctggcccaggccgactgggccgccaagaagctggtgtgggtgcccagcgacaagagcggctttgagcccgccagcctgaaggaggaggtgggggaggaggccatcgtggagctggtggagaatggcaagaaggtgaaggtgaacaaggatgacatccagaagatgaacccccccaagttcagcaaggtggaggacatggccgagctgacctgcctgaatgaggcctctgtgctgcacaacctgaaggagtag

SEQ ID NO: 129089 - DNA, 4149 bp, Artificial Sequence
  derived and/or modified sequence
atgtacaagggcaagaagcggcacgagatgcccccccacatctacgccatcaccgatacggcttatcgcagtatgatgcaggatagggaagaccagagtatcctgtgcaccggggagagtggggccgggaagaccgagaataccaaaaaggtgatccagtatttggcttatgtcgcctcaagccacaagtctaagaaagatcagggcgaacttgagcgacagctgttacaagctaaccccatactcgaggcatttgggaatgccaagacagtgaaaaacgacaattcatctcgttttgggaagttcatcaggataaatttcgatgtgaatgggtacatagtgggagctaacatcgagacatacctcctggagaagtcacgcgctatcaggcaagccaaggaagaacgcaccttccatatcttttactacctgctgagcggcgctggagaacatttgaaaaccgacttattgctcgaaccctataataaatatcgctttctgtccaacggacacgttactattcctggccagcaagacaaggatatgtttcaagagaccatggaggccatgagaataatggggataccagaagaagaacaaatgggactgcttcgcgtgatctcaggagtgcttcagttgggcaacattgtgtttaaaaaagaacgcaacacagaccaggctagtatgccggacaacactgccgctcagaaggtctcacacctgctgggaatcaacgtgacagacttcacaagaggcattctgacgccacgcatcaaagtgggtcgcgactatgtacagaaggctcagacaaaagaacaggccgattttgctatcgaagcacttgccaaggccacctatgagcggatgtttcggtggctggtcctgagaatcaataaagccttagacaagactaagagacagggcgcctctttcattgggatacttgatatcgctgggtttgagatcttcgatctcaattccttcgagcaactctgtattaattatacgaatgagaagctgcagcagttgttcaatcatactatgtttattctagaacaggaagagtaccagagggagggcatcgagtggaatttcatcgactttggccttgacctccagccttgcatagacctcatcgaaaagcctgcgggccctcccggaatcctggcactcctggacgaagaatgttggttccctaaggcaacggataagagtttcgtcgaaaaagtaatgcaggagcaaggcacccacccgaaattccagaagcctaaacagctgaaggataaagccgacttctgcatcatccactacgcggggaaagtggattataaggccgacgaatggctcatgaaaaacatggaccccctgaatgataatatcgctacattactgcaccaatcgtctgataaattcgtgagcgagttgtggaaagacgtggaccgtataatcggtttggaccaagtcgctggcatgagcgagaccgcccttcccggagctttcaagacacgcaaggggatgtttagaacagttggccagctgtacaaggagcaactggccaagcttatggcaacccttcggaacactaaccccaacttcgtcagatgtattatccctaaccatgaaaaaaaggctggaaagctcgatccccaccttgtgttggaccagctacggtgcaatggagtgttagaagggatcaggatctgtcgccagggctttcccaatcgggttgtgttccaggagtttaggcagagatatgaaatcttgactccaaatagtattcctaagggttttatggacggcaaacaggcttgtgtcctaatgatcaaagctctggaactcgactcaaacctttataggattgggcagtcaaaagtcttctttagagcaggcgtgttagctcatctggaggaggagagagacctgaaaataaccgacgtcatcataggctttcaggcttgctgtcgcggctacctggccagaaaggcctttgctaaacgtcaacaacagttgaccgccatgaaggtgctccaacggaactgtgccgcctaccttaagcttaggaactggcagtggtggagactgtttaccaaagtgaagcctctcctccaggtctcccgccaggaggaggagatgatggcaaaagaggaagaactggtcaaggtccgcgagaagcagctggccgccgaaaacagactcacagaaatggaaacactgcagtcacagctgatggcagagaagttgcagttacaggaacaactgcaggcagaaacagagttgtgtgctgaggccgaagaactacgtgcgaggcttaccgccaagaagcaggagctggaagaaatttgtcacgacctggaagccagagtggaggaagaggaggaacgctgtcagcacctccaggccgaaaagaaaaagatgcagcagaacattcaggagcttgaagaacaactagaagaggaggagtcagcacggcagaaactgcagcttgaaaaggttacaacagaagcaaaactcaagaaactggaagaagaattggacgatctcttggtggatctggaccatcagcgacaatccgcatgtaatctggaaaagaaacaaaagaagtttgatcagctgctggccgaggagaagaccattagtgctaagtacgccgaggaaagagaccgggctgaggccgaagcgagggaaaaggaaacaaaagctcttagcttggcccgggccctggaagaggccatggaacaaaaggctgaactggagcgtctgaacaagcaattcagaaccgagatggaagacctcatgagtagtaaggacgatgtgggcaaaagcgtgcatgagcttgagaagtcaaaaagggccctggagcagcaggtcgaggagatgaaaacacagttggaagaactagaggacgaactgcaggccacggaagacgctaagctgcggctggaggtgaatcttcaggccatgaaggctcaattcgagcgggacttgcaggggagagacgaacaaagcgaagaaaagaagaagcagctggtcagacaagtcagggagatggaagccgaattggaggacgagcgaaaacaacggagcatggccgtggctgctaggaagaagctcgagatggatctgaaggatcttgaagctcatattgactccgccaataaaaaccgcgacgaagccattaagcagttacggaagctacaggcacagatgaaggactgcatgagagaactcgatgatacccgggcctcccgcgaagagattttggctcaggccaaggagaatgagaagaagctgaaatccatggaagccgagatgatccagctccaggaggagttggccgccgctgaaagggcaaagcggcaagcacagcaagagcgggatgaactggctgacgagattgccaactccagcggtaagggagccctggccctggaggaaaagcgaagactggaagccagaatcgcccaacttgaggaagaactagaggaggaacaggggaacacagaactgatcaacgatcgccttaagaaggcaaacttgcaaatcgatcagattaacacggatctgaatttagaacggtcccacgcacaaaagaacgagaacgcgaggcagcagctggagaggcaaaataaggaacttaaggtgaagctgcaggaaatggaagggaccgtaaaatccaaatataaagcatcaattaccgccctggaggctaaaatcgcccagctcgaagagcagctcgacaatgaaacaaaggaaaggcaggccgcgtgtaagcaagtccggaggaccgaaaaaaagctcaaagatgtgctactgcaggttgacgacgaacgaagaaacgctgagcagtataaggaccaggcggataaggcttctaccagattgaagcagctgaaacgccagttggaggaggctgaagaggaggcccagcgggctaacgcctcaaggcgtaagcttcagcgagagctggaggatgcaaccgagactgcggatgcaatgaaccgcgaagtgtcctcactcaaaaacaaactccgccgtggagatttaccgtttgtggtgcctaggagaatggctaggaaaggcgccggtgacggcagtgatgaagaggtggacggaaaggctgatggcgcagaagcaaaacccgcagaatag

SEQ ID NO: 129090 - DNA, 1689 bp, Artificial Sequence
  derived and/or modified sequence
gccagcggcacccggcggcggtggccccccaccaccagctggcggcggccacggcgtggctgttcacgatcctggacaacttgctggtggacatggacaaccagtgctcgggcaagggccacttggagaaggagtagaaggagtctgacgagctcctggagaagaagacgtccttctcttccctctatgcaacggagtgccactgggctcaggcgccggcctgagaggcggagaccccgcctctgtcggtggcctgggcccgaggaggccatggagcagaaggccgaactagagagactgaataaacagtttcgaactgaaatggaggacctgatgagctccaaggatgatgtgggcaagagcgttcatgagctggagaaaagcaagagggcgctggagcaacaggttgaggagatgaaaactcagctggaagagttagaggacgagttgcaggcaacagaggatgctaaactccgacttgaagtgaacctgcaggcaatgaaagcacagtttgaacgggacttacagggccgggacgagcaatctgaggagaagaaaaagcagctggttcggcaagtacgcgagatggaggctgaactggaagacgaacggaagcagcggtctatggctgtagccgcccgcaagaagttggaaatggatctgaaagacctcgaggcgcatatagactctgctaacaagaatagagacgaggccatcaagcaactgaggaaactccaggcccagatgaaggactgtatgagagagctggatgacactagggcctctcgcgaagaaatactggcccaggcaaaagaaaatgagaaaaaactgaagtccatggaagctgaaatgatccagctacaggaggaactggccgccgccgagcgagctaaaagacaggcccaacaggaacgagacgagctcgcagatgaaatcgccaattcaagtggaaaaggcgcactcgcgctggaggagaagcgtaggctagaggcacgtattgcccagctggaagaggagctggaggaggaacagggcaatactgaactcataaatgaccgacttaaaaaagcaaacttgcagatcgaccaaattaataccgacttgaacctcgaacgtagccacgcacaaaagaacgagaacgcacggcaacagctcgagaggcagaacaaagaactgaaggtgaaattgcaggaaatggaggggactgtcaaatctaagtataaagctagcattaccgccctggaagcaaagatcgcacagctcgaagaacaattggacaacgagactaaggaacgccaagccgcctgcaaacaggtcagaaggaccgagaagaagcttaaggacgtgttgctgcaggtcgacgacgaaagaaggaacgccgagcagtacaaagatcaggctgacaaagcctccacccggctgaagcaattgaagcgacaactggaggaggctgaggaggaggctcaacgcgcaaatgccagtcgtcgtaaactgcagagggagttggaagacgcaactgagaccgcagatgccatgaaccgtgaggtgagcagcctcaaaaacaagcttcgccgcggagatctgcccttcgtagtgcccaggagaatggcgaggaagggggctggcgatggtagcgacgaagaggtggacgggaaggctgatggggccgaagcgaagcccgcggagtag

SEQ ID NO: 129091 - DNA, 657 bp, Artificial Sequence
  derived and/or modified sequence
atggcccagcaggccgccgacaagtacctgtacgtggacaagaactttattaacaacccacttgctcaggctgactgggccgccaagaaactggtatgggtccccagtgacaagtccggattcgaacccgcgtcactaaaggaggaggtaggagaagaagccattgtggagctggtggaaaacggcaagaaggtcaaggtgaataaagatgatatacaaaagatgaatcctcctaaatttagcaaggtagaagatatggccgagctcacctgcctcaatgaagcctcggtgttacataacctgaaggagcgctactatagtgggctgatttacacatactctgggctgttttgtgtggtgattaatccatacaagaaccttcctatctactccgaggaaattgtggagatgtacaagggcaagaagcggcatgagatgccacctcatatatacgcaattaccgacactgcataccgaagcatgatgcaggatcgggaagaccagagcattttatgtacaggagagtccggagcgggaaagacagaaaatacaaaaaaagtgatccaatatctggcttacgtcgcgtcaagccataagagcaagaaggaccaagaagcttacttcaaaaacagagctgttagactgggcgttctctag

SEQ ID NO: 129092 - DNA, 312 bp, Artificial Sequence
  derived and/or modified sequence
atggcccagcaggccgccgacaagtacctgtacgtggacaagaacttcatcaacaatcccttagcacaggcggactgggccgcaaagaaattggtgtgggtaccctctgataagtccggctttgagccggcctctctcaaggaggaagtaggggaggaggcaattgtggaactggttgaaaacggcaagaaggtgaaggtgaacaaggacgatatccagaaaatgaaccctcccaagttttcgaaagtggaggatatggcggagctgacctgcctgaacgaggccagcgtactccataatctgaaggagtag

SEQ ID NO: 129093 - DNA, 7501 bp, Artificial Sequence
  derived and/or modified sequence
gagggcggggcgggaaggcggcgaggagccgagctgggtgcggtgaggcgcgcagatcaccgcggttcctgggcagggcacggaaggctaagcaaggctgacctgctgcagctcccgcctcgtgcgctcgccccacccggccgccgcccgagcgctcgagaaagtcctctcgggagaagcagcgcctgttcccggggcagatccaggttcaggtcctggctataagtcaccatggcacagcaagctgccgataagtatctctatgtggataaaaacttcatcaacaatccgctggcccaggccgactgggctgccaagaagctggtatgggtgccttccgacaagagtggctttgagccagccagcctcaaggaggaggtgggcgaagaggccatcgtggagctggtggagaatgggaagaaggtgaaggtgaacaaggatgacatccagaagatgaacccgcccaagttctccaaggtggaggacatggcagagctcacgtgcctcaacgaagcctcggtgctgcacaacctcaaggagcgttactactcagggctcatctacacctattcaggcctgttctgtgtggtcatcaatccttacaagaacctgcccatctactctgaagagattgtggaaatgtacaagggcaagaagaggcacgagatgccccctcacatctatgccatcacagacaccgcctacaggagtatgatgcaagaccgagaagatcaatccatcttgtgcactggtgaatctggagctggcaagacggagaacaccaagaaggtcatccagtatctggcgtacgtggcgtcctcgcacaagagcaagaaggaccagggcgagctggagcggcagctgctgcaggccaaccccatcctggaggccttcgggaacgccaagaccgtgaagaatgacaactcctcccgcttcggcaaattcattcgcatcaactttgatgtcaatggctacattgttggagccaacattgagacttatcttttggagaaatctcgtgctatccgccaagccaaggaagaacggaccttccacatcttctattatctcctgtctggggctggagagcacctgaagaccgatctcctgttggagccgtacaacaaataccgcttcctgtccaatggacacgtcaccatccccgggcagcaggacaaggacatgttccaggagaccatggaggccatgaggattatgggcatcccagaagaggagcaaatgggcctgctgcgggtcatctcaggggttcttcagctcggcaacatcgtcttcaagaaggagcggaacactgaccaggcgtccatgcccgacaacacagctgcccaaaaggtgtcccatctcttgggtatcaatgtgaccgatttcaccagaggaatcctcaccccgcgcatcaaggtgggacgggattacgtccagaaggcgcagactaaagagcaggctgactttgccatcgaggccttggccaaggcgacctatgagcggatgttccgctggctggtgctgcgcatcaacaaggctctggacaagaccaagaggcagggcgcctccttcatcgggatcctggacattgccggcttcgagatctttgatctgaactcgtttgagcagctgtgcatcaattacaccaatgagaagctgcagcagctcttcaaccacaccatgttcatcctggagcaggaggagtaccagcgcgagggcatcgagtggaacttcatcgactttggcctcgacctgcagccctgcatcgacctcattgagaagccagcaggccccccgggcattctggccctgctggacgaggagtgctggttccccaaagccaccgacaagagcttcgtggagaaggtgatgcaggagcagggcacccaccccaagttccagaagcccaagcagctgaaggacaaagctgatttctgcattatccactatgccggcaaggtggattacaaagctgacgagtggctgatgaagaacatggatcccctgaatgacaacatcgccacactgctccaccagtcctctgacaagtttgtctcggagctgtggaaggatgtggaccgcatcatcggcctggaccaggtggccggcatgtcggagaccgcactgcccggggccttcaagacgcggaagggcatgttccgcactgtggggcagctttacaaggagcagctggccaagctgatggctacgctgaggaacacgaaccccaactttgtccgctgcatcatccccaaccacgagaagaaggccggcaagctggacccgcatctcgtgctggaccagctgcgctgcaacggtgttctcgagggcatccgtatctgccgccagggcttccccaacagggtggtcttccaggagtttcggcagagatatgagatcctgactccaaactccattcccaagggtttcatggacgggaagcaggcgtgcgtgctcatgataaaagccctggagctcgacagcaatctgtaccgcattggccagagcaaagtcttcttccgtgccggtgtgctggcccacctggaggaggagcgagacctgaagatcaccgacgtcatcatagggttccaggcctgctgcaggggctacctggccaggaaagcatttgccaagcggcagcagcagcttaccgccatgaaggtcctccagcggaactgcgctgcctacctgaagctgcggaactggcagtggtggcggctcttcaccaaggtcaagccgctgctgcaggtgagccggcaggaggaggagatgatggccaaggaggaggagctggtgaaggtcagagagaagcagctggctgcggagaacaggctcacggagatggagacgctgcagtctcagctcatggcagagaaattgcagctgcaggagcagctccaggcagaaaccgagctgtgtgccgaggctgaggagctccgggcccgcctgaccgccaagaagcaggaattagaagagatctgccatgacctagaggccagggtggaggaggaggaggagcgctgccagcacctgcaggcggagaagaagaagatgcagcagaacatccaggagcttgaggagcagctggaggaggaggagagcgcccggcagaagctgcagctggagaaggtgaccaccgaggcgaagctgaaaaagctggaggaggagcagatcatcctggaggaccagaactgcaagctggccaaggaaaagaaactgctggaagacagaatagctgagttcaccaccaacctcacagaagaggaggagaaatctaagagcctcgccaagctcaagaacaagcatgaggcaatgatcactgacttggaagagcgcctccgcagggaggagaagcagcgacaggagctggagaagacccgccggaagctggagggagactccacagacctcagcgaccagatcgccgagctccaggcccagatcgcggagctcaagatgcagctggccaagaaagaggaggagctccaggccgccctggccagagtggaagaggaagctgcccagaagaacatggccctcaagaagatccgggagctggaatctcagatctctgaactccaggaagacctggagtctgagcgtgcttccaggaataaagctgagaagcagaaacgggaccttggggaagagctagaggctctgaaaacagagttggaggacacgctggattccacagctgcccagcaggagctcaggtcaaaacgtgagcaggaggtgaacatcctgaagaagaccctggaggaggaggccaagacccacgaggcccagatccaggagatgaggcagaagcactcacaggccgtggaggagctggcggagcagctggagcagacgaagcgggtgaaagcaaacctcgagaaggcaaagcagactctggagaacgagcggggggagctggccaacgaggtgaaggtgctgctgcagggcaaaggggactcggagcacaagcgcaagaaagtggaggcgcagctgcaggagctgcaggtcaagttcaacgagggagagcgcgtgcgcacagagctggccgacaaggtcaccaagctgcaggtggagctggacaacgtgaccgggcttctcagccagtccgacagcaagtccagcaagctcaccaaggacttctccgcgctggagtcccagctgcaggacactcaggagctgctgcaggaggagaaccggcagaagctgagcctgagcaccaagctcaagcaggtggaggacgagaagaattccttccgggagcagctggaggaggaggaggaggccaagcacaacctggagaagcagatcgccaccctccatgcccaggtggccgacatgaaaaagaagatggaggacagtgtggggtgcctggaaactgctgaggaggtgaagaggaagctccagaaggacctggagggcctgagccagcggcacgaggagaaggtggccgcctacgacaagctggagaagaccaagacgcggctgcagcaggagctggacgacctgctggtggacctggaccaccagcgccagagcgcgtgcaacctggagaagaagcagaagaagtttgaccagctcctggcggaggagaagaccatctctgccaagtatgcagaggagcgcgaccgggctgaggcggaggcccgagagaaggagaccaaggctctgtcgctggcccgggccctggaggaagccatggagcagaaggcggagctggagcggctcaacaagcagttccgcacggagatggaggaccttatgagctccaaggatgatgtgggcaagagtgtccacgagctggagaagtccaagcgggccctagagcagcaggtggaggagatgaagacgcagctggaagagctggaggacgagctgcaggccaccgaagatgccaagctgcggttggaggtcaacctgcaggccatgaaggcccagttcgagcgggacctgcagggccgggacgagcagagcgaggagaagaagaagcagctggtcagacaggtgcgggagatggaggcagagctggaggacgagaggaagcagcgctcgatggcagtggccgcccggaagaagctggagatggacctgaaggacctggaggcgcacatcgactcggccaacaagaaccgggacgaagccatcaaacagctgcggaagctgcaggcccagatgaaggactgcatgcgcgagctggatgacacccgcgcctctcgtgaggagatcctggcccaggccaaagagaacgagaagaagctgaagagcatggaggccgagatgatccagttgcaggaggaactggcagccgcggagcgtgccaagcgccaggcccagcaggagcgggatgagctggctgacgagatcgccaacagcagcggcaaaggagccctggcgttagaggagaagcggcgtctggaggcccgcatcgcccagctggaggaggagctggaggaggagcagggcaacacggagctgatcaacgaccggctgaagaaggccaacctgcagatcgaccagatcaacaccgacctgaacctggagcgcagccacgcccagaagaacgagaatgctcggcagcagctggaacgccagaacaaggagcttaaggtcaagctgcaggagatggagggcactgtcaagtccaagtacaaggcctccatcaccgccctcgaggccaagattgcacagctggaggagcagctggacaacgagaccaaggagcgccaggcagcctgcaaacaggtgcgtcggaccgagaagaagctgaaggatgtgctgctgcaggtggatgacgagcggaggaacgccgagcagtacaaggaccaggccgacaaggcatctacccgcctgaagcagctcaagcggcagctggaggaggccgaagaggaggcccagcgggccaacgcctcccgccggaaactgcagcgcgagctggaggacgccactgagacggccgatgccatgaaccgcgaagtcagctccctaaagaacaagctcaggcgcggggacctgccgtttgtcgtgccccgccgaatggcccggaaaggcgccggggatggctccgacgaagaggtagatggcaaagcggatggggctgaggccaaacctgccgaataagcctcttctcctgcagcctgagatggatggacagacagacaccacagcctccccttcccagaccccgcagcacgcctctccccaccttcttgggactgctgtgaacatgcctcctcctgccctccgccccgtccccccatcccgtttccctccaggtgttgttgagggcatttggcttcctctgctgcatccccttccagctccctcccctgctcagaatctgataccaaagagacagggcccgggcccaggcagagagcgaccagcaggctcctcagccctctcttgccaaaaagcacaagatgttgaggcgagcagggcaggcccccggggaggggccagagttttctatgaatctatttttcttcagactgaggccttttggtagtcggagcccccgcagtcgtcagcctccctgacgtctgccaccagcgcccccactcctcctcctttctttgctgtttgcaatcacacgtggtgacctcacacacctctgccccttgggcctcccactcccatggctctgggcggtccagaaggagcaggccctgggcctccacctctgtgcagggcacagaaggctggggtggggggaggagtggattcctccccaccctgtcccaggcagcgccactgtccgctgtctccctcctgattctaaaatgtctcaagtgcaatgccccctcccctcctttaccgaggacagcctgcctctgccacagcaaggctgtcggggtcaagctggaaaggccagcagccttccagtggcttctcccaacactcttggggaccaaatatatttaatggttaagggacttgtcccaagtctgacagccagagcgttagaggggccagcggccctcccaggcgatcttgtgtctactctaggactgggcccgagggtggtttacctgcaccgttgactcagtatagtttaaaaatctgccacctgcacaggtatttttgaaagcaaaataaggttttcttttttcccctttcttgtaataaatgataaaattccgagtctttctcactgcctttgtttagaagagagtagctcgtcctcactggtctacactggttgccgaatttacttgtattcctaactgttttgtatatgctgcattgagacttacggcaagaaggcattttttttttttaaaggaaacaaactctcaaatcatgaagtgatataaaagctgcatatgcctacaaagctctgaattcaggtcccagttgctgtcacaaaggagtgagtgaaactcccaccctacccccttttttatataataaaagtgccttagcatgtgttgcagctgtcaccactacagtaagctggtttacagatgttttccactgagcatcacaataaagagaaccatgtgct

SEQ ID NO: 129094 - DNA, 6179 bp, Artificial Sequence
  derived and/or modified sequence
gagggcggggcgggaaggcggcgaggagccgagctgggtgcggtgaggcgcgcagatcaccgcggttcctgggcagggcacggaaggctaagcaaggctgacctgctgcagctcccgcctcgtgcgctcgccccacccggccgccgcccgagcgctcgagaaagtcctctcgggagaagcagcgcctgttcccggggcagatccaggttcaggtcctggctataagtcaccatggcacagcaagctgccgataagtatctctatgtggataaaaacttcatcaacaatccgctggcccaggccgactgggctgccaagaagctggtatgggtgccttccgacaagagtggctttgagccagccagcctcaaggaggaggtgggcgaagaggccatcgtggagctggtggagaatgggaagaaggtgaaggtgaacaaggatgacatccagaagatgaacccgcccaagttctccaaggtggaggacatggcagagctcacgtgcctcaacgaagcctcggtgctgcacaacctcaaggagcgttactactcagggctcatctacacctattcaggcctgttctgtgtggtcatcaatccttacaagaacctgcccatctactctgaagagattgtggaaatgtacaagggcaagaagaggcacgagatgccccctcacatctatgccatcacagacaccgcctacaggagtatgatgcaagaccgagaagatcaatccatcttgtgcactggtgaatctggagctggcaagacggagaacaccaagaaggtcatccagtatctggcgtacgtggcgtcctcgcacaagagcaagaaggaccagggcgagctggagcggcagctgctgcaggccaaccccatcctggaggccttcgggaacgccaagaccgtgaagaatgacaactcctcccgcttcggcaaattcattcgcatcaactttgatgtcaatggctacattgttggagccaacattgagacttatcttttggagaaatctcgtgctatccgccaagccaaggaagaacggaccttccacatcttctattatctcctgtctggggctggagagcacctgaagaccgatctcctgttggagccgtacaacaaataccgcttcctgtccaatggacacgtcaccatccccgggcagcaggacaaggacatgttccaggagaccatggaggccatgaggattatgggcatcccagaagaggagcaaatgggcctgctgcgggtcatctcaggggttcttcagctcggcaacatcgtcttcaagaaggagcggaacactgaccaggcgtccatgcccgacaacacagctgcccaaaaggtgtcccatctcttgggtatcaatgtgaccgatttcaccagaggaatcctcaccccgcgcatcaaggtgggacgggattacgtccagaaggcgcagactaaagagcaggctgactttgccatcgaggccttggccaaggcgacctatgagcggatgttccgctggctggtgctgcgcatcaacaaggctctggacaagaccaagaggcagggcgcctccttcatcgggatcctggacattgccggcttcgagatctttgatctgaactcgtttgagcagctgtgcatcaattacaccaatgagaagctgcagcagctcttcaaccacaccatgttcatcctggagcaggaggagtaccagcgcgagggcatcgagtggaacttcatcgactttggcctcgacctgcagccctgcatcgacctcattgagaagccagcaggccccccgggcattctggccctgctggacgaggagtgctggttccccaaagccaccgacaagagcttcgtggagaaggtgatgcaggagcagggcacccaccccaagttccagaagcccaagcagctgaaggacaaagctgatttctgcattatccactatgccggcaaggtggattacaaagctgacgagtggctgatgaagaacatggatcccctgaatgacaacatcgccacactgctccaccagtcctctgacaagtttgtctcggagctgtggaaggatgtggaccgcatcatcggcctggaccaggtggccggcatgtcggagaccgcactgcccggggccttcaagacgcggaagggcatgttccgcactgtggggcagctttacaaggagcagctggccaagctgatggctacgctgaggaacacgaaccccaactttgtccgctgcatcatccccaaccacgagaagaaggccggcaagctggacccgcatctcgtgctggaccagctgcgctgcaacggtgttctcgagggcatccgtatctgccgccagggcttccccaacagggtggtcttccaggagtttcggcagagatatgagatcctgactccaaactccattcccaagggtttcatggacgggaagcaggcgtgcgtgctcatgataaaagccctggagctcgacagcaatctgtaccgcattggccagagcaaagtcttcttccgtgccggtgtgctggcccacctggaggaggagcgagacctgaagatcaccgacgtcatcatagggttccaggcctgctgcaggggctacctggccaggaaagcatttgccaagcggcagcagcagcttaccgccatgaaggtcctccagcggaactgcgctgcctacctgaagctgcggaactggcagtggtggcggctcttcaccaaggtcaagccgctgctgcaggtgagccggcaggaggaggagatgatggccaaggaggaggagctggtgaaggtcagagagaagcagctggctgcggagaacaggctcacggagatggagacgctgcagtctcagctcatggcagagaaattgcagctgcaggagcagctccaggcagaaaccgagctgtgtgccgaggctgaggagctccgggcccgcctgaccgccaagaagcaggaattagaagagatctgccatgacctagaggccagggtggaggaggaggaggagcgctgccagcacctgcaggcggagaagaagaagatgcagcagaacatccaggagcttgaggagcagctggaggaggaggagagcgcccggcagaagctgcagctggagaaggtgaccaccgaggcgaagctgaaaaagctggaggaggagctggacgacctgctggtggacctggaccaccagcgccagagcgcgtgcaacctggagaagaagcagaagaagtttgaccagctcctggcggaggagaagaccatctctgccaagtatgcagaggagcgcgaccgggctgaggcggaggcccgagagaaggagaccaaggctctgtcgctggcccgggccctggaggaagccatggagcagaaggcggagctggagcggctcaacaagcagttccgcacggagatggaggaccttatgagctccaaggatgatgtgggcaagagtgtccacgagctggagaagtccaagcgggccctagagcagcaggtggaggagatgaagacgcagctggaagagctggaggacgagctgcaggccaccgaagatgccaagctgcggttggaggtcaacctgcaggccatgaaggcccagttcgagcgggacctgcagggccgggacgagcagagcgaggagaagaagaagcagctggtcagacaggtgcgggagatggaggcagagctggaggacgagaggaagcagcgctcgatggcagtggccgcccggaagaagctggagatggacctgaaggacctggaggcgcacatcgactcggccaacaagaaccgggacgaagccatcaaacagctgcggaagctgcaggcccagatgaaggactgcatgcgcgagctggatgacacccgcgcctctcgtgaggagatcctggcccaggccaaagagaacgagaagaagctgaagagcatggaggccgagatgatccagttgcaggaggaactggcagccgcggagcgtgccaagcgccaggcccagcaggagcgggatgagctggctgacgagatcgccaacagcagcggcaaaggagccctggcgttagaggagaagcggcgtctggaggcccgcatcgcccagctggaggaggagctggaggaggagcagggcaacacggagctgatcaacgaccggctgaagaaggccaacctgcagatcgaccagatcaacaccgacctgaacctggagcgcagccacgcccagaagaacgagaatgctcggcagcagctggaacgccagaacaaggagcttaaggtcaagctgcaggagatggagggcactgtcaagtccaagtacaaggcctccatcaccgccctcgaggccaagattgcacagctggaggagcagctggacaacgagaccaaggagcgccaggcagcctgcaaacaggtgcgtcggaccgagaagaagctgaaggatgtgctgctgcaggtggatgacgagcggaggaacgccgagcagtacaaggaccaggccgacaaggcatctacccgcctgaagcagctcaagcggcagctggaggaggccgaagaggaggcccagcgggccaacgcctcccgccggaaactgcagcgcgagctggaggacgccactgagacggccgatgccatgaaccgcgaagtcagctccctaaagaacaagctcaggcgcggggacctgccgtttgtcgtgccccgccgaatggcccggaaaggcgccggggatggctccgacgaagaggtagatggcaaagcggatggggctgaggccaaacctgccgaataagcctcttctcctgcagcctgagatggatggacagacagacaccacagcctccccttcccagaccccgcagcacgcctctccccaccttcttgggactgctgtgaacatgcctcctcctgccctccgccccgtccccccatcccgtttccctccaggtgttgttgagggcatttggcttcctctgctgcatccccttccagctccctcccctgctcagaatctgataccaaagagacagggcccgggcccaggcagagagcgaccagcaggctcctcagccctctcttgccaaaaagcacaagatgttgaggcgagcagggcaggcccccggggaggggccagagttttctatgaatctatttttcttcagactgaggccttttggtagtcggagcccccgcagtcgtcagcctccctgacgtctgccaccagcgcccccactcctcctcctttctttgctgtttgcaatcacacgtggtgacctcacacacctctgccccttgggcctcccactcccatggctctgggcggtccagaaggagcaggccctgggcctccacctctgtgcagggcacagaaggctggggtggggggaggagtggattcctccccaccctgtcccaggcagcgccactgtccgctgtctccctcctgattctaaaatgtctcaagtgcaatgccccctcccctcctttaccgaggacagcctgcctctgccacagcaaggctgtcggggtcaagctggaaaggccagcagccttccagtggcttctcccaacactcttggggaccaaatatatttaatggttaagggacttgtcccaagtctgacagccagagcgttagaggggccagcggccctcccaggcgatcttgtgtctactctaggactgggcccgagggtggtttacctgcaccgttgactcagtatagtttaaaaatctgccacctgcacaggtatttttgaaagcaaaataaggttttcttttttcccctttcttgtaataaatgataaaattccgagtctttctcactgcctttgtttagaagagagtagctcgtcctcactggtctacactggttgccgaatttacttgtattcctaactgttttgtatatgctgcattgagacttacggcaagaaggcattttttttttttaaaggaaacaaactctcaaatcatgaagtgatataaaagctgcatatgcctacaaagctctgaattcaggtcccagttgctgtcacaaaggagtgagtgaaactcccaccctacccccttttttatataataaaagtgccttagcatgtgttgcagctgtcaccactacagtaagctggtttacagatgttttccactgagcatcacaataaagagaaccatgtgctacga

SEQ ID NO: 129095 - DNA, 7503 bp, Artificial Sequence
  derived and/or modified sequence
gagggcggggcgggaaggcggcgaggagccgagctgggtgcggtgaggcgcgcagatcaccgcggttcctgggcagggcacggaaggctaagcaaggctgacctgctgcagctcccgcctcgtgcgctcgccccacccggccgccgcccgagcgctcgagaaagtcctctcgggagaagcagcgcctgttcccggggcagatccaggttcaggtcctggctataagtcaccatggcacagcaagctgccgataagtatctctatgtggataaaaacttcatcaacaatccgctggcccaggccgactgggctgccaagaagctggtatgggtgccttccgacaagagtggctttgagccagccagcctcaaggaggaggtgggcgaagaggccatcgtggagctggtggagaatgggaagaaggtgaaggtgaacaaggatgacatccagaagatgaacccgcccaagttctccaaggtggaggacatggcagagctcacgtgcctcaacgaagcctcggtgctgcacaacctcaaggagcgttactactcagggctcatctacacctattcaggcctgttctgtgtggtcatcaatccttacaagaacctgcccatctactctgaagagattgtggaaatgtacaagggcaagaagaggcacgagatgccccctcacatctatgccatcacagacaccgcctacaggagtatgatgcaagaccgagaagatcaatccatcttgtgcactggtgaatctggagctggcaagacggagaacaccaagaaggtcatccagtatctggcgtacgtggcgtcctcgcacaagagcaagaaggaccagggcgagctggagcggcagctgctgcaggccaaccccatcctggaggccttcgggaacgccaagaccgtgaagaatgacaactcctcccgcttcggcaaattcattcgcatcaactttgatgtcaatggctacattgttggagccaacattgagacttatcttttggagaaatctcgtgctatccgccaagccaaggaagaacggaccttccacatcttctattatctcctgtctggggctggagagcacctgaagaccgatctcctgttggagccgtacaacaaataccgcttcctgtccaatggacacgtcaccatccccgggcagcaggacaaggacatgttccaggagaccatggaggccatgaggattatgggcatcccagaagaggagcaaatgggcctgctgcgggtcatctcaggggttcttcagctcggcaacatcgtcttcaagaaggagcggaacactgaccaggcgtccatgcccgacaacacagctgcccaaaaggtgtcccatctcttgggtatcaatgtgaccgatttcaccagaggaatcctcaccccgcgcatcaaggtgggacgggattacgtccagaaggcgcagactaaagagcaggctgactttgccatcgaggccttggccaaggcgacctatgagcggatgttccgctggctggtgctgcgcatcaacaaggctctggacaagaccaagaggcagggcgcctccttcatcgggatcctggacattgccggcttcgagatctttgatctgaactcgtttgagcagctgtgcatcaattacaccaatgagaagctgcagcagctcttcaaccacaccatgttcatcctggagcaggaggagtaccagcgcgagggcatcgagtggaacttcatcgactttggcctcgacctgcagccctgcatcgacctcattgagaagccagcaggccccccgggcattctggccctgctggacgaggagtgctggttccccaaagccaccgacaagagcttcgtggagaaggtgatgcaggagcagggcacccaccccaagttccagaagcccaagcagctgaaggacaaagctgatttctgcattatccactatgccggcaaggtggattacaaagctgacgagtggctgatgaagaacatggatcccctgaatgacaacatcgccacactgctccaccagtcctctgacaagtttgtctcggagctgtggaaggatgtggaccgcatcatcggcctggaccaggtggccggcatgtcggagaccgcactgcccggggccttcaagacgcggaagggcatgttccgcactgtggggcagctttacaaggagcagctggccaagctgatggctacgctgaggaacacgaaccccaactttgtccgctgcatcatccccaaccacgagaagaaggccggcaagctggacccgcatctcgtgctggaccagctgcgctgcaacggtgttctcgagggcatccgtatctgccgccagggcttccccaacagggtggtcttccaggagtttcggcagagatatgagatcctgactccaaactccattcccaagggtttcatggacgggaagcaggcgtgcgtgctcatgataaaagccctggagctcgacagcaatctgtaccgcattggccagagcaaagtcttcttccgtgccggtgtgctggcccacctggaggaggagcgagacctgaagatcaccgacgtcatcatagggttccaggcctgctgcaggggctacctggccaggaaagcatttgccaagcggcagcagcagcttaccgccatgaaggtcctccagcggaactgcgctgcctacctgaagctgcggaactggcagtggtggcggctcttcaccaaggtcaagccgctgctgcaggtgagccggcaggaggaggagatgatggccaaggaggaggagctggtgaaggtcagagagaagcagctggctgcggagaacaggctcacggagatggagacgctgcagtctcagctcatggcagagaaattgcagctgcaggagcagctccaggcagaaaccgagctgtgtgccgaggctgaggagctccgggcccgcctgaccgccaagaagcaggaattagaagagatctgccatgacctagaggccagggtggaggaggaggaggagcgctgccagcacctgcaggcggagaagaagaagatgcagcagaacatccaggagcttgaggagcagctggaggaggaggagagcgcccggcagaagctgcagctggagaaggtgaccaccgaggcgaagctgaaaaagctggaggaggagcagatcatcctggaggaccagaactgcaagctggccaaggaaaagaaactgctggaagacagaatagctgagttcaccaccaacctcacagaagaggaggagaaatctaagagcctcgccaagctcaagaacaagcatgaggcaatgatcactgacttggaagagcgcctccgcagggaggagaagcagcgacaggagctggagaagacccgccggaagctggagggagactccacagacctcagcgaccagatcgccgagctccaggcccagatcgcggagctcaagatgcagctggccaagaaagaggaggagctccaggccgccctggccagagtggaagaggaagctgcccagaagaacatggccctcaagaagatccgggagctggaatctcagatctctgaactccaggaagacctggagtctgagcgtgcttccaggaataaagctgagaagcagaaacgggaccttggggaagagctagaggctctgaaaacagagttggaggacacgctggattccacagctgcccagcaggagctcaggtcaaaacgtgagcaggaggtgaacatcctgaagaagaccctggaggaggaggccaagacccacgaggcccagatccaggagatgaggcagaagcactcacaggccgtggaggagctggcggagcagctggagcagacgaagcgggtgaaagcaaacctcgagaaggcaaagcagactctggagaacgagcggggggagctggccaacgaggtgaaggtgctgctgcagggcaaaggggactcggagcacaagcgcaagaaagtggaggcgcagctgcaggagctgcaggtcaagttcaacgagggagagcgcgtgcgcacagagctggccgacaaggtcaccaagctgcaggtggagctggacaacgtgaccgggcttctcagccagtccgacagcaagtccagcaagctcaccaaggacttctccgcgctggagtcccagctgcaggacactcaggagctgctgcaggaggagaaccggcagaagctgagcctgagcaccaagctcaagcaggtggaggacgagaagaattccttccgggagcagctggaggaggaggaggaggccaagcacaacctggagaagcagatcgccaccctccatgcccaggtggccgacatgaaaaagaagatggaggacagtgtggggtgcctggaaactgctgaggaggtgaagaggaagctccagaaggacctggagggcctgagccagcggcacgaggagaaggtggccgcctacgacaagctggagaagaccaagacgcggctgcagcaggagctggacgacctgctggtggacctggaccaccagcgccagagcgcgtgcaacctggagaagaagcagaagaagtttgaccagctcctggcggaggagaagaccatctctgccaagtatgcagaggagcgcgaccgggctgaggcggaggcccgagagaaggagaccaaggctctgtcgctggcccgggcccgaggaagccatggagcagaaggcggagctggagcggctcaacaagcagttccgcacggagatggaggaccttatgagctccaaggatgatgtgggcaagagtgtccacgagctggagaagtccaagcgggccctagagcagcaggtggaggagatgaagacgcagctggaagagctggaggacgagctgcaggccaccgaagatgccaagctgcggttggaggtcaacctgcaggccatgaaggcccagttcgagcgggacctgcagggccgggacgagcagagcgaggagaagaagaagcagctggtcagacaggtgcgggagatggaggcagagctggaggacgagaggaagcagcgctcgatggcagtggccgcccggaagaagctggagatggacctgaaggacctggaggcgcacatcgactcggccaacaagaaccgggacgaagccatcaaacagctgcggaagctgcaggcccagatgaaggactgcatgcgcgagctggatgacacccgcgcctctcgtgaggagatcctggcccaggccaaagagaacgagaagaagctgaagagcatggaggccgagatgatccagttgcaggaggaactggcagccgcggagcgtgccaagcgccaggcccagcaggagcgggatgagctggctgacgagatcgccaacagcagcggcaaaggagccctggcgttagaggagaagcggcgtctggaggcccgcatcgcccagctggaggaggagctggaggaggagcagggcaacacggagctgatcaacgaccggctgaagaaggccaacctgcagatcgaccagatcaacaccgacctgaacctggagcgcagccacgcccagaagaacgagaatgctcggcagcagctggaacgccagaacaaggagcttaaggtcaagctgcaggagatggagggcactgtcaagtccaagtacaaggcctccatcaccgccctcgaggccaagattgcacagctggaggagcagctggacaacgagaccaaggagcgccaggcagcctgcaaacaggtgcgtcggaccgagaagaagctgaaggatgtgctgctgcaggtggatgacgagcggaggaacgccgagcagtacaaggaccaggccgacaaggcatctacccgcctgaagcagctcaagcggcagctggaggaggccgaagaggaggcccagcgggccaacgcctcccgccggaaactgcagcgcgagctggaggacgccactgagacggccgatgccatgaaccgcgaagtcagctccctaaagaacaagctcaggcgcggggacctgccgtttgtcgtgccccgccgaatggcccggaaaggcgccggggatggctccgacgaagaggtagatggcaaagcggatggggctgaggccaaacctgccgaataagcctcttctcctgcagcctgagatggatggacagacagacaccacagcctccccttcccagaccccgcagcacgcctctccccaccttcttgggactgctgtgaacatgcctcctcctgccctccgccccgtccccccatcccgtttccctccaggtgttgttgagggcatttggcttcctctgctgcatccccttccagctccctcccctgctcagaatctgataccaaagagacagggcccgggcccaggcagagagcgaccagcaggctcctcagccctctcttgccaaaaagcacaagatgttgaggcgagcagggcaggcccccggggaggggccagagttttctatgaatctatttttcttcagactgaggccttttggtagtcggagcccccgcagtcgtcagcctccctgacgtctgccaccagcgcccccactcctcctcctttctttgctgtttgcaatcacacgtggtgacctcacacacctctgccccttgggcctcccactcccatggctctgggcggtccagaaggagcaggccctgggcctccacctctgtgcagggcacagaaggctggggtggggggaggagtggattcctccccaccctgtcccaggcagcgccactgtccgctgtctccctcctgattctaaaatgtctcaagtgcaatgccccctcccctcctttaccgaggacagcctgcctctgccacagcaaggctgtcggggtcaagctggaaaggccagcagccttccagtggcttctcccaacactcttggggaccaaatatatttaatggttaagggacttgtcccaagtctgacagccagagcgttagaggggccagcggccctcccaggcgatcttgtgtctactctaggactgggcccgagggtggtttacctgcaccgttgactcagtatagtttaaaaatctgccacctgcacaggtatttttgaaagcaaaataaggttttcttttttcccctttcttgtaataaatgataaaattccgagtctttctcactgcctttgtttagaagagagtagctcgtcctcactggtctacactggttgccgaatttacttgtattcctaactgttttgtatatgctgcattgagacttacggcaagaaggcattttttttttttaaaggaaacaaactctcaaatcatgaagtgatataaaagctgcatatgcctacaaagctctgaattcaggtcccagttgctgtcacaaaggagtgagtgaaactcccaccctacccccttttttatataataaaagtgccttagcatgtgttgcagctgtcaccactacagtaagctggtttacagatgttttccactgagcatcacaataaagagaaccatgtgctacga

SEQ ID NO: 129096 - DNA, 789 bp, Artificial Sequence
  derived and/or modified sequence
aggggctggtgttcggggctgccccgagcccagctctgggagcttattttgtcatcacagtggcactgtcctggctataagtcaccatggcacagcaagctgccgataagtatctctatgtggataaaaacttcatcaacaatccgctggcccaggccgactgggctgccaagaagctggtatgggtgccttccgacaagagtggctttgagccagccagcctcaaggaggaggtgggcgaagaggccatcgtggagctggtggagaatgggaagaaggtgaaggtgaacaaggatgacatccagaagatgaacccgcccaagttctccaaggtggaggacatggcagagctcacgtgcctcaacgaagcctcggtgctgcacaacctcaaggagcgttactactcagggctcatctacacctattcaggcctgttctgtgtggtcatcaatccttacaagaacctgcccatctactctgaagagattgtggaaatgtacaagggcaagaagaggcacgagatgccccctcacatctatgccatcacagacaccgcctacaggagtatgatgcaagaccgagaagatcaatccatcttgtgcactggtgaatctggagctggcaagacggagaacaccaagaaggtcatccagtatctggcgtacgtggcgtcctcgcacaagagcaagaaggaccaggaggcctattttaaaaacagagctgtgaggttaggagttctctagctgtgcttttccatctctgaatttgcagtaaaatccatttcccaag

SEQ ID NO: 129097 - DNA, 449 bp, Artificial Sequence
  derived and/or modified sequence
ggggctggtgttcggggctgccccgagcccagctctgggagcttattttgtcatcacagtggcactgcagcctgtctacctcctggctgcggctcgtcctcagatgccttctgtgaaggctgtcctggctataagtcaccatggcacagcaagctgccgataagtatctctatgtggataaaaacttcatcaacaatccgctggcccaggccgactgggctgccaagaagctggtatgggtgccttccgacaagagtggctttgagccagccagcctcaaggaggaggtgggcgaagaggccatcgtggagctggtggagaatgggaagaaggtgaaggtgaacaaggatgacatccagaagatgaacccgcccaagttctccaaggtggaggacatggcagagctcacgtgcctcaacgaagcctcggtgctgcacaacctcaaggag

SEQ ID NO: 129098 - DNA, 4149 bp, Artificial Sequence
  derived and/or modified sequence
atgtacaagggtaagaaacgacacgaaatgccaccccatatctatgccatcacagacaccgcttataggtcaatgatgcaggatcgggaggaccagagcattctgtgtaccggcgaatccggcgctggcaaaactgaaaacaccaaaaaggtgattcaatacttggcctatgtcgcatcaagccataaaagtaagaaggatcagggagaactcgagagacagctgttacaggctaaccccatcctggaggcgtttggcaacgcaaagaccgtgaagaatgacaatagtagtcgattcgggaagtttatcagaattaactttgacgttaatggctacattgtgggagcaaacatcgagacatacctgctggagaaatcacgtgcaattcggcaggcgaaagaggaaagaacctttcatatattctattacttactgtctggtgctggtgaacacttgaaaacggacctgcttctggagccgtacaataaatacaggttcctgagcaatggccatgttaccatacctggccagcaggacaaggacatgttccaagaaactatggaggccatgcgaataatgggaatccccgaggaagagcaaatgggcctactgcgagtgatatctggcgtcctgcagcttggcaacattgtgttcaaaaaagaaaggaataccgaccaggcttcaatgccggacaacacagccgcacaaaaggtgagccatctcctgggtataaacgtcaccgattttacccggggtattctgactccacggattaaagtgggcagggattacgtccagaaagcgcagacaaaagaacaagcagatttcgctatagaggccctggcgaaggctacctacgaaaggatgtttcggtggctcgtgctgagaatcaataaggcactggacaaaaccaagaggcaaggcgcttccttcatcggtattctcgacattgcagggtttgagatcttcgatctaaatagcttcgagcagctttgcattaactatactaatgagaaactgcagcaactgttcaaccataccatgttcatcctagaacaggaggagtaccagcgtgaagggattgagtggaactttattgactttggcttggatctccagccatgtattgatctgatcgagaagccagccggaccgcctggtattctggcactgttggatgaggagtgttggtttccaaaagccactgacaaatcatttgttgagaaagtgatgcaggagcagggcactcatccaaaattccaaaaaccaaagcaactgaaagataaggcggatttctgcattattcactatgctggcaaggtagactacaaggccgatgagtggctcatgaaaaatatggaccctcttaacgataatattgccacactactgcaccagagttctgacaagttcgtaagcgaactatggaaggacgtcgatcgcatcatagggctagaccaggtcgcgggtatgtctgaaacagccttgccgggagcgtttaaaacacgtaagggcatgttccgtactgttggacaattgtataaagaacaactggcaaagctgatggccaccttgcggaacaccaaccctaattttgtgcggtgtatcatccccaaccacgaaaagaaggctggcaagctggatccgcacttagttcttgatcagctccggtgtaacggcgtattagaaggtatccgcatttgcaggcaaggattccctaaccgggtggtatttcaggagtttcgtcagaggtacgagatcctgactccgaactccattcccaaaggcttcatggatggcaaacaggcatgcgttttgatgatcaaggcactggagctggattctaatctataccggatcggccagagtaaagtgttctttagagctggtgttctggcccatctggaggaagaacgggacctgaagatcactgacgtgatcattggatttcaggcttgctgtagggggtacctagcacgcaaggccttcgccaagaggcagcagcagctgaccgccatgaaagtactgcagcgaaattgcgccgcatacttgaagctaagaaattggcagtggtggaggctcttcaccaaagtgaagccgctgctccaggtatctcgccaggaggaggagatgatggctaaggaggaagagctcgtaaaagtgagggagaagcagttggccgctgaaaaccgactgaccgagatggagaccttgcagtcccagttaatggccgaaaagcttcaactgcaggaacaattgcaggcagagaccgaactgtgtgcggaggctgaagaattgcgagccaggttgactgcaaagaagcaggaactggaagagatttgtcacgatctggaagcgagagttgaagaagaagaggaaaggtgccagcacttacaagccgagaagaaaaaaatgcagcagaacatccaagaactcgaagaacagctagaggaagaggagtcagcacgtcagaagttacaattagagaaggtgactactgaagctaaattgaagaagctagaggaagagttagacgacctgctggttgacctggatcaccaaagacaatcggcatgtaacctggagaaaaagcagaaaaagttcgatcagttgttagctgaggagaagacaattagtgcgaaatatgccgaagagagggacagagccgaagcagaagcccgtgaaaaagagacaaaagctcttagcttagccagagcactcgaggaagctatggagcaaaaagctgagctcgagagactcaataagcagttccgaaccgagatggaggatctgatgagtagtaaggatgatgtcggcaagtctgtgcatgagctggagaagtccaagagggcccttgaacagcaggtcgaggagatgaagacacagctcgaggagcttgaggatgagcttcaggccaccgaggacgccaagcttcgcctcgaggtcaacttacaggccatgaaggctcagttcgaaagggatttacagggccgtgatgagcagtctgaggaaaaaaaaaagcagcttgtgaggcaggtgcgagaaatggaggccgaactcgaggacgagcgtaagcagagaagcatggcggtggccgctcggaagaaactagagatggacttgaaggatctggaagcacatatcgactccgctaacaaaaaccgagatgaagccatcaagcagctccgaaagttacaagctcagatgaaagactgcatgagggagttggacgatacacgagcctcgcgggaagagatcctggcacaggctaaagagaatgaaaaaaaactgaaatctatggaagccgaaatgattcagctgcaggaagaacttgccgctgccgagagagctaagagacaggcccagcaagagagagacgagctagcagatgagatcgcaaatagtagtgggaagggagcccttgcgctcgaggagaaacggcgtctggaggccagaatcgcacagcttgaagaagagttggaagaggagcaggggaacacagagcttattaatgatcggctcaaaaaagccaatctgcagattgatcaaattaacactgacttaaatctggagcggtcacacgcgcagaagaacgaaaatgccagacagcaactcgagcgccagaacaaagaattaaaggtgaagctgcaagagatggaggggacagtaaaaagtaagtacaaggccagcatcaccgcacttgaggctaaaattgctcagttggaagaacaactggacaacgagaccaaagagcgtcaggccgcatgcaaacaggtgcgcaggactgagaaaaagctgaaggatgtgctcctgcaggtggatgacgaacgccgaaatgctgagcagtacaaggatcaggcagacaaggcttctactaggctgaagcaacttaagcgccagttagaggaagccgaggaggaggctcaacgcgcaaatgcttctcgcagaaagctccagcgagagctcgaggatgcgaccgaaaccgccgacgccatgaacagagaagtctccagtctcaagaacaagctgcgtcgcggagacttgccattcgtggttcccagacgaatggcgcgaaagggggcaggcgatggatccgacgaggaggtggatggaaaggcggacggtgctgaagcaaaacccgcagagtag

SEQ ID NO: 129099 - DNA, 1689 bp, Artificial Sequence
  derived and/or modified sequence
gcctcgggaacgaggcggagatggcccccaacaacaagttggcggcgtcctcgtaggggctgctcccgcagttggaccacttgctggtggacgtggacgacctccgcacgggcaagagccacttggagaagaagccgacgatccttgactagctcctggcggagaagacggccttccctcccctccatgcagagatccgcgaccggccttcgtaggaggccagagcggagacggcctcggctgtgcaggtggccgggtcccgaagaagccatggagcagaaagctgagctggagcgcttgaataagcagtttcgcaccgagatggaggatcttatgagctctaaagatgatgtgggcaagagcgtgcacgagctcgaaaaaagtaagagagcccttgaacagcaggttgaggagatgaagacccaactggaggaactggaagacgagctccaggccacggaggacgccaagttaagacttgaggtcaacctccaggccatgaaggcccagttcgagcgcgacctgcagggcagagacgagcagagtgaagagaagaagaaacaattggtgcggcaagtgcgggaaatggaagccgagctcgaagatgaaagaaaacagcgcagtatggccgtcgccgcaaggaagaaactggagatggacctgaaagacctcgaggcccacatagattcagcaaataagaatagagacgaggctatcaagcagttgcggaagctgcaggcccagatgaaagactgcatgcgggagttagatgatacccgagcctcaagggaagaaattttagcacaggcaaaggaaaacgagaagaagttgaaaagtatggaggccgagatgatccaactgcaagaggagctggccgcagccgagcgtgccaaaagacaggcccagcaggaacgggacgagttggctgacgagatcgctaattcctcaggcaagggggcattggccctcgaggaaaagcggagattggaggccaggatcgcccagcttgaggaggagctcgaagaggaacaagggaacacagaattaatcaatgacagactcaaaaaggctaacctgcagatcgatcagattaacacagacttaaacctggagagatcacacgcccagaagaacgagaatgcacgccagcaactagagagacagaataaggaactgaaggtgaagttgcaggaaatggaaggtactgtgaagagcaagtacaaggcatctattacagcactcgaggcgaaaattgcccagttggaggagcagttggacaacgagacaaaggagcgccaagcagcatgcaaacaagtgagacgaactgaaaagaaactgaaggacgtgctcctgcaggtggacgatgagcgcagaaatgccgagcagtataaagatcaggcggacaaggcatccacacgcctgaaacagctgaaaaggcaactagaggaagccgaagaggaggcacagcgagcaaacgcctctcgacggaaactgcaacgcgaactggaggacgccacagaaaccgcagacgctatgaaccgcgaggtcagttcgcttaaaaacaaactgagaagaggggatcttccatttgtagtaccgcgaagaatggctaggaaaggcgctggtgacggctctgacgaggaggtggacgggaaggctgacggggctgaggctaagccggcagagtag

SEQ ID NO: 129100 - DNA, 657 bp, Artificial Sequence
  derived and/or modified sequence
atggcccagcaggcagcagataagtacctctatgtggacaaaaatttcattaacaatcccctcgcccaggctgattgggcagctaagaaattggtgtgggtcccatctgataaatcagggttcgaacctgcttctctgaaggaggaggtaggagaggaagcaatcgtggagctcgtcgagaatggaaagaaagtgaaagtgaataaggacgatatccagaagatgaatcctccaaagttttccaaagtcgaggacatggccgagctcacatgtttaaacgaggcatccgttttacataatctgaaagagcgctactactcagggctgatatacacctacagtggcttattctgcgtcgtgataaacccttataagaacctgcccatttacagcgaagagattgtggagatgtataaaggcaaaaaacgccacgagatgcctcctcacatttacgctatcacggataccgcatatcggtccatgatgcaagatcgggaggatcagtccatcctgtgcacaggcgaaagcggcgcaggcaagaccgagaacaccaagaaggtgatccagtatttagcgtacgttgcaagcagccacaagtccaagaaagatcaggaggcctactttaagaaccgggctgttaggctcggggttctatag

SEQ ID NO: 129101 - DNA, 312 bp, Artificial Sequence
  derived and/or modified sequence
atggctcagcaggcagccgataaatacctttacgtggacaagaacttcataaacaaccctctggcccaagccgactgggccgcaaagaaactggtttgggttccaagcgacaaatcaggcttcgagccagccagcttaaaagaggaggttggagaggaagcgatcgtggaattggtggagaatgggaagaaggtcaaagtgaataaagatgatattcagaagatgaatcccccaaagttctcaaaagtcgaggatatggccgagttgacttgcctcaatgaggcctccgtcctgcataatctgaaagagtag

SEQ ID NO: 129102 - protein, 1972 aa, Artificial Sequence
  derived and/or modified sequence
MAQKGQLSDDEKFLFVDKNFINSPVAQADWAAKRLVWVPSEKQGFEAASIKEEKGDEVVVELVENGKKVTVGKDDIQKMNPPKFSKVEDMAELTCLNEASVLHNLRERYFSGLIYTYSGLFCVVVNPYKHLPIYSEKIVDMYKGKKRHEMPPHIYAIADTAYRSMLQDREDQSILCTGESGAGKTENTKKVIQYLAVVASSHKGKKDTSITGELEKQLLQANPILEAFGNAKTVKNDNSSRFGKFIRINFDVTGYIVGANIETYLLEKSRAIRQARDERTFHIFYYMIAGAKEKMRSDLLLEGFNNYTFLSNGFVPIPAAQDDEMFQETVEAMAIMGFSEEEQLSILKVVSSVLQLGNIVFKKERNTDQASMPDNTAAQKVCHLMGINVTDFTRSILTPRIKVGRDVVQKAQTKEQADFAVEALAKATYERLFRWILTRVNKALDKTHRQGASFLGILDIAGFEIFEVNSFEQLCINYTNEKLQQLFNHTMFILEQEEYQREGIEWNFIDFGLDLQPCIELIERPNNPPGVLALLDEECWFPKATDKSFVEKLCTEQGSHPKFQKPKQLKDKTEFSIIHYAGKVDYNASAWLTKNMDPLNDNVTSLLNASSDKFVADLWKDVDRIVGLDQMAKMTESSLPSASKTKKGMFRTVGQLYKEQLGKLMTTLRNTTPNFVRCIIPNHEKRSGKLDAFLVLEQLRCNGVLEGIRICRQGFPNRIVFQEFRQRYEILAANAIPKGFMDGKQACILMIKALELDPNLYRIGQSKIFFRTGVLAHLEEERDLKITDVIMAFQAMCRGYLARKAFAKRQQQLTAMKVIQRNCAAYLKLRNWQWWRLFTKVKPLLQVTRQEEEMQAKEDELQKTKERQQKAENELKELEQKHSQLTEEKNLLQEQLQAETELYAEAEEMRVRLAAKKQELEEILHEMEARLEEEEDRGQQLQAERKKMAQQMLDLEEQLEEEEAARQKLQLEKVTAEAKIKKLEDEILVMDDQNNKLSKERKLLEERISDLTTNLAEEEEKAKNLTKLKNKHESMISELEVRLKKEEKSRQELEKLKRKLEGDASDFHEQIADLQAQIAELKMQLAKKEEELQAALARLDDEIAQKNNALKKIRELEGHISDLQEDLDSERAARNKAEKQKRDLGEELEALKTELEDTLDSTATQQELRAKREQEVTVLKKALDEETRSHEAQVQEMRQKHAQAVEELTEQLEQFKRAKANLDKNKQTLEKENADLAGELRVLGQAKQEVEHKKKKLEAQVQELQSKCSDGERARAELNDKVHKLQNEVESVTGMLNEAEGKAIKLAKDVASLSSQLQDTQELLQEETRQKLNVSTKLRQLEEERNSLQDQLDEEMEAKQNLERHISTLNIQLSDSKKKLQDFASTVEALEEGKKRFQKEIENLTQQYEEKAAAYDKLEKTKNRLQQELDDLVVDLDNQRQLVSNLEKKQRKFDQLLAEEKNISSKYADERDRAEAEAREKETKALSLARALEEALEAKEELERTNKMLKAEMEDLVSSKDDVGKNVHELEKSKRALETQMEEMKTQLEELEDELQATEDAKLRLEVNMQALKGQFERDLQARDEQNEEKRRQLQRQLHEYETELEDERKQRALAAAAKKKLEGDLKDLELQADSAIKGREEAIKQLRKLQAQMKDFQRELEDARASRDEIFATAKENEKKAKSLEADLMQLQEDLAAAERARKQADLEKEELAEELASSLSGRNALQDEKRRLEARIAQLEEELEEEQGNMEAMSDRVRKATQQAEQLSNELATERSTAQKNESARQQLERQNKELRSKLHEMEGAVKSKFKSTIAALEAKIAQLEEQVEQEAREKQAATKSLKQKDKKLKEILLQVEDERKMAEQYKEQAEKGNARVKQLKRQLEEAEEESQRINANRRKLQRELDEATESNEAMGREVNALKSKLRRGNETSFVPSRRSGGRRVIENADGSEEETDTRDADFNGTKASE

SEQ ID NO: 129103 - DNA, 5919 bp, Artificial Sequence
  derived and/or modified sequence
atggctcaaaaaggtcaacttagtgatgatgagaaattcctctttgtggataaaaactttatcaattctccagtagcccaggcagactgggcggctaagcgactcgtctgggtgccaagcgaaaagcagggttttgaggcggcaagtatcaaggaagagaagggtgatgaggtggtcgtggaactggtcgaaaatggcaagaaagtcaccgtaggcaaggatgatatccagaagatgaatcctcctaaattctccaaagtggaggatatggcagagctgacatgcctgaacgaagcaagtgtactccataatctaagagagaggtacttttctggcctaatttatacctatagcgggctgttttgtgtggttgttaatccttacaagcacctgcctatatactccgagaagatcgtcgatatgtacaaaggtaaaaaaaggcatgagatgcccccacacatctatgcaattgcggacacagcttaccggagtatgctccaggatagggaagaccagagcatcctgtgcaccggcgagagtggtgcaggaaaaacggaaaatactaagaaggtaatacagtacctggctgtggtggcatcctctcataaaggaaagaaagatacatccataaccggggagcttgagaaacagttgctccaggctaaccccatcctggaagcattcggcaacgccaagactgtgaagaacgataatagcagtcggtttggaaagtttatcagaataaactttgacgtgactggctatatcgttggagctaacatcgaaacttatctgctagaaaagagcagggcgataaggcaggctagggacgagagaacttttcacatattttactatatgatcgcaggagcaaaggagaagatgagatccgatctcctactggagggattcaataactataccttcctcagcaatggttttgtgcctatacctgccgcccaagacgatgaaatgttccaggaaaccgtggaagctatggcgatcatggggttctctgaagaggaacagcttagtattctgaaggttgtgagctccgttttgcaattgggaaatattgtgttcaagaaagagaggaacaccgaccaagcgtccatgcctgacaatacagccgcccaaaaagtgtgccacctcatggggatcaatgtgaccgatttcacacgatccatactgacaccgcgcattaaagtgggcagggacgtggtgcagaaggcacagacaaaggagcaggccgattttgctgttgaagccctggccaaggcaacatacgaaaggctgttccggtggatcctgacaagggtgaataaggcgctggacaaaacccaccgtcagggcgcatcatttttagggatattagacatcgctggcttcgaaattttcgaagtgaatagcttcgaacagctttgcatcaactacacaaatgaaaaattgcaacagttgtttaaccacaccatgttcatcctcgagcaggaggagtatcagcgagagggaattgagtggaactttatcgactttggcctagatttgcagccctgtattgagttgattgagcggcccaataatccaccaggggttttggcattgttggatgaggagtgctggttcccaaaggccacagataagagcttcgttgagaaactgtgtactgaacaaggctcccatcccaagttccagaagccaaagcagctgaaggataagacagagttcagtataatccactatgccggaaaggtcgactataatgcctctgcctggctgaccaagaacatggacccacttaacgataacgtaacaagcttgctcaacgcgagcagtgataagtttgtggccgacctgtggaaggatgtggacagaatcgtgggcctggaccagatggctaaaatgacagagagctcactgccaagcgcctcgaaaactaaaaagggcatgttcagaacagtgggccaattgtataaagaacagctgggcaaattaatgacaactttgagaaacaccactcccaatttcgtcaggtgcattattccgaatcacgagaagagaagtggtaagttggacgccttcctggtgctggaacaacttcgctgtaatggcgtactggagggcataagaatctgcaggcaggggttccctaatcgcattgtgtttcaggagttccgacagcgctacgaaatcctggccgcgaatgctatccctaaaggcttcatggatggaaagcaggcttgtatcctcatgattaaggccctagaattagaccctaatttgtatcgcattgggcaatctaagattttcttccgcaccggagtgcttgcacacctggaggaggaacgagacttaaaaatcacagatgttatcatggcttttcaggcgatgtgtcgaggttacctggcaagaaaagcctttgcaaaacgtcagcagcagcttacagcaatgaaggtcatccagaggaactgtgcagcctatctgaagttgaggaattggcagtggtggaggctgttcacaaaagtgaagccattgctgcaagtgacaagacaggaggaagaaatgcaagccaaggaagacgagctgcagaagacaaaggaacgccaacagaaggctgagaatgagttgaaagagctcgagcagaaacacagccaactgacggaggagaaaaatctcctgcaagaacagttgcaagcggaaacggagctatacgcagaagcggaagagatgagggtgaggttggcagcgaaaaagcaggagctggaggagattctgcacgagatggaagcgcgcctggaagaagaggaggataggggccagcagctgcaggccgagcggaaaaaaatggcccagcagatgctcgacctggaggagcaactggaagaagaagaagcagctcgccagaagttgcagctggagaaggtcacagcagaggccaagatcaaaaagctggaggacgagatactcgttatggatgaccaaaacaacaagcttagcaaggaaagaaagttactggaggagcggatatcagacctcactacaaatctggcagaggaggaagagaaagccaagaacctgaccaaactgaaaaataaacatgagtccatgatttccgaactggaggtgaggcttaagaaagaggaaaaatccaggcaagaactagaaaaactgaagaggaagctcgagggtgatgcatcagattttcatgaacagatagccgatctacaggcccagattgccgaactgaagatgcaactggccaagaaggaagaagagctccaggctgccctggcaaggctggacgatgagatcgcccagaagaataacgccctcaagaagatccgggagttagaaggccatattagcgacttgcaggaggacttagacagcgaacgggcagctcggaacaaagccgaaaagcagaagcgggatctaggtgaggagttggaagcgctgaagacggagcttgaagatacactggattccaccgcaacgcagcaggagttacgtgccaagagagaacaggaggtaaccgtcctgaaaaaggccctcgacgaagagaccagaagccatgaggcacaagtacaggaaatgcggcagaagcatgcccaagcagtggaggagttgacagagcaactcgagcagttcaagcgtgcaaaggcaaacctggacaaaaacaagcagacactagaaaaggaaaatgctgacctcgcaggtgagctgagggtcctgggccaggccaaacaggaggtggagcacaagaagaaaaagctcgaggcccaggtgcaagagcttcaatcaaaatgtagtgatggcgaacgggcgcgagcagaattaaacgataaagtgcataaacttcaaaatgaggttgaaagtgtgactgggatgctgaatgaggctgagggaaaggctattaaactggccaaggacgttgcttccttgagttcgcagctgcaggacacacaggagctgcttcaggaagagacgaggcagaagctgaatgtatcaacaaagttgcgacagctggaagaggaacgcaacagtctgcaggatcaattggacgaggaaatggaggccaagcaaaatctggagcgtcacataagtactctcaacatccagctgagtgacagcaagaaaaagctacaagatttcgcctccacagttgaagctttagaggagggaaaaaagcggttccagaaagaaatagagaatttaacccaacagtacgaggaaaaggccgccgcctatgataaactggagaagaccaaaaatcgactgcaacaggaactcgacgatctggtcgtggacctggacaatcagcgacagctggtgtcaaacctggaaaagaagcagaggaagtttgatcagctgttggccgaagaaaagaacatctcttcaaaatatgccgatgagcgtgaccgggccgaggcggaagctagagagaaggagacaaaggcgctgtctctcgctagagcattggaagaggcccttgaagccaaggaggaactcgaaaggactaacaaaatgctgaaggccgagatggaggatctggtatcgtccaaggacgatgtgggcaaaaatgtgcacgaactcgagaaatcgaagcgggctttggagacgcagatggaggagatgaaaacccaattagaagagctggaagacgaactgcaggccactgaagatgcaaagttgcggctcgaggtaaacatgcaggcacttaaggggcagtttgaaagggatctgcaagccagagacgaacagaacgaggagaagaggagacagctgcaacgtcagctgcacgaatacgagactgaacttgaagatgagcgtaaacaaagagcactggctgccgcagctaaaaaaaaactcgagggtgacctgaaggatctggagttacaggctgattccgcgatcaagggccgggaagaagcaatcaaacagctacggaagttgcaagcgcagatgaaggacttccagagggagctagaagacgcacgcgcctctagagatgaaattttcgcaactgcgaaagagaacgagaaaaaggctaaaagtttggaggctgatctgatgcagttacaagaggaccttgcagctgctgagagggcgagaaaacaggctgacctcgagaaagaggagcttgccgaggaattggcctcatccttatctggccggaacgcactccaggatgagaaaagaagactggaagcgaggatcgcccagctggaggaagaacttgaggaggagcaggggaatatggaggccatgagcgatcgggttcggaaagctacccaacaggccgagcagttgtcaaatgaactagccacagagagatcgactgcccagaagaatgagtccgcccgacagcagttagagaggcagaacaaagaattacgctcaaagctgcatgagatggagggggccgtgaagtctaagttcaagagcaccattgcagcccttgaagcaaagatagctcagctggaggagcaagtcgaacaggaggctcgcgaaaaacaggccgccacaaaatcccttaagcagaaggataagaaactaaaggaaattctcttacaagtggaagatgagcgaaagatggcagaacagtataaagaacaggccgagaaggggaacgctagggtaaagcagcttaagcgccagctcgaggaagcagaggaggagtctcagcgaatcaacgctaatcgccgaaagctccagagggagcttgatgaagccactgagagtaacgaggccatgggcagagaggtgaatgctctaaaatcaaagctgagaagaggcaatgagacctcctttgtgccaagtcggcggagtggaggacggagagttatcgagaatgccgatggcagcgaagaagagaccgacacacgggacgcagactttaatgggaccaaagccagtgagtag

SEQ ID NO: 129104 - DNA, 5919 bp, Artificial Sequence
  derived and/or modified sequence
atggcccagaagggccagctgagtgatgatgagaagttcctgtttgtggacaagaacttcatcaacagccctgtggcccaggccgactgggccgccaagaggctggtgtgggtgcccagcgagaagcagggctttgaagctgccagcatcaaggaggagaagggagatgaggtggtggtggagctggtggagaatggcaagaaggtgacagtgggcaaggatgacatccagaagatgaacccccccaagttcagcaaggtggaggacatggccgagctgacctgcctgaatgaggcctctgtgctgcacaacctgcgggagcgctacttcagcggcctcatctacacctacagcggcctcttctgtgtggtggtgaacccctacaagcacctgcccatctacagcgagaagatcgtggacatgtacaagggcaagaagagacatgagatgccaccccacatctatgccatcgctgacacagcctaccgctccatgctgcaggaccgggaggaccagagcatcctgtgcacaggagagagcggggccggcaagacagagaacaccaagaaggtgatccagtacctggccgtggtggccagcagccacaagggcaagaaggacaccagcatcactggagagctggagaagcagctgctgcaggccaaccccatcctggaggcctttggaaatgccaagacagtgaagaatgacaacagcagcagatttgggaagttcatccgcatcaactttgatgtgacaggctacatcgtgggcgccaacatcgagacctacctgctggagaagagccgggccatccggcaggccagagatgagaggaccttccacatcttctactacatgattgctggggccaaggagaagatgagaagtgacctgctgctggagggcttcaacaactacaccttcctgagcaatggatttgtgcccatcccagctgcccaggatgatgagatgttccaggagaccgtggaggccatggccatcatgggcttcagcgaggaggagcagctgagcatcctgaaggtggtgtcctctgtgctgcagctgggcaacatcgtgttcaagaaggagaggaacacagaccaggcctccatgccagacaacacagctgcccagaaggtgtgccacctgatgggcatcaacgtgacagacttcaccaggagcatcctgaccccccgcatcaaggtgggcagagatgtggtgcagaaggcccagaccaaggagcaggccgactttgctgtggaggccctggccaaggccacctatgagcggctcttccgctggatcctgaccagggtgaacaaggccctggacaagacccaccggcagggcgccagcttcctgggcatcctggacattgctggctttgagatctttgaggtgaacagctttgagcagctgtgcatcaactacaccaatgagaagctgcagcagctgttcaaccacaccatgttcatcctggagcaggaggagtaccagcgggagggcatcgagtggaacttcatcgactttggcctggacctgcagccctgcatcgagctgattgaaagacccaacaaccccccaggagtgctggccctgctggatgaggagtgctggttccccaaggccacagacaagagctttgtggagaagctgtgcacagagcagggcagccaccccaagttccagaagcccaagcagctgaaggacaagacagagttcagcatcatccactacgccggcaaggtggactacaatgccagcgcctggctgaccaagaacatggaccccctgaatgacaacgtgaccagcctgctgaatgccagcagtgacaagtttgtggccgacctgtggaaggatgtggacagaattgtgggcctggaccagatggccaagatgacagagagcagcctgcccagcgccagcaagaccaagaagggcatgttcagaacagtgggccagctgtacaaggagcagctgggcaagctgatgaccaccctgaggaacaccacccccaactttgtgcgctgcatcatccccaaccacgagaagaggtctgggaagctggatgccttcctggtgctggagcagctgcgctgcaatggagtgctggagggcatccgcatctgccggcagggcttccccaacagaattgtgttccaggagttccggcagagatatgagatcctggccgccaatgccatccccaagggcttcatggatggcaagcaggcctgcatcctgatgatcaaggccctggagctggaccccaacctgtacagaattggccagagcaagatcttcttcagaactggagtgctggcccacctggaggaggagcgggacctgaagatcacagatgtgatcatggccttccaggccatgtgccggggctacctggccaggaaggcctttgccaagaggcagcagcagctgacagccatgaaggtgatccagaggaactgtgccgcctacctgaagctgaggaactggcagtggtggaggctcttcaccaaggtgaagcccctgctgcaggtgacccggcaggaggaggagatgcaggccaaggaggatgagctgcagaagaccaaggagcggcagcagaaggccgagaatgagctgaaggagctggagcagaagcacagccagctgacagaggagaagaacctgctgcaggagcagctgcaggccgagacagagctgtatgcagaggccgaggagatgagggtgcggctggccgccaagaagcaggagctggaggagatcctgcacgagatggaggcccggctggaggaggaggaggaccggggccagcagctgcaggccgagaggaagaagatggcccagcagatgctggacctggaggagcagctggaggaggaggaggccgcccggcagaagctgcagctggagaaggtgacagctgaggccaagatcaagaagctggaggatgagatcctggtgatggatgaccagaacaacaagctgagcaaggagaggaagctgctggaggagcgcatcagtgacctgaccaccaacctggccgaggaggaggagaaggccaagaacctgaccaagctgaagaacaagcatgagagcatgatcagcgagctggaggtgcggctgaagaaggaggagaagagccggcaggagctggagaagctgaagaggaagctggagggagatgccagtgacttccacgagcagattgctgacctgcaggcccagattgctgagctgaagatgcagctggccaagaaggaggaggagctgcaggccgccctggcccggctggatgatgaaattgcccagaagaacaatgccctgaagaagatccgggagctggagggccacatcagtgacctgcaggaggacctggacagcgagcgggccgccaggaacaaggccgagaagcagaagagggacctgggggaggagctggaggccctgaagacagagctggaggacaccctggacagcacagccacccagcaggagctgcgggccaagcgggagcaggaggtgacagtgctgaagaaggccctggatgaggagaccaggagccatgaggcccaggtgcaggagatgaggcagaagcacgcccaggccgtggaggagctgacagagcagctggagcagttcaagagggccaaggccaacctggacaagaacaagcagaccctggagaaggaaaatgctgacctggccggggagctgcgggtgctgggccaggccaagcaggaggtggagcacaagaagaagaagctggaggcccaggtgcaggagctgcagagcaaatgttctgatggagagcgggcccgggcagagctgaatgacaaggtgcacaagctgcagaatgaggtggagagcgtgacaggcatgctgaatgaagctgagggcaaggccatcaagctggccaaggatgtggccagcctgagcagccagctgcaggacacccaggagctgctgcaggaggagacccggcagaagctgaatgtgtccaccaagctgcggcagctggaggaggagaggaacagcctgcaggaccagctggatgaggagatggaggccaagcagaacctggagcggcacatcagcaccctgaacatccagctgagtgacagcaagaagaagctgcaggactttgccagcacagtggaggccctggaggagggcaagaagcgcttccagaaggagattgagaacctgacccagcagtatgaggagaaggctgctgcctatgacaagctggagaagaccaagaaccggctgcagcaggagctggatgacctggtggtggacctggacaaccagaggcagctggtgagcaacctggagaagaagcagaggaagtttgaccagctgctggccgaggagaagaacatcagcagcaaatatgcagatgagcgggacagagctgaggccgaggcccgggagaaggagaccaaggccctgagcctggcccgggccctggaggaggccctggaggccaaggaggagctggagaggaccaacaagatgctgaaggccgagatggaggacctggtgagcagcaaggatgatgtgggcaagaatgtgcatgagctggagaagagcaagagggccctggagacccagatggaggagatgaagacccagctggaggagctggaggatgagctgcaggccacagaagatgccaagctgcggctggaggtgaacatgcaggccctgaagggccagtttgagcgggacctgcaggccagagatgagcagaatgaggagaagaggcggcagctgcagaggcagctgcatgaatatgaaacagagctggaggatgagaggaagcagagggccctggccgctgctgccaagaagaagctggagggggacctgaaggacctggagctgcaggccgacagcgccatcaagggccgggaggaggccatcaagcagctgaggaagctgcaggcccagatgaaggacttccagcgggagctggaggatgcccgggccagcagagatgagatctttgccacagccaaggaaaatgagaagaaggccaagagcctggaggccgacctgatgcagctgcaggaggacctggccgctgctgagcgggccaggaagcaggccgacctggagaaggaggagctggccgaggagctggccagcagcctgagcggcagaaatgccctgcaggatgagaagaggcggctggaggcccgcatcgcccagctggaggaggagctggaggaggagcagggcaacatggaggccatgtctgacagagtgaggaaggccacccagcaggccgagcagctgagcaatgagctggccacagagaggagcacagcccagaagaatgaaagtgcccggcagcagctggagcggcagaacaaggagctgcggagcaagctgcacgagatggagggcgctgtgaagagcaagttcaagagcaccatcgccgccctggaggccaagatcgcccagctggaggagcaggtggagcaggaggcccgggagaagcaggccgccaccaagagcctgaagcagaaggacaagaagctgaaggagatcctgctgcaggtggaggatgagaggaagatggccgagcagtacaaggagcaggccgagaagggaaatgcccgggtgaagcagctgaagaggcagctggaggaggccgaggaggagagccagaggatcaatgccaacagaaggaagctgcagcgggagctggatgaggccacagagagcaatgaggccatgggccgggaggtgaatgccctgaagagcaagctgcggagaggaaatgagaccagctttgtgcccagccgccgcagcggcggcagaagagtgattgaaaatgctgatggcagcgaggaggagacagacaccagagatgctgacttcaacggcaccaaggccagcgagtag

SEQ ID NO: 129105 - DNA, 6885 bp, Artificial Sequence
  derived and/or modified sequence
gcagggagatttggacgctccggcctgggaggtgcgtcagatccgagctcgccatccagtttcctctccactagtccccccagttggagatctgggaccaacaaggcaccatggcgcagaagggccaactcagtgacgatgagaagttcctctttgtggacaaaaacttcatcaacagcccagtggcccaggctgactgggccgccaagagactcgtctgggtcccctcggagaagcagggcttcgaggcagccagcattaaggaggagaagggggatgaggtggttgtggagctggtggagaatggcaagaaggtcacggttgggaaagatgacatccagaagatgaacccacccaagttctccaaggtggaggacatggcggagctgacgtgcctcaacgaagcctccgtgctacacaacctgagggagcggtacttctcagggctaatatatacgtactctggcctcttctgcgtggtggtcaacccctataaacacctgcccatctactcggagaagatcgtcgacatgtacaagggcaagaagaggcacgagatgccgcctcacatctacgccatcgcagacacggcctaccggagcatgcttcaagatcgggaggaccagtccattctatgcacaggcgagtctggagccgggaaaaccgaaaacaccaagaaggtcattcagtacctggccgtggtggcctcctcccacaagggcaagaaagacacaagtatcacgggagagctggaaaagcagcttctacaagcaaacccgattctggaggctttcggcaacgccaaaacagtgaagaacgacaactcctcacgattcggcaaattcatccgcatcaacttcgacgtcacgggttacatcgtgggagccaacattgagacctatctgctagaaaaatcacgggcaattcgccaagccagagacgagaggacattccacatcttttactacatgattgctggagccaaggagaagatgagaagtgacttgcttttggagggcttcaacaactacaccttcctctccaatggctttgtgcccatcccagcagcccaggatgatgagatgttccaggaaaccgtggaggccatggcaatcatgggtttcagcgaggaggagcagctatccatattgaaggtggtatcatcggtcctgcagcttggaaatatcgtcttcaagaaggaaagaaacacagaccaggcgtccatgccagataacacagctgctcagaaagtttgccacctcatgggaattaatgtgacagatttcaccagatccatcctcactcctcgtatcaaggttgggcgagatgtggtacagaaagctcagacaaaagaacaggctgactttgctgtagaggctttggccaaggcaacatatgagcgccttttccgctggatactcacccgcgtgaacaaagccctggacaagacccatcggcaaggggcttccttcctggggatcctggatatagctggatttgagatctttgaggtgaactccttcgagcagctgtgcatcaactacaccaacgagaagctgcagcagctcttcaaccacaccatgttcatcctggagcaggaggagtaccagcgcgagggcatcgagtggaacttcatcgactttgggctggacctacagccctgcatcgagctcatcgagcgaccgaacaaccctccaggtgtgctggccctgctggacgaggaatgctggttccccaaagccacggacaagtctttcgtggagaagctgtgcacggagcagggcagccaccccaagttccagaagcccaagcagctcaaggacaagactgagttctccatcatccattatgctgggaaggtggactataatgcgagtgcctggctgaccaagaatatggacccgctgaatgacaacgtgacttccctgctcaatgcctcctccgacaagtttgtggccgacctgtggaaggacgtggaccgcatcgtgggcctggaccagatggccaagatgacggagagctcgctgcccagcgcctccaagaccaagaagggcatgttccgcacagtggggcagctgtacaaggagcagctgggcaagctgatgaccacgctacgcaacaccacgcccaacttcgtgcgctgcatcatccccaaccacgagaagaggtccggcaagctggatgcgttcctggtgctggagcagctgcggtgcaatggggtgctggaaggcattcgcatctgccggcagggcttccccaaccggatcgtcttccaggagttccgccaacgctacgagatcctggcggcgaatgccatccccaaaggcttcatggacgggaagcaggcctgcattctcatgatcaaagccctggaacttgaccccaacttatacaggatagggcagagcaaaatcttcttccgaactggcgtcctggcccacctagaggaggagcgagatttgaagatcaccgatgtcatcatggccttccaggcgatgtgtcgtggctacttggccagaaaggcttttgccaagaggcagcagcagctgaccgccatgaaggtgattcagaggaactgcgccgcctacctcaagctgcggaactggcagtggtggaggcttttcaccaaagtgaagccactgctgcaggtgacacggcaggaggaggagatgcaggccaaggaggatgaactgcagaagaccaaggagcggcagcagaaggcagagaatgagcttaaggagctggaacagaagcactcgcagctgaccgaggagaagaacctgctacaggaacagctgcaggcagagacagagctgtatgcagaggctgaggagatgcgggtgcggctggcggccaagaagcaggagctggaggagatactgcatgagatggaggcccgcctggaggaggaggaagacaggggccagcagctacaggctgaaaggaagaagatggcccagcagatgctggaccttgaagaacagctggaggaggaggaagctgccaggcagaagctgcaacttgagaaggtcacggctgaggccaagatcaagaaactggaggatgagatcctggtcatggatgatcagaacaataaactatcaaaagaacgaaaactccttgaggagaggattagtgacttaacgacaaatcttgcagaagaggaagaaaaggccaagaatcttaccaagctgaaaaacaagcatgaatctatgatttcagaactggaagtgcggctaaagaaggaagagaagagccgacaggagctggagaagctgaaacggaagctggagggtgatgccagcgacttccacgagcagatcgctgacctccaggcgcagatcgcagagctcaagatgcagctggccaagaaggaggaggagctgcaggcggccctggccaggcttgacgatgaaatcgctcagaagaacaatgccctgaagaagatccgggagctggagggccacatctcagacctccaggaggacctggactcagagcgggccgccaggaacaaggctgaaaagcagaagcgagacctcggcgaggagctggaggccctaaagacagagctggaagacacactggacagcacagccactcagcaggagctcagggccaagagggagcaggaggtgacggtgctgaagaaggccctggatgaagagacgcggtcccatgaggctcaggtccaggagatgaggcagaaacacgcacaggcggtggaggagctcacagagcagcttgagcagttcaagagggccaaggcgaacctagacaagaataagcagacgctggagaaagagaacgcagacctggccggggagctgcgggtcctgggccaggccaagcaggaggtggaacataagaagaagaagctggaggcgcaggtgcaggagctgcagtccaagtgcagcgatggggagcgggcccgggcggagctcaatgacaaagtccacaagctgcagaatgaagttgagagcgtcacagggatgcttaacgaggccgaggggaaggccattaagctggccaaggacgtggcgtccctcagttcccagctccaggacacccaggagctgcttcaagaagaaacccggcagaagctcaacgtgtctacgaagctgcgccagctggaggaggagcggaacagcctgcaagaccagctggacgaggagatggaggccaagcagaacctggagcgccacatctccactctcaacatccagctctccgactcgaagaagaagctgcaggactttgccagcaccgtggaagctctggaagaggggaagaagaggttccagaaggagatcgagaacctcacccagcagtacgaggagaaggcggccgcttatgataaactggaaaagaccaagaacaggcttcagcaggagctggacgacctggttgttgatttggacaaccagcggcaactcgtgtccaacctggaaaagaagcagaggaaatttgatcagttgttagccgaggagaaaaacatctcttccaaatacgcggatgagagggacagagctgaggcagaagccagggagaaggaaaccaaggccctgtccctggctcgggcccttgaagaggccttggaagccaaagaggaactcgagcggaccaacaaaatgctcaaagccgaaatggaagacctggtcagctccaaggatgacgtgggcaagaacgtccatgagctggagaagtccaagcgggccctggagacccagatggaggagatgaagacgcagctggaagagctggaggacgagctgcaagccacggaggacgccaaactgcggctggaagtcaacatgcaggcgctcaagggccagttcgaaagggatctccaagcccgggacgagcagaatgaggagaagaggaggcaactgcagagacagcttcacgagtatgagacggaactggaagacgagcgaaagcaacgtgccctggcagctgcagcaaagaagaagctggaaggggacctgaaagacctggagcttcaggccgactctgccatcaaggggagggaggaagccatcaagcagctacgcaaactgcaggctcagatgaaggactttcaaagagagctggaagatgcccgtgcctccagagatgagatctttgccacagccaaagagaatgagaagaaagccaagagcttggaagcagacctcatgcagctacaagaggacctcgccgccgctgagagggctcgcaaacaagcggacctcgagaaggaggaactggcagaggagctggccagtagcctgtcgggaaggaacgcactccaggacgagaagcgccgcctggaggcccggatcgcccagctggaggaggagctggaggaggagcagggcaacatggaggccatgagcgaccgggtccgcaaagccacacagcaggccgagcagctcagcaacgagctggccacagagcgcagcacggcccagaagaatgagagtgcccggcagcagctcgagcggcagaacaaggagctccggagcaagctccacgagatggagggggccgtcaagtccaagttcaagtccaccatcgcggcgctggaggccaagattgcacagctggaggagcaggtcgagcaggaggccagagagaaacaggcggccaccaagtcgctgaagcagaaagacaagaagctgaaggaaatcttgctgcaggtggaggacgagcgcaagatggccgagcagtacaaggagcaggcagagaaaggcaatgccagggtcaagcagctcaagaggcagctggaggaggcagaggaggagtcccagcgcatcaacgccaaccgcaggaagctgcagcgggagctggatgaggccacggagagcaacgaggccatgggccgcgaggtgaacgcactcaagagcaagctcaggcgaggaaacgagacctctttcgttccttctagaaggtctggaggacgtagagttattgaaaatgcagatggttctgaggaggaaacggacactcgagacgcagacttcaatggaaccaaggccagtgaataagcaactttctacagttttgcaccacggcaagaaaaccaaaaaccaaaacaaacaaacaaaaaaaacccaacaacaacccagaacaaagcaaaacccagcagactgtacttagcattgtctaaatccattctcaaattccaaatatcacagacacccctcacacaaggaatataaaaaccaccaccctccagcctgggcaacgtagtaaaacctcatctatacaagaatttaaaaataagctgggcgtggtggtacacacctgtggtcccagctactagggaggctgagccaggaagaacgctccagcccaggacttcgaggctgcaatgagctataattgcatcattgcactccagcctgggcaacagagaccctgtctcaaccaccaccaccaccaccacccctactacccctgtattcaaggtaaaaattgaagtttgtatgatgtaagagatgagaaaaacccaacaggaaacacagacacatcctccagttctatcaatggattgtgcagacactgagtttttagaaaaacatatccacggtaaccggtccctggcaattctgtttacatgaaatggggagaaagtcaccgaaatgggtgccgccggcccccactcccaattcattccctaacctgcaaacctttccaacttctcacgtcaggcctttgagaattctttccccctctcctggtttccacacctcagacacgcacagttcaccaagtgccttctgtagtcacatgaattgaaaaggagacgctgctcccacggaggggagcaggaatgctgcactgtttacaccctgactgtgcttaaaaacactttcactaataaatggttataaatcacaa

SEQ ID NO: 129106 - DNA, 6924 bp, Artificial Sequence
  derived and/or modified sequence
gcagggagatttggacgctccggcctgggaggtgcgtcagatccgagctcgccatccagtttcctctccactagtccccccagttggagatctgggaccaacaaggcaccatggcgcagaagggccaactcagtgacgatgagaagttcctctttgtggacaaaaacttcatcaacagcccagtggcccaggctgactgggccgccaagagactcgtctgggtcccctcggagaagcagggcttcgaggcagccagcattaaggaggagaagggggatgaggtggttgtggagctggtggagaatggcaagaaggtcacggttgggaaagatgacatccagaagatgaacccacccaagttctccaaggtggaggacatggcggagctgacgtgcctcaacgaagcctccgtgctacacaacctgagggagcggtacttctcagggctaatatatacgtactctggcctcttctgcgtggtggtcaacccctataaacacctgcccatctactcggagaagatcgtcgacatgtacaagggcaagaagaggcacgagatgccgcctcacatctacgccatcgcagacacggcctaccggagcatgcttcaagatcgggaggaccagtccattctatgcacaggcgagtctggagccgggaaaaccgaaaacaccaagaaggtcattcagtacctggccgtggtggcctcctcccacaagggcaagaaagacacaagtatcacgggagagctggaaaagcagcttctacaagcaaacccgattctggaggctttcggcaacgccaaaacagtgaagaacgacaactcctcacgattcggcaaattcatccgcatcaacttcgacgtcacgggttacatcgtgggagccaacattgagacctatctgctagaaaaatcacgggcaattcgccaagccagagacgagaggacattccacatcttttactacatgattgctggagccaaggagaagatgagaagtgacttgcttttggagggcttcaacaactacaccttcctctccaatggctttgtgcccatcccagcagcccaggatgatgagatgttccaggaaaccgtggaggccatggcaatcatgggtttcagcgaggaggagcagctatccatattgaaggtggtatcatcggtcctgcagcttggaaatatcgtcttcaagaaggaaagaaacacagaccaggcgtccatgccagataacacagctgctcagaaagtttgccacctcatgggaattaatgtgacagatttcaccagatccatcctcactcctcgtatcaaggttgggcgagatgtggtacagaaagctcagacaaaagaacaggctgactttgctgtagaggctttggccaaggcaacatatgagcgccttttccgctggatactcacccgcgtgaacaaagccctggacaagacccatcggcaaggggcttccttcctggggatcctggatatagctggatttgagatctttgaggtgaactccttcgagcagctgtgcatcaactacaccaacgagaagctgcagcagctcttcaaccacaccatgttcatcctggagcaggaggagtaccagcgcgagggcatcgagtggaacttcatcgactttgggctggacctacagccctgcatcgagctcatcgagcgaccgaacaaccctccaggtgtgctggccctgctggacgaggaatgctggttccccaaagccacggacaagtctttcgtggagaagctgtgcacggagcagggcagccaccccaagttccagaagcccaagcagctcaaggacaagactgagttctccatcatccattatgctgggaaggtggactataatgcgagtgcctggctgaccaagaatatggacccgctgaatgacaacgtgacttccctgctcaatgcctcctccgacaagtttgtggccgacctgtggaaggacgtggaccgcatcgtgggcctggaccagatggccaagatgacggagagctcgctgcccagcgcctccaagaccaagaagggcatgttccgcacagtggggcagctgtacaaggagcagctgggcaagctgatgaccacgctacgcaacaccacgcccaacttcgtgcgctgcatcatccccaaccacgagaagaggtccggcaagctggatgcgttcctggtgctggagcagctgcggtgcaatggggtgctggaaggcattcgcatctgccggcagggcttccccaaccggatcgtcttccaggagttccgccaacgctacgagatcctggcggcgaatgccatccccaaaggcttcatggacgggaagcaggcctgcattctcatgatcaaagccctggaacttgaccccaacttatacaggatagggcagagcaaaatcttcttccgaactggcgtcctggcccacctagaggaggagcgagatttgaagatcaccgatgtcatcatggccttccaggcgatgtgtcgtggctacttggccagaaaggcttttgccaagaggcagcagcagctgaccgccatgaaggtgattcagaggaactgcgccgcctacctcaagctgcggaactggcagtggtggaggcttttcaccaaagtgaagccactgctgcaggtgacacggcaggaggaggagatgcaggccaaggaggatgaactgcagaagaccaaggagcggcagcagaaggcagagaatgagcttaaggagctggaacagaagcactcgcagctgaccgaggagaagaacctgctacaggaacagctgcaggcagagacagagctgtatgcagaggctgaggagatgcgggtgcggctggcggccaagaagcaggagctggaggagatactgcatgagatggaggcccgcctggaggaggaggaagacaggggccagcagctacaggctgaaaggaagaagatggcccagcagatgctggaccttgaagaacagctggaggaggaggaagctgccaggcagaagctgcaacttgagaaggtcacggctgaggccaagatcaagaaactggaggatgagatcctggtcatggatgatcagaacaataaactatcaaaagaacgaaaactccttgaggagaggattagtgacttaacgacaaatcttgcagaagaggaagaaaaggccaagaatcttaccaagctgaaaaacaagcatgaatctatgatttcagaactggaagtgcggctaaagaaggaagagaagagccgacaggagctggagaagctgaaacggaagctggagggtgatgccagcgacttccacgagcagatcgctgacctccaggcgcagatcgcagagctcaagatgcagctggccaagaaggaggaggagctgcaggcggccctggccaggcttgacgatgaaatcgctcagaagaacaatgccctgaagaagatccgggagctggagggccacatctcagacctccaggaggacctggactcagagcgggccgccaggaacaaggctgaaaagcagaagcgagacctcggcgaggagctggaggccctaaagacagagctggaagacacactggacagcacagccactcagcaggagctcagggccaagagggagcaggaggtgacggtgctgaagaaggccctggatgaagagacgcggtcccatgaggctcaggtccaggagatgaggcagaaacacgcacaggcggtggaggagctcacagagcagcttgagcagttcaagagggccaaggcgaacctagacaagaataagcagacgctggagaaagagaacgcagacctggccggggagctgcgggtcctgggccaggccaagcaggaggtggaacataagaagaagaagctggaggcgcaggtgcaggagctgcagtccaagtgcagcgatggggagcgggcccgggcggagctcaatgacaaagtccacaagctgcagaatgaagttgagagcgtcacagggatgcttaacgaggccgaggggaaggccattaagctggccaaggacgtggcgtccctcagttcccagctccaggacacccaggagctgcttcaagaagaaacccggcagaagctcaacgtgtctacgaagctgcgccagctggaggaggagcggaacagcctgcaagaccagctggacgaggagatggaggccaagcagaacctggagcgccacatctccactctcaacatccagctctccgactcgaagaagaagctgcaggactttgccagcaccgtggaagctctggaagaggggaagaagaggttccagaaggagatcgagaacctcacccagcagtacgaggagaaggcggccgcttatgataaactggaaaagaccaagaacaggcttcagcaggagctggacgacctggttgttgatttggacaaccagcggcaactcgtgtccaacctggaaaagaagcagaggaaatttgatcagttgttagccgaggagaaaaacatctcttccaaatacgcggatgagagggacagagctgaggcagaagccagggagaaggaaaccaaggccctgtccctggctcgggcccttgaagaggccttggaagccaaagaggaactcgagcggaccaacaaaatgctcaaagccgaaatggaagacctggtcagctccaaggatgacgtgggcaagaacgtccatgagctggagaagtccaagcgggccctggagacccagatggaggagatgaagacgcagctggaagagctggaggacgagctgcaagccacggaggacgccaaactgcggctggaagtcaacatgcaggcgctcaagggccagttcgaaagggatctccaagcccgggacgagcagaatgaggagaagaggaggcaactgcagagacagcttcacgagtatgagacggaactggaagacgagcgaaagcaacgtgccctggcagctgcagcaaagaagaagctggaaggggacctgaaagacctggagcttcaggccgactctgccatcaaggggagggaggaagccatcaagcagctacgcaaactgcaggctcagatgaaggactttcaaagagagctggaagatgcccgtgcctccagagatgagatctttgccacagccaaagagaatgagaagaaagccaagagcttggaagcagacctcatgcagctacaagaggacctcgccgccgctgagagggctcgcaaacaagcggacctcgagaaggaggaactggcagaggagctggccagtagcctgtcgggaaggaacgcactccaggacgagaagcgccgcctggaggcccggatcgcccagctggaggaggagctggaggaggagcagggcaacatggaggccatgagcgaccgggtccgcaaagccacacagcaggccgagcagctcagcaacgagctggccacagagcgcagcacggcccagaagaatgagagtgcccggcagcagctcgagcggcagaacaaggagctccggagcaagctccacgagatggagggggccgtcaagtccaagttcaagtccaccatcgcggcgctggaggccaagattgcacagctggaggagcaggtcgagcaggaggccagagagaaacaggcggccaccaagtcgctgaagcagaaagacaagaagctgaaggaaatcttgctgcaggtggaggacgagcgcaagatggccgagcagtacaaggagcaggcagagaaaggcaatgccagggtcaagcagctcaagaggcagctggaggaggcagaggaggagtcccagcgcatcaacgccaaccgcaggaagctgcagcgggagctggatgaggccacggagagcaacgaggccatgggccgcgaggtgaacgcactcaagagcaagctcagagggccccccccacaggaaacttcgcagtgatgcaccaggcgaggaaacgagacctctttcgttccttctagaaggtctggaggacgtagagttattgaaaatgcagatggttctgaggaggaaacggacactcgagacgcagacttcaatggaaccaaggccagtgaataagcaactttctacagttttgcaccacggcaagaaaaccaaaaaccaaaacaaacaaacaaaaaaaacccaacaacaacccagaacaaagcaaaacccagcagactgtacttagcattgtctaaatccattctcaaattccaaatatcacagacacccctcacacaaggaatataaaaaccaccaccctccagcctgggcaacgtagtaaaacctcatctatacaagaatttaaaaataagctgggcgtggtggtacacacctgtggtcccagctactagggaggctgagccaggaagaacgctccagcccaggacttcgaggctgcaatgagctataattgcatcattgcactccagcctgggcaacagagaccctgtctcaaccaccaccaccaccaccacccctactacccctgtattcaaggtaaaaattgaagtttgtatgatgtaagagatgagaaaaacccaacaggaaacacagacacatcctccagttctatcaatggattgtgcagacactgagtttttagaaaaacatatccacggtaaccggtccctggcaattctgtttacatgaaatggggagaaagtcaccgaaatgggtgccgccggcccccactcccaattcattccctaacctgcaaacctttccaacttctcacgtcaggcctttgagaattctttccccctctcctggtttccacacctcagacacgcacagttcaccaagtgccttctgtagtcacatgaattgaaaaggagacgctgctcccacggaggggagcaggaatgctgcactgtttacaccctgactgtgcttaaaaacactttcactaataaatggttataaatcacaa

SEQ ID NO: 129107 - DNA, 5919 bp, Artificial Sequence
  derived and/or modified sequence
atggcccagaagggccagctgagcgacgacgagaagttcctgttcgtcgataagaatttcataaactcacccgttgcccaggcagattgggccgccaaacgtcttgtctgggtaccctccgaaaaacagggtttcgaggccgccagtattaaggaggagaaaggggacgaagtggtggtagagctggtggaaaatgggaagaaggtaacagtgggcaaggacgatatccagaagatgaatcctcccaaattctccaaggtggaggacatggccgaactcacgtgtctgaacgaagcaagcgttcttcataatctcagggaacggtatttttccgggctcatctatacctactcgggactattctgcgtggtggttaacccttacaagcacctgcccatctactctgagaaaatcgtcgacatgtacaaaggcaaaaaacgccacgagatgcctccccacatttatgccatcgcagacactgcctatcgctctatgctacaggatcgggaggatcagtcaatactgtgcaccggcgagagcggtgcgggtaagactgaaaatacaaagaaagtgattcagtatctggcagttgtcgcatcttcccacaaagggaaaaaagacacctctatcaccggggaacttgaaaaacagctccttcaggcaaatcctattctggaagctttcggtaacgcgaaaacagtgaaaaacgacaatagctcacgtttcggaaaatttattcggataaactttgatgtgacggggtacatcgtcggcgccaatatcgaaacgtatctcctggaaaaatcccgggcaattcgccaagcccgggatgagcgtactttccatattttttattacatgattgcgggagctaaggagaaaatgaggtccgatctgctgttagaggggttcaacaactacacattcctttcaaacggatttgttccaatccctgccgcccaggatgacgaaatgttccaagaaacagtggaggcgatggccattatgggattttctgaggaggaacagctgagcattctcaaagtcgtgtcgtcggtgctgcagctggggaatattgtgtttaagaaggagcgcaataccgaccaagctagcatgcctgacaacaccgccgctcagaaagtgtgccatctgatgggaatcaatgtgacggacttcacccgttctatcctcactcctcgcattaaggtgggccgggacgttgtgcagaaggcccagacgaaggagcaggctgattttgcggtggaggccttggccaaggctacctatgaaagactgtttagatggatcttgacacgcgttaataaggccctggacaagacacacaggcaaggagctagcttcctgggtatcctggatattgccggcttcgagatattcgaagtgaatagctttgagcaactctgcatcaattacaccaatgagaagctgcagcaactattcaatcataccatgttcatccttgaacaggaagaataccagagagaagggatcgagtggaatttcatagacttcggtctggacctgcagccttgtattgaattaatcgaacgacctaacaacccgccaggagtcctggcccttctcgatgaggagtgctggttcccaaaagcgactgataaaagttttgtagagaagctgtgcactgagcagggttcccatcctaagttccagaagccaaagcagcttaaagacaagaccgaattctcaatcattcattatgctggaaaggtagattacaatgcgtccgcctggttgaccaagaacatggatcctcttaacgacaacgttacatctctgcttaacgcatcatccgataaatttgtcgctgatctgtggaaagatgtggatcgcattgtgggactggaccagatggcaaaaatgaccgagtccagcctgccgtctgcttccaagaccaagaagggtatgttccgaacggtgggacagctgtataaggagcagctcggaaaactgatgacgaccctgcgtaacaccacaccaaactttgtgcgatgtattatcccaaatcatgagaaaaggtccggcaagcttgatgcctttctcgtcctggaacaactacgctgtaacggagtcctggagggcattcgcatctgtaggcaagggttccccaacagaatagtctttcaggagttccgccagaggtacgaaatccttgccgccaatgctatccctaagggtttcatggacgggaagcaagcctgcatactgatgatcaaagcattggagctcgaccccaatctttacagaattggccagtcgaaaatctttttcagaacaggcgtcctggcacacctagaggaagaacgagacctcaagatcactgatgttataatggcattccaggcaatgtgtcggggctacttggcccgaaaagcattcgccaaacgtcagcaacagctgactgccatgaaagtgatccagaggaattgtgctgcttaccttaaactgagaaactggcagtggtggcgcctctttactaaggtcaagccgctcctacaagtgacaaggcaggaggaggagatgcaggccaaggaggacgaattgcaaaaaactaaggaacgccagcaaaaagccgagaatgagttaaaggaactggagcaaaagcattctcagctaacagaggagaagaacctgctgcaggagcaactgcaggctgaaacggaactgtatgctgaggcagaagagatgagggtgagactggcagcaaaaaagcaggagcttgaggagatcctgcacgagatggaggcacgtctcgaagaagaggaggacagaggccagcaactccaggccgaaagaaagaagatggcgcagcagatgctggacttagaagaacagctcgaggaggaagaggctgcgcgacagaagctgcagttggagaaggtcaccgccgaggccaagatcaagaagctggaggatgaaattctagtcatggatgatcaaaataacaaactgagcaaggagcgtaaactgctggaagagcgcatctcagacctgacaacgaacctggctgaggaggaagagaaggcaaaaaatttgaccaagctgaagaataagcacgagagtatgatttcagaacttgaggtgagactaaagaaggaagaaaagagtcgccaggagctcgaaaaactgaagagaaagctcgagggggatgcatcagactttcatgagcaaatcgccgacctacaggcccaaatcgccgaacttaagatgcagttggccaagaaagaagaggaactccaggccgccctggcacgcctggacgacgaaatcgcgcagaaaaataacgctcttaagaagattagggaactggaaggtcatatctctgacctccaagaggacctcgacagcgaaagagctgcacgtaacaaagccgaaaaacagaagcgggacctgggggaagagctggaagccctcaaaaccgagctcgaggataccctcgactcaacagccacacagcaggagctaagagccaaaagggagcaggaagtgacggtactgaaaaaggccctggatgaagagacgcgatctcacgaggcacaggtccaggagatgcgccaaaagcatgcacaggcggttgaggagctgaccgagcagctggagcaattcaaacgcgcaaaggcaaacctggacaagaacaagcagaccctggagaaggagaatgctgacctggccggggagctcagagtcttgggacaagccaaacaggaggttgagcacaagaaaaagaagcttgaggcacaagtgcaggagctgcagtctaaatgttctgacggtgaaagggcaagggctgagcttaacgacaaggtgcacaagctccagaatgaggtggaatctgttactggcatgctaaatgaggccgagggcaaggcaatcaagttggctaaggacgtggcaagccttagctcccaactgcaggacacgcaggaattgttacaggaggaaacccggcagaagttaaacgtgtcaaccaagctccggcagctggaggaagagaggaactctctccaggatcagttggatgaggagatggaagccaagcagaacttggaacgccatatctctacgctgaacatacagctgtccgacagcaagaagaagttgcaggacttcgcaagtacggtggaggccctggaggaaggcaagaaacggttccagaaggagatcgagaatcttacccaacagtacgaggaaaaagctgcagcctacgacaaactggagaaaacgaagaacagactccagcaggaacttgacgacctggtagtcgacctcgataatcagcgacaattagtttcgaacttagagaaaaagcaaagaaaattcgaccagttgctggcggaggagaaaaatatttcaagcaaatacgcagacgagcgggatagagcagaggcggaggcgcgggagaaagaaacaaaggcattgagtctagctagagcgctcgaggaagcactggaggctaaagaggagctcgagaggaccaataagatgctcaaagcggaaatggaggatcttgtctcgtccaaggacgatgtcggcaagaacgtgcacgagctggagaaaagcaagagggctctggagacccagatggaggagatgaagacccagctggaagagctcgaagatgaactgcaagcaactgaggatgccaaactcaggctcgaagttaacatgcaggcactgaaaggacaatttgaaagagatctccaagcacgcgatgaacagaacgaggagaagcggcggcaactccagagacagctccatgagtatgagacagagcttgaagacgaacgaaagcagcgcgcactcgctgcagctgctaagaaaaaactggaaggtgaccttaaggatcttgagctgcaggccgactcagcaatcaaaggaagagaggaggccattaaacagctaaggaagcttcaggctcagatgaaggacttccagagagaactcgaggacgcgcgcgcgtcacgtgatgagatcttcgccacggcaaaagagaacgagaaaaaagccaaatctttagaggcagatcttatgcaactgcaggaggaccttgctgctgctgaacgggcccgcaaacaagcagatctggaaaaggaagagcttgcagaggagctggcaagttcccttagcggtcgcaacgcgcttcaggacgaaaaaagaaggctggaagcacgaatcgcccaactggaggaagagcttgaggaggaacagggcaacatggaggctatgtctgatagggttaggaaggcgacacagcaggccgagcagctcagcaacgagctggctactgagaggagcactgcccagaaaaatgagagcgcccggcagcaactggaacgccagaataaggagcttcggagcaaattacacgaaatggagggagcggtgaaatctaaattcaaaagcaccattgctgccctggaagccaaaatagcacagcttgaggaacaggtggagcaggaagcccgtgaaaaacaggctgctacaaaaagtctcaagcagaaggataagaaattgaaagagatcctgctgcaggtagaagacgagcgaaagatggccgaacaatacaaagaacaggccgaaaaggggaacgcccgggtcaaacaactgaagaggcaactggaggaggctgaagaagaatcccaacgaattaatgccaaccgccggaagttgcagagagagcttgacgaagcaacagagtccaacgaggccatgggacgcgaggtgaatgctctaaagtccaaattacgtcgaggcaacgagactagttttgtaccatcgcgtaggagcggagggcgcagggttattgaaaatgcagacgggagcgaagaggagaccgacacacgcgatgctgacttcaatggtacaaaggcgtcggagtag

SEQ ID NO: 129108 - DNA, 5918 bp, Artificial Sequence
  derived and/or modified sequence
atggcccaaaaggggcagttgtccgacgacgagaaatttttgttcgttgacaagaattttattaactcaccggtcgcccaggccgactgggcagcgaaacgtcttgtttgggttccctctgagaagcagggattcgaagcggcttctattaaagaagaaaagggggacgaggtcgtagtggaactggttgaaaatggcaaaaaggtgaccgtgggcaaggatgacatacaaaagatgaacccacccaagttttcaaaagtggaagatatggccgaattgacgtgccttaacgaagcttctgtccttcataatcttcgcgagagatattttagcggactgatctacacttactccgggttattctgcgtcgtagtcaacccctacaagcatcttcccatctattctgagaagatcgtggatatgtacaaaggcaaaaaaaggcacgaaatgccccctcacatctacgctatcgcagacacagcctacaggtcaatgctgcaagacagagaagaccagtccattttatgtacaggtgagagtggggcagggaaaacggagaatactaaaaaggtgattcagtatctcgctgtcgttgccagtagccataaggggaagaaagacacctccattaccggagaattggagaaacagctgctccaagcaaatccaatattggaggcgttcggcaacgcaaagactgtgaagaacgacaatagtagtaggttcgggaagtttatccggatcaatttcgatgtgacaggttatatcgttggagccaacatcgaaacgtacctgctggaaaaatcgcgggctattcgccaggccagggatgagcggacatttcacatcttttactatatgatagcaggagctaaagagaaaatgcgctcagatctgcttctggaaggctttaacaactacacattcttgtccaacgggtttgttcccatcccagcagctcaggacgacgagatgttccaggagaccgtagaggcgatggcaattatgggattctccgaagaggagcagctctcaatcctcaaagtcgtctccagtgttttgcagctcggtaacattgtattcaaaaaggaacgcaatacagaccaggcatctatgcccgataatactgccgcacaaaaagtgtgtcatctcatgggaataaatgtgacagactttacgcgttccattctaacaccgaggatcaaggtaggaagagacgtagtgcagaaggcacagaccaaggagcaggccgacttcgccgtcgaggcattagccaaggctacttacgagcggctctttaggtggatcctaacgcgagttaataaggcactcgataagactcacaggcagggggcttccttcttagggatcctcgacatcgcaggattcgaaatatttgaggtaaattctttcgaacaactgtgcatcaattataccaacgaaaagcttcagcagctgttcaaccatactatgttcatacttgaacaggaagagtaccagcgagagggaatcgagtggaacttcatagatttcggcctggaccttcagccttgtatcgagttaatagagcgacccaacaatccccctggagtgttggctttgctggacgaggaatgttggttccccaaggccacagataaatcttttgtggagaagttgtgcaccgagcagggttcccaccctaagttccagaagccgaaacagctcaaagacaagaccgagttctccattatccactacgctggcaaggtggactataatgcatctgcatggcttaccaaaaacatggaccctctgaatgacaacgtgacaagcctgctcaacgcgagttcagataagtttgtcgccgacctgtggaaggatgttgatagaattgtcgggttggaccagatggcaaaaatgacagagtcaagcttgcccagcgcaagcaaaacgaaaaagggaatgttcagaacggtgggccagctgtataaggagcagctgggaaaactgatgacaaccttgcgcaacactacgcctaattttgtgcgatgcatcattcccaaccatgagaagcgcagcggaaagctggacgcctttctggtacttgaacaactccgatgtaatggggtgttagaaggtatacgcatctgtcgccaagggtttcccaacagaatcgtcttccaagagtttcgccagcgctacgagatattggcagccaatgctattcccaaagggtttatggacggcaaacaggcatgtatactcatgataaaagcgcttgagctagatccaaatttatacaggattggtcagtctaagatctttttccgcaccggagtgctcgctcatctcgaagaggagcgtgacctgaaaataacggacgtgatcatggcctttcaggcaatgtgccgtggctaccttgccaggaaagctttcgccaagagacagcagcaattgactgccatgaaagtcattcagcgaaattgcgctgcttaccttaagcttaggaattggcagtggtggcggctgttcactaaagtgaagcccttgctgcaagttaccaggcaagaagaggagatgcaggccaaggaggatgagctccagaaaaccaaggagagacagcagaaagccgagaacgagttaaaagaactggaacagaaacattcccagttgactgaggagaaaaatttgctgcaagaacagcttcaggcagagaccgagctatacgccgaggccgaggaaatgcgggtgcggttagccgctaaaaagcaggaactcgaagaaatcctgcacgagatggaagcaaggctggaagaggaagaggatagagggcagcagctccaggccgaaaggaaaaagatggcccagcagatgcttgatctggaagaacagttggaagaagaggaggccgctcggcagaagttgcaattagagaaagtcacggccgaggccaagatcaagaagctagaggacgagattttagtcatggacgaccagaacaataagctgagcaaggaacgcaagctgttagaggaaagaatttctgacctcacaactaaccttgctgaagaggaggaaaaagcaaaaaacttgaccaagctcaaaaacaaacacgagagcatgatttccgagctagaggtgcggctgaagaaagaggaaaaaagccggcaggaactcgagaagctgaagagaaaactggagggtgatgcatcggactttcacgaacaaattgctgacctgcaggctcaaatcgcagagctgaaaatgcagctggcgaaaaaagaagaggagctccaggccgctcttgctcgcttagatgatgaaatcgcgcagaaaaataatgccctgaagaaaatcagggagcttgaaggacatattagcgacctccaggaggatctggatagcgaacgagctgctagaaacaaggccgagaaacagaagagggatctgggggaagagctggaggccttgaaaactgagctggaagacaccctagacagcacagcgacgcagcaggagctgagggctaaacgtgagcaggaggtgactgtgctcaaaaaagcactggacgaagaaacccggtcacatgaggcccaggtgcaggaaatgcgacagaagcacgcccaggcagtggaggaattaacggagcaactagaacagtttaaacgagcgaaggctaacctggacaaaaacaagcagaccctggaaaaggagaacgccgatctggctggagaactgagggtactggggcaagctaagcaggaggtggaacacaagaagaaaaaactggaggcacaagtccaggagctgcagtccaaatgctctgatggtgagcgggcaagagcagaactgaacgacaaggttcacaagctgcagaatgaggtggaatccgttaccggcatgttaaatgaggccgagggcaaggctataaagcttgcaaaggatgttgcctctctaagctcccaacttcaggacacacaggagctccttcaggaggagacgagacagaaactgaatgtttcaactaagctccggcagcttgaggaggaacgcaactcattgcaggaccagctggatgaggaaatggaagcaaagcagaacctagagcgacacatttctaccctgaacatacagctatcggattcgaagaagaagttacaggactttgcctccacggtagaagcattggaggaaggcaagaaaaggttccagaaagagattgaaaatctgactcaacagtatgaagagaaagctgccgcatatgataaattagagaaaacgaagaaccgtctgcaacaagaattggatgacctcgtggtggacctggataaccagagacaacttgtaagtaatctggagaagaaacagagaaagttcgatcaactgctggcagaggagaaaaacatttcatcaaagtatgccgacgagagggatagagcggaggcagaggccagggagaaggaaacaaaagccctcagcctggcccgagctctcgaagaagcattagaagccaaggaggagttggagagaaccaataaaatgctgaaggccgaaatggaggacctcgtcagcagtaaggatgatgttggaaaaaacgtgcatgagctggaaaaaagcaaaagggccttagaaacgcaaatggaggaaatgaaaacacagctggaagagctggaagacgaattgcaggccaccgaggatgcaaaattacggcttgaagttaatatgcaggcactgaagggtcaatttgaaagggacttgcaggcaagagatgagcagaatgaagaaaagagacgccaactccagcgccagctgcatgagtacgagacagaacttgaggacgaacgcaagcaaagggccttagctgctgctgccaaaaaaaaattggaaggggacctgaaggacctggagttgcaggcagactccgcaattaaaggcagggaggaagccataaaacaattgaggaagctgcaggcccagatgaaggatttccagcgcgagctggaggatgcccgagcctcccgcgatgagatttttgctactgccaaggaaaatgagaaaaaggcaaaaagtctggaggcagacctgatgcagctccaggaagatcttgcagccgcagaacgggctcggaagcaagccgatctggagaaagaagaactggccgaggagctggcatcaagcctgtcaggaaggaatgccttacaggatgaaaaacggagattagaagcacgtatagcgcagctggaggaagaactggaggaagaacaggggaatatggaggccatgtccgaccgggtgcggaaggcgactcagcaggctgagcagttgagtaacgaactcgccaccgagcggagcactgcccagaagaatgagagcgccagacagcaactggagaggcagaacaaagagcttaggagcaagctgcatgagatggaaggtgctgtaaagagcaagtttaaatcaaccatcgcagcactggaggctaagatcgctcaactggaggagcaggtggaacaggaggcacgggagaaacaggcagctacgaagtcactgaagcagaaagataagaagttgaaggaaatcctcttgcaggtggaggacgagagaaaaatggcggagcagtataaagaacaggctgagaaagggaatgcgcgtgtgaaacagctcaaaagacagctggaggaagctgaagaggagagccagaggattaatgcaaacaggagaaagctccaaagagaactggatgaagccactgagagtaacgaagctatgggacgtgaagtgaatgccctgaagtcaaagctacgcaggggcaacgagactagcttcgtgccgagccgtcggtcaggaggacgtcgtgttatcgagaacgcggatggaagcgaggaagagacggataccagggacgcagactttaatggtaccaaagcatcagaata

SEQ ID NO: 129109 - DNA, 5919 bp, Artificial Sequence
  derived and/or modified sequence
atggcccagaagggccagctgagcgacgacgagaagttcctgttcgtggacaagaacttcatcaacagccccgtggcccaggccgactgggccgccaagagactggtgtgggtgcccagcgagaagcagggcttcgaggccgccagcatcaaggaggagaagggcgacgaggtggtggtggagctggtggagaacggcaagaaggtgaccgtgggcaaggacgacatccagaagatgaacccccccaagttcagcaaggtggaggacatggccgagctgacctgcctgaacgaggccagcgtgctgcacaacctgagagagagatacttcagcggcctgatctacacctacagcggcctgttctgcgtggtggtgaacccctacaagcacctgcccatctacagcgagaagatcgtggacatgtacaagggcaagaagagacacgagatgcccccccacatctacgccatcgccgacaccgcctacagaagcatgctgcaggacagagaggaccagagcatcctgtgcaccggcgagagcggcgccggcaagaccgagaacaccaagaaggtgatccagtacctggccgtggtggccagcagccacaagggcaagaaggacaccagcatcaccggcgagctggagaagcagctgctgcaggccaaccccatcctggaggccttcggcaacgccaagaccgtgaagaacgacaacagcagcagattcggcaagttcatcagaatcaacttcgacgtgaccggctacatcgtgggcgccaacatcgagacctacctgctggagaagagcagagccatcagacaggccagagacgagagaaccttccacatcttctactacatgatcgccggcgccaaggagaagatgagaagcgacctgctgctggagggcttcaacaactacaccttcctgagcaacggcttcgtgcccatccccgccgcccaggacgacgagatgttccaggagaccgtggaggccatggccatcatgggcttcagcgaggaggagcagctgagcatcctgaaggtggtgagcagcgtgctgcagctgggcaacatcgtgttcaagaaggagagaaacaccgaccaggccagcatgcccgacaacaccgccgcccagaaggtgtgccacctgatgggcatcaacgtgaccgacttcaccagaagcatcctgacccccagaatcaaggtgggcagagacgtggtgcagaaggcccagaccaaggagcaggccgacttcgccgtggaggccctggccaaggccacctacgagagactgttcagatggatcctgaccagagtgaacaaggccctggacaagacccacagacagggcgccagcttcctgggcatcctggacatcgccggcttcgagatcttcgaggtgaacagcttcgagcagctgtgcatcaactacaccaacgagaagctgcagcagctgttcaaccacaccatgttcatcctggagcaggaggagtaccagagagagggcatcgagtggaacttcatcgacttcggcctggacctgcagccctgcatcgagctgatcgagagacccaacaacccccccggcgtgctggccctgctggacgaggagtgctggttccccaaggccaccgacaagagcttcgtggagaagctgtgcaccgagcagggcagccaccccaagttccagaagcccaagcagctgaaggacaagaccgagttcagcatcatccactacgccggcaaggtggactacaacgccagcgcctggctgaccaagaacatggaccccctgaacgacaacgtgaccagcctgctgaacgccagcagcgacaagttcgtggccgacctgtggaaggacgtggacagaatcgtgggcctggaccagatggccaagatgaccgagagcagcctgcccagcgccagcaagaccaagaagggcatgttcagaaccgtgggccagctgtacaaggagcagctgggcaagctgatgaccaccctgagaaacaccacccccaacttcgtgagatgcatcatccccaaccacgagaagagaagcggcaagctggacgccttcctggtgctggagcagctgagatgcaacggcgtgctggagggcatcagaatctgcagacagggcttccccaacagaatcgtgttccaggagttcagacagagatacgagatcctggccgccaacgccatccccaagggcttcatggacggcaagcaggcctgcatcctgatgatcaaggccctggagctggaccccaacctgtacagaatcggccagagcaagatcttcttcagaaccggcgtgctggcccacctggaggaggagagagacctgaagatcaccgacgtgatcatggccttccaggccatgtgcagaggctacctggccagaaaggccttcgccaagagacagcagcagctgaccgccatgaaggtgatccagagaaactgcgccgcctacctgaagctgagaaactggcagtggtggagactgttcaccaaggtgaagcccctgctgcaggtgaccagacaggaggaggagatgcaggccaaggaggacgagctgcagaagaccaaggagagacagcagaaggccgagaacgagctgaaggagctggagcagaagcacagccagctgaccgaggagaagaacctgctgcaggagcagctgcaggccgagaccgagctgtacgccgaggccgaggagatgagagtgagactggccgccaagaagcaggagctggaggagatcctgcacgagatggaggccagactggaggaggaggaggacagaggccagcagctgcaggccgagagaaagaagatggcccagcagatgctggacctggaggagcagctggaggaggaggaggccgccagacagaagctgcagctggagaaggtgaccgccgaggccaagatcaagaagctggaggacgagatcctggtgatggacgaccagaacaacaagctgagcaaggagagaaagctgctggaggagagaatcagcgacctgaccaccaacctggccgaggaggaggagaaggccaagaacctgaccaagctgaagaacaagcacgagagcatgatcagcgagctggaggtgagactgaagaaggaggagaagagcagacaggagctggagaagctgaagagaaagctggagggcgacgccagcgacttccacgagcagatcgccgacctgcaggcccagatcgccgagctgaagatgcagctggccaagaaggaggaggagctgcaggccgccctggccagactggacgacgagatcgcccagaagaacaacgccctgaagaagatcagagagctggagggccacatcagcgacctgcaggaggacctggacagcgagagagccgccagaaacaaggccgagaagcagaagagagacctgggcgaggagctggaggccctgaagaccgagctggaggacaccctggacagcaccgccacccagcaggagctgagagccaagagagagcaggaggtgaccgtgctgaagaaggccctggacgaggagaccagaagccacgaggcccaggtgcaggagatgagacagaagcacgcccaggccgtggaggagctgaccgagcagctggagcagttcaagagagccaaggccaacctggacaagaacaagcagaccctggagaaggagaacgccgacctggccggcgagctgagagtgctgggccaggccaagcaggaggtggagcacaagaagaagaagctggaggcccaggtgcaggagctgcagagcaagtgcagcgacggcgagagagccagagccgagctgaacgacaaggtgcacaagctgcagaacgaggtggagagcgtgaccggcatgctgaacgaggccgagggcaaggccatcaagctggccaaggacgtggccagcctgagcagccagctgcaggacacccaggagctgctgcaggaggagaccagacagaagctgaacgtgagcaccaagctgagacagctggaggaggagagaaacagcctgcaggaccagctggacgaggagatggaggccaagcagaacctggagagacacatcagcaccctgaacatccagctgagcgacagcaagaagaagctgcaggacttcgccagcaccgtggaggccctggaggagggcaagaagagattccagaaggagatcgagaacctgacccagcagtacgaggagaaggccgccgcctacgacaagctggagaagaccaagaacagactgcagcaggagctggacgacctggtggtggacctggacaaccagagacagctggtgagcaacctggagaagaagcagagaaagttcgaccagctgctggccgaggagaagaacatcagcagcaagtacgccgacgagagagacagagccgaggccgaggccagagagaaggagaccaaggccctgagcctggccagagccctggaggaggccctggaggccaaggaggagctggagagaaccaacaagatgctgaaggccgagatggaggacctggtgagcagcaaggacgacgtgggcaagaacgtgcacgagctggagaagagcaagagagccctggagacccagatggaggagatgaagacccagctggaggagctggaggacgagctgcaggccaccgaggacgccaagctgagactggaggtgaacatgcaggccctgaagggccagttcgagagagacctgcaggccagagacgagcagaacgaggagaagagaagacagctgcagagacagctgcacgagtacgagaccgagctggaggacgagagaaagcagagagccctggccgccgccgccaagaagaagctggagggcgacctgaaggacctggagctgcaggccgacagcgccatcaagggcagagaggaggccatcaagcagctgagaaagctgcaggcccagatgaaggacttccagagagagctggaggacgccagagccagcagagacgagatcttcgccaccgccaaggagaacgagaagaaggccaagagcctggaggccgacctgatgcagctgcaggaggacctggccgccgccgagagagccagaaagcaggccgacctggagaaggaggagctggccgaggagctggccagcagcctgagcggcagaaacgccctgcaggacgagaagagaagactggaggccagaatcgcccagctggaggaggagctggaggaggagcagggcaacatggaggccatgagcgacagagtgagaaaggccacccagcaggccgagcagctgagcaacgagctggccaccgagagaagcaccgcccagaagaacgagagcgccagacagcagctggagagacagaacaaggagctgagaagcaagctgcacgagatggagggcgccgtgaagagcaagttcaagagcaccatcgccgccctggaggccaagatcgcccagctggaggagcaggtggagcaggaggccagagagaagcaggccgccaccaagagcctgaagcagaaggacaagaagctgaaggagatcctgctgcaggtggaggacgagagaaagatggccgagcagtacaaggagcaggccgagaagggcaacgccagagtgaagcagctgaagagacagctggaggaggccgaggaggagagccagagaatcaacgccaacagaagaaagctgcagagagagctggacgaggccaccgagagcaacgaggccatgggcagagaggtgaacgccctgaagagcaagctgagaagaggcaacgagaccagcttcgtgcccagcagaagaagcggcggcagaagagtgatcgagaacgccgacggcagcgaggaggagaccgacaccagagacgccgacttcaacggcaccaaggccagcgagtag

SEQ ID NO: 129110 - protein, 320 aa, Artificial Sequence
  derived and/or modified sequence
MELLSPPLRDVDLTAPDGSLCSFATTDDFYDDPCFDSPDLRFFEDLDPRLMHVGALLKPEEHSHFPAAVHPAPGAREDEHVRAPSGHHQAGRCLLWACKACKRKTTNADRRKAATMRERRRLSKVNEAFETLKRCTSSNPNQRLPKVEILRNAIRYIEGLQALLRDQDAAPPGAAAAFYAPGPLPPGRGGEHYSGDSDASSPRSNCSDGMMDYSGPPSGARRRNCYEGAYYNEAPSEPRPGKSAAVSSLDCLSSIVERISTESPAAPALLLADVPSESPPRRQEAAAPSEGESSGDPTQSPDAAPQCPAGANPNPIYQVL

SEQ ID NO: 129111 - DNA, 1823 bp, Artificial Sequence
  derived and/or modified sequence
gagaagctaggggtgaggaagccctggggcgctgccgccgctttccttaaccacaaatcaggccggacaggagagggaggggtgggggacagtgggtgggcattcagactgccagcactttgctatctacagccggggctcccgagcggcagaaagttccggccactctctgccgcttgggttgggcgaagccaggaccgtgccgcgccaccgccaggatatggagctactgtcgccaccgctccgcgacgtagacctgacggcccccgacggctctctctgctcctttgccacaacggacgacttctatgacgacccgtgtttcgactccccggacctgcgcttcttcgaagacctggacccgcgcctgatgcacgtgggcgcgctcctgaaacccgaagagcactcgcacttccccgcggcggtgcacccggccccgggcgcacgtgaggacgagcatgtgcgcgcgcccagcgggcaccaccaggcgggccgctgcctactgtgggcctgcaaggcgtgcaagcgcaagaccaccaacgccgaccgccgcaaggccgccaccatgcgcgagcggcgccgcctgagcaaagtaaatgaggcctttgagacactcaagcgctgcacgtcgagcaatccaaaccagcggttgcccaaggtggagatcctgcgcaacgccatccgctatatcgagggcctgcaggctctgctgcgcgaccaggacgccgcgccccctggcgccgcagccgccttctatgcgccgggcccgctgcccccgggccgcggcggcgagcactacagcggcgactccgacgcgtccagcccgcgctccaactgctccgacggcatgatggactacagcggccccccgagcggcgcccggcggcggaactgctacgaaggcgcctactacaacgaggcgcccagcgaacccaggcccgggaagagtgcggcggtgtcgagcctagactgcctgtccagcatcgtggagcgcatctccaccgagagccctgcggcgcccgccctcctgctggcggacgtgccttctgagtcgcctccgcgcaggcaagaggctgccgcccccagcgagggagagagcagcggcgaccccacccagtcaccggacgccgccccgcagtgccctgcgggtgcgaaccccaacccgatataccaggtgctctgaggggatggtggccgcccacccgcccgagggatggtgcccctagggtccctcgcgcccaaaagattgaacttaaatgcccccctcccaacagcgctttaaaagcgacctctcttgaggtaggagaggcgggagaactgaagtttccgcccccgccccacagggcaaggacacagcgcggttttttccacgcagcacccttctcggagacccattgcgatggccgctccgtgttcctcggtgggccagagctgaaccttgaggggctaggttcagctttctcgcgccctcccccatgggggtgagaccctcgcagacctaagccctgccccgggatgcaccggttatttgggggggcgtgagacccagtgcactccggtcccaaatgtagcaggtgtaaccgtaacccacccccaacccgtttcccggttcaggaccactttttgtaatacttttgtaatctattcctgtaaataagagttgctttgccagagcaggagcccctggggctgtatttatctctgaggcatggtgtgtggtgctacagggaatttgtacgtttataccgcaggcgggcgagccgcgggcgctcgctcaggtgatcaaaataaaggcgctaatttataaaaaaaaaaaaaaaaaa

SEQ ID NO: 129112 - DNA, 963 bp, Artificial Sequence
  derived and/or modified sequence
atggagctgctgagcccccccctgagagacgtggacctgaccgcccccgacggcagcctgtgcagcttcgccaccaccgacgacttctacgacgacccctgcttcgacagccccgacctgagattcttcgaggacctggaccccagactgatgcacgtgggcgccctgctgaagcccgaggagcacagccacttccccgccgccgtgcaccccgcccccggcgccagagaggacgagcacgtgagagcccccagcggccaccaccaggccggcagatgcctgctgtgggcctgcaaggcctgcaagagaaagaccaccaacgccgacagaagaaaggccgccaccatgagagagagaagaagactgagcaaggtgaacgaggccttcgagaccctgaagagatgcaccagcagcaaccccaaccagagactgcccaaggtggagatcctgagaaacgccatcagatacatcgagggcctgcaggccctgctgagagaccaggacgccgccccccccggcgccgccgccgccttctacgcccccggccccctgccccccggcagaggcggcgagcactacagcggcgacagcgacgccagcagccccagaagcaactgcagcgacggcatgatggactacagcggcccccccagcggcgccagaagaagaaactgctacgagggcgcctactacaacgaggcccccagcgagcccagacccggcaagagcgccgccgtgagcagcctggactgcctgagcagcatcgtggagagaatcagcaccgagagccccgccgcccccgccctgctgctggccgacgtgcccagcgagagcccccccagaagacaggaggccgccgcccccagcgagggcgagagcagcggcgaccccacccagagccccgacgccgccccccagtgccccgccggcgccaaccccaaccccatctaccaggtgctgtag

SEQ ID NO: 129113 - DNA, 963 bp, Artificial Sequence
  derived and/or modified sequence
atggagcttctctcacccccgctccgggacgtggatttgactgccccggatggtagtctgtgttcctttgccacaaccgacgacttctatgatgatccctgttttgactcacctgacctgcggttctttgaagacctggacccgcgcctgatgcacgttggtgcccttctgaaacctgaggaacacagtcactttccagccgccgttcacccagctcccggggccagagaagacgaacacgtacgtgccccatcggggcatcaccaagctggacggtgtctgctgtgggcttgtaaggcctgtaaacgaaagaccaccaatgctgatcggagaaaagctgccaccatgcgagaacgccgacggctgtccaaggtgaacgaagctttcgaaacccttaagagatgcacctcttccaatcccaaccagaggttacctaaagtggagatcctgcgcaacgccatcagatacattgagggtcttcaagctctgctgagagaccaggatgcagctcccccgggcgctgccgccgccttctatgcacccggcccactgcctcctggtcggggcggggagcattactccggtgacagcgatgcttcctccccccggtcaaattgcagtgatgggatgatggactactccggtccaccatccggtgcccgcaggagaaactgctacgagggcgcgtactataacgaggccccctctgaaccccgtcctggcaaatccgctgcagtttcgtctctcgactgcttgagctctatagtggagaggatttcaacagagtctccggccgctcctgctctgctgctggccgatgtgccctcggaaagcccccctcgccggcaagaagcagctgctccgagcgaaggggaatcctccggcgacccaacgcagtcccctgatgccgcacctcagtgtcccgccggcgccaaccctaatccgatttatcaggttctgtag

SEQ ID NO: 129114 - DNA, 963 bp, Artificial Sequence
  derived and/or modified sequence
atggagctgctgagcccccccctgagagatgtggacctgacagccccagatggcagcctgtgcagctttgccaccacagatgacttctatgatgacccctgctttgacagcccagacctgcgcttctttgaggacctggacccccggctgatgcacgtgggcgccctgctgaagccagaggagcacagccacttccctgctgctgtgcacccagcccctggggccagagaagatgagcacgtgcgggcccccagcggccaccaccaggccggccgctgcctgctgtgggcctgcaaggcctgcaagaggaagaccaccaatgctgacaggaggaaggccgccaccatgagggagcggcggcggctgagcaaggtgaatgaggcctttgagaccctgaagcgctgcaccagcagcaaccccaaccagaggctgcccaaggtggagatcctgagaaatgccatccgctacatcgagggcctgcaggccctgctgcgggaccaggatgctgcccctcctggagctgctgctgccttctacgcccctggccccctgcccccaggccggggcggggagcactacagcggggacagtgatgccagcagccccaggagcaactgcagtgatggcatgatggactacagcggcccccccagcggggccaggagaagaaactgctatgagggcgcctactacaatgaggcccccagcgagcccaggcctgggaagtctgctgctgtgagcagcctggactgcctgagcagcatcgtggagcgcatcagcacagagagccctgctgccccagccctgctgctggctgatgtgcccagcgagagccccccccggcggcaggaggccgccgcccccagcgagggggagagcagcggggaccccacccagagcccagatgctgccccccagtgcccagctggggccaaccccaaccccatctaccaggtgctgtag

SEQ ID NO: 129115 - DNA, 963 bp, Artificial Sequence
  derived and/or modified sequence
atggagctgctgagcccccccctgcgggacgtggacctgaccgccccggatgggagcctctgttcgtttgcgaccaccgacgatttctacgatgacccttgcttcgactcacctgacttgagattcttcgaagatcttgacccgagactcatgcatgtcggagcgctgcttaagcctgaggaacatagtcatttccccgctgctgtccaccctgcccccggggcaagagaggacgaacatgttcgtgctccgtccggtcaccatcaagccggccggtgcctgctgtgggcttgtaaggcctgtaagagaaaaaccaccaacgccgatcgcagaaaggctgccaccatgcgtgaaagaaggcgcttgtccaaggttaatgaggcatttgaaactttaaagcggtgtacttcttccaaccccaatcaacgactgccaaaagttgaaatcctcaggaatgcaattcgatatattgaggggctgcaggcactactgagagatcaagacgcagctcctccgggcgctgccgccgctttctacgcacctggaccactgcctcctggccgagggggggagcactatagcggggactcagacgcatcctcaccccgttcaaattgttcggacggtatgatggattacagcggaccgccctctggagctcgccggcggaactgctatgaaggggcgtactacaacgaagccccctccgaaccgcgccccgggaagtcggcagctgtgagctctttggactgtttgtcctctatagttgaaaggatctctaccgagtctccggcagccccggctttgttgctcgccgacgttcctagtgagagtccaccgcggcgtcaagaggctgcggcgcccagcgaaggagaatctagtggagacccaactcagtcacccgacgctgccccgcagtgcccagccggggcgaaccccaatcccatataccaagttctgtag

SEQ ID NO: 129116 - DNA, 1801 bp, Artificial Sequence
  derived and/or modified sequence
gctaggggtgaggaagccctggggcgctgccgccgctttccttaaccacaaatcaggccggacaggagagggaggggtgggggacagtgggtgggcattcagactgccagcactttgctatctacagccggggctcccgagcggcagaaagttccggccactctctgccgcttgggttgggcgaagccaggaccgtgccgcgccaccgccaggatatggagctactgtcgccaccgctccgcgacgtagacctgacggcccccgacggctctctctgctcctttgccacaacggacgacttctatgacgacccgtgtttcgactccccggacctgcgcttcttcgaagacctggacccgcgcctgatgcacgtgggcgcgctcctgaaacccgaagagcactcgcacttccccgcggcggtgcacccggccccgggcgcacgtgaggacgagcatgtgcgcgcgcccagcgggcaccaccaggcgggccgctgcctactgtgggcctgcaaggcgtgcaagcgcaagaccaccaacgccgaccgccgcaaggccgccaccatgcgcgagcggcgccgcctgagcaaagtaaatgaggcctttgagacactcaagcgctgcacgtcgagcaatccaaaccagcggttgcccaaggtggagatcctgcgcaacgccatccgctatatcgagggcctgcaggctctgctgcgcgaccaggacgccgcgccccctggcgccgcagccgccttctatgcgccgggcccgctgcccccgggccgcggcggcgagcactacagcggcgactccgacgcgtccagcccgcgctccaactgctccgacggcatgatggactacagcggccccccgagcggcgcccggcggcggaactgctacgaaggcgcctactacaacgaggcgcccagcgaacccaggcccgggaagagtgcggcggtgtcgagcctagactgcctgtccagcatcgtggagcgcatctccaccgagagccctgcggcgcccgccctcctgctggcggacgtgccttctgagtcgcctccgcgcaggcaagaggctgccgcccccagcgagggagagagcagcggcgaccccacccagtcaccggacgccgccccgcagtgccctgcgggtgcgaaccccaacccgatataccaggtgctctgaggggatggtggccgcccacccgcccgagggatggtgcccctagggtccctcgcgcccaaaagattgaacttaaatgcccccctcccaacagcgctttaaaagcgacctctcttgaggtaggagaggcgggagaactgaagtttccgcccccgccccacagggcaaggacacagcgcggttttttccacgcagcacccttctcggagacccattgcgatggccgctccgtgttcctcggtgggccagagctgaaccttgaggggctaggttcagctttctcgcgccctcccccatgggggtgagaccctcgcagacctaagccctgccccgggatgcaccggttatttgggggggcgtgagacccagtgcactccggtcccaaatgtagcaggtgtaaccgtaacccacccccaacccgtttcccggttcaggaccactttttgtaatacttttgtaatctattcctgtaaataagagttgctttgccagagcaggagcccctggggctgtatttatctctgaggcatggtgtgtggtgctacagggaatttgtacgtttataccgcaggcgggcgagccgcgggcgctcgctcaggtgatcaaaataaaggcgctaatttata

SEQ ID NO: 129117 - DNA, 963 bp, Artificial Sequence
  derived and/or modified sequence
atggaactgctctctccgcctctgcgagacgtcgacctgactgcccctgatggttccctttgttcatttgctaccactgatgacttttatgacgatccctgtttcgacagcccggacctccgattctttgaagatttggatcccagactgatgcacgtgggcgcactcttaaaaccagaggaacacagccactttccggctgcagtgcatcccgctcccggagcacgggaagatgagcacgtgagagcaccctctggccaccaccaggcagggcgatgtctgttatgggcttgtaaagcttgtaagcggaagactactaacgctgataggcgcaaggccgctacaatgcgtgaacggcgtcgcctgagtaaggttaacgaggcctttgagaccttgaaacggtgcaccagctctaaccccaatcagaggctgcctaaagtcgagatcctgagaaatgcgatacggtatatcgagggactgcaggcactgctccgagatcaggacgcggctccgcctggcgctgccgcagccttctatgcacctgggccattacctcctggtcgagggggagagcactattcaggggactctgacgcctcttctccaaggagcaactgttcagatggcatgatggactactcagggccaccatctggtgctcgcaggcgtaactgttatgaaggtgcctattacaatgaagcaccatcagaacctcgacccggtaaatccgcggctgtgtcttctctggactgtctgtcctctatagtggaacgtattagtactgaatctccggcagctccagcgttactgctggccgatgtgccatcggagagccctccccgtaggcaggaagcagccgctccatcagagggggaatcatctggagaccctacacagtcacctgatgcagcccctcaatgccccgcaggggcaaatcctaatcctatctaccaggtgttgtag

SEQ ID NO: 129118 - protein, 224 aa, Artificial Sequence
  derived and/or modified sequence
MELYETSPYFYQEPRFYDGENYLPVHLQGFEPPGYERTELTLSPEAPGPLEDKGLGTPEHCPGQCLPWACKVCKRKSVSVDRRRAATLREKRRLKKVNEAFEALKRSTLLNPNQRLPKVEILRSAIQYIERLQALLSSLNQEERDLRYRGGGGPQPGVPSECSSHSASCSPEWGSALEFSANPGDHLLTADPTDAHNLHSLTSIVDSITVEDVSVAFPDETMPN

SEQ ID NO: 129119 - DNA, 1744 bp, Artificial Sequence
  derived and/or modified sequence
tacacccgacggcctcccgacccgtgcacaggagcccgcctgggccaggggcaggctggcagggtggggtgggggccatgcgggagaaagaaggggaatcacatctaatccactgtaaacgccttgatgtgcagcaacagcttagagggggctcaggtttctgtggcgttggctatatttatctctggttccatgccagcggggagggtttaaatggcacccagcagttggcgtgaggggctgctggagcttgggggctggtggcaggaacaagccttttccgaccccatggagctgtatgagacatccccctacttctaccaggaaccccgcttctatgatggggaaaactacctgcctgtccacctccagggcttcgaaccaccaggctacgagcggacggagctcaccctgagccccgaggccccagggccccttgaggacaaggggctggggacccccgagcactgtccaggccagtgcctgccgtgggcgtgtaaggtgtgtaagaggaagtcggtgtccgtggaccggcggcgggcggccacactgagggagaagcgcaggctcaagaaggtgaatgaggccttcgaggccctgaagagaagcaccctgctcaaccccaaccagcggctgcccaaggtggagatcctgcgcagtgccatccagtacatcgagcgcctccaggccctgctcagctccctcaaccaggaggagcgtgacctccgctaccggggcgggggcgggccccagccaggggtgcccagcgaatgcagctctcacagcgcctcctgcagtccagagtggggcagtgcactggagttcagcgccaacccaggggatcatctgctcacggctgaccctacagatgcccacaacctgcactccctcacctccatcgtggacagcatcacagtggaagatgtgtctgtggccttcccagatgaaaccatgcccaactgagattgtcttccaagccgggcatccttgcgagccccccaagctggccacagatgccactacttctgtagcaggggcctcctaagccaggctgccctgatgctaggaagccagctctggggtgccataggccagactatccccttcctcatccatgtaaggttaacccaccccccagcaagggactggacgccctcattcagctgcctccttagaggagagggcatcccctttccagggaggtaaagcaggggaccagagcgccccctcgtgtatgccccagctcagggggcaaactcaggagcttcctttttatcataacgcggcctctaattccaccccccaagtgaaacggtttgagagacgcagtgccctgacctggacaagctgtgcacgtctcctgttctggtctcttcccgatgccagtggctgggctgggcctgccctgaattgagagagaagaaggggagaggaacagccctctgttcccaagtccctggggggccaaacttttgcagtgaatattgggaaccttccagtggttttatgttttgttttgtttcgtgtgttgtttgtaaagctgccatccgaccaaggtctcctgtgctgaagttgccggggacaggcagggaaaaggggttggggcctcttgggggtgatttcttttgttaacaaagcattgtgtggttttgccattgttttgtattttttttttttttttttttttttgctaacttatttggatttccttttttaaaaaatgaataaagactggttgccagaa

SEQ ID NO: 129120 - DNA, 675 bp, Artificial Sequence
  derived and/or modified sequence
atggaactgtacgaaactagcccttacttctatcaggaacctagattttatgacggggaaaattacctgcctgtacacctgcaagggtttgaaccgcccggctacgagaggacggagctgaccttgagcccagaagcccccgggcccttagaggataaaggactggggacgccagaacattgcccaggccagtgcttgccatgggcttgcaaagtgtgtaaacggaagagtgtgtccgttgataggcggagggcagcaacattgagagaaaaaaggaggctcaagaaggtaaacgaggctttcgaggcactaaagaggtctactttactcaatccaaaccagagactccccaaggtcgaaatcctgagatccgcaattcagtacattgagcgcttgcaagcgctgttatctagcctgaaccaggaagagagagacctgcgctatcgtggcggtggaggaccacagcctggcgtgccaagcgagtgtagtagtcactccgccagctgctcccctgagtggggaagtgccctagagtttagcgccaatccgggagatcacctactcaccgccgaccccacagacgctcacaatctgcatagcctgactagtattgtggattcgataaccgtggaagatgtgtctgtggccttcccggacgagaccatgcccaactag

SEQ ID NO: 129121 - DNA, 675 bp, Artificial Sequence
  derived and/or modified sequence
atggagctgtatgagaccagcccctacttctaccaggagccccgcttctatgatggagagaactacctgcctgtgcacctgcagggctttgagcccccaggctatgaaagaacagagctgaccctgagccctgaggcccctggccccctggaggacaagggcctgggcaccccagagcactgccccggccagtgcctgccctgggcctgcaaggtgtgcaagaggaagtctgtgtctgtggacagaagaagagctgccaccctgcgggagaagaggcggctgaagaaggtgaatgaggcctttgaggccctgaagaggagcaccctgctgaaccccaaccagaggctgcccaaggtggagatcctgcggagcgccatccagtacatcgagcggctgcaggccctgctgagcagcctgaaccaggaggagcgggacctgcgctaccggggcggcggcggcccccagcccggggtgcccagtgaatgtagcagccacagcgccagctgcagccctgagtggggcagcgccctggagttcagcgccaaccctggggaccacctgctgacagctgaccccacagatgcccacaacctgcacagcctgaccagcatcgtggacagcatcaccgtggaggatgtgtctgtggccttcccagatgagaccatgcccaactag

SEQ ID NO: 129122 - DNA, 1528 bp, Artificial Sequence
  derived and/or modified sequence
atggcacccagcagttggcgtgaggggctgctggagcttgggggctggtggcaggaacaagccttttccgaccccatggagctgtatgagacatccccctacttctaccaggaaccccgcttctatgatggggaaaactacctgcctgtccacctccagggcttcgaaccaccaggctacgagcggacggagctcaccctgagccccgaggccccagggccccttgaggacaaggggctggggacccccgagcactgtccaggccagtgcctgccgtgggcgtgtaaggtgtgtaagaggaagtcggtgtccgtggaccggcggcgggcggccacactgagggagaagcgcaggctcaagaaggtgaatgaggccttcgaggccctgaagagaagcaccctgctcaaccccaaccagcggctgcccaaggtggagatcctgcgcagtgccatccagtacatcgagcgcctccaggccctgctcagctccctcaaccaggaggagcgtgacctccgctaccggggcgggggcgggccccagccaggggtgcccagcgaatgcagctctcacagcgcctcctgcagtccagagtggggcagtgcactggagttcagcgccaacccaggggatcatctgctcacggctgaccctacagatgcccacaacctgcactccctcacctccatcgtggacagcatcacagtggaagatgtgtctgtggccttcccagatgaaaccatgcccaactgagattgtcttccaagccgggcatccttgcgagccccccaagctggccacagatgccactacttctgtagcaggggcctcctaagccaggctgccctgatgctaggaagccagctctggggtgccataggccagactatccccttcctcatccatgtaaggttaacccaccccccagcaagggactggacgccctcattcagctgcctccttagaggagagggcatcccctttccagggaggtaaagcaggggaccagagcgccccctcgtgtatgccccagctcagggggcaaactcaggagcttcctttttatcataacgcggcctctaattccaccccccaagtgaaacggtttgagagacgcagtgccctgacctggacaagctgtgcacgtctcctgttctggtctcttcccgatgccagtggctgggctgggcctgccctgaattgagagagaagaaggggagaggaacagccctctgttcccaagtccctggggggccaaacttttgcagtgaatattgggaaccttccagtggttttatgttttgttttgtttcgtgtgttgtttgtaaagctgccatccgaccaaggtctcctgtgctgaagttgccggggacaggcagggaaaaggggttggggcctcttgggggtgatttcttttgttaacaaagcattgtgtggttttgccattgttttgtattttttttttttttttttttttttgctaacttatttggatttccttttttaaaaaatgaataaagactggttgcca

SEQ ID NO: 129123 - DNA, 675 bp, Artificial Sequence
  derived and/or modified sequence
atggagctgtacgagaccagcccctacttctaccaggagccccggttctacgatggagagaattatctccccgtgcaccttcaagggtttgaaccaccaggttatgaacgtacagagttgacgctgagccccgaagctcccgggcctttggaagataagggcctcgggacgcctgagcactgtccgggccaatgcctcccttgggcttgcaaggtgtgcaagagaaaaagtgtgagtgtggacaggcggagggcggccaccctgagagagaagcgacgtctgaagaaggtgaatgaggccttcgaagccctgaagaggtctaccctcttgaaccctaaccagaggcttcctaaagttgaaatcttaaggtcagcaatacagtacattgaacgcctgcaggcccttttgtcaagcctgaaccaggaggagcgcgacttgaggtacagaggtggcggcggtccacaacccggggtgccaagcgagtgcagttctcacagcgcctcatgctctccggaatgggggtcagccctcgagtttagtgccaacccgggggaccaccttttaacagcggacccgacagacgcccacaacttgcactctctaacaagcatcgttgattctattacagtggaggatgtttctgtagcttttccagatgagacgatgccaaactag

SEQ ID NO: 129124 - DNA, 675 bp, Artificial Sequence
  derived and/or modified sequence
atggaactatacgaaacttcaccctacttttatcaggagcctcgtttctacgacggcgaaaattacctgccagttcacttgcagggatttgagccacccggatacgagaggacggagttgacattaagtccggaggcgccaggaccccttgaggacaaagggctcggaactcctgaacactgcccgggacaatgcctcccatgggcatgtaaggtttgtaaaagaaaaagcgtatccgtggaccgcaggagggccgctacactgagagaaaagcgtaggctgaaaaaagtgaacgaagctttcgaggctctgaagaggagcacgttgttgaatcccaatcagcgtctgcccaaggtagagatcctgcgcagtgctattcagtacattgagagattgcaggccctgctgtctagcctaaaccaggaggagcgcgacctgcgttacagaggcggaggagggccacaacccggtgtcccctcagagtgcagcagtcactcagcatcatgtagccccgaatggggatcggcgcttgaattttccgctaaccccggagaccatctcttaaccgctgacccgacggatgctcacaacttgcattccttaacctctatcgtggactcgatcaccgtggaggatgtgtccgtcgcttttcccgacgaaaccatgcccaactag

SEQ ID NO: 129125 - DNA, 675 bp, Artificial Sequence
  derived and/or modified sequence
atggagctgtacgagaccagcccctacttctaccaggagcccagattctacgacggcgagaactacctgcccgtgcacctgcagggcttcgagccccccggctacgagagaaccgagctgaccctgagccccgaggcccccggccccctggaggacaagggcctgggcacccccgagcactgccccggccagtgcctgccctgggcctgcaaggtgtgcaagagaaagagcgtgagcgtggacagaagaagagccgccaccctgagagagaagagaagactgaagaaggtgaacgaggccttcgaggccctgaagagaagcaccctgctgaaccccaaccagagactgcccaaggtggagatcctgagaagcgccatccagtacatcgagagactgcaggccctgctgagcagcctgaaccaggaggagagagacctgagatacagaggcggcggcggcccccagcccggcgtgcccagcgagtgcagcagccacagcgccagctgcagccccgagtggggcagcgccctggagttcagcgccaaccccggcgaccacctgctgaccgccgaccccaccgacgcccacaacctgcacagcctgaccagcatcgtggacagcatcaccgtggaggacgtgagcgtggccttccccgacgagaccatgcccaactag

SEQ ID NO: 129126 - protein, 982 aa, Artificial Sequence
  derived and/or modified sequence
MAELEHLGGKRAESARMRRAEQLRRWRGSLTEQEPAERRGAGRQPLTRRGSPRVRFEDGAVFLAACSSGDTDEVRKLLARGADINTVNVDGLTALHQACIDENLDMVKFLVENRANVNQQDNEGWTPLHAAASCGYLNIAEYFINHGASVGIVNSEGEVPSDLAEEPAMKDLLLEQVKKQGVDLEQSRKEEEQQMLQDARQWLNSGKIEDVRQARSGATALHVAAAKGYSEVLRLLIQAGYELNVQDYDGWTPLHAAAHWGVKEACSILAEALCDMDIRNKLGQTPFDVADEGLVEHLELLQKKQNVLRSEKETRNKLIESDLNSKIQSGFFKNKEKMLYEEETPKSQEMEEENKESSSSSSEEEEGEDEASESETEKEADKKPEAFVNHSNSESKSSITEQIPAPAQNTFSASSARRFSSGLFNKPEEPKDESPSSWRLGLRKTGSHNMLSEVANSREPIRDRGSSIYRSSSSPRISALLDNKDKERENKSYISSLAPRKLNSTSDIEEKENRESAVNLVRSGSYTRQLWRDEAKGNEIPQTIAPSTYVSTYLKRTPHKSQADTTAEKTADNVSSSTPLCVITNRPLPSTANGVTATPVLSITGTDSSVEAREKRRSYLTPVRDEEAESLRKARSRQARQTRRSTQGVTLTDLQEAERTFSRSRAERQAQEQPREKPTDTEGLEGSPEKHEPSAVPATEAGEGQQPWGRSLDEEPICHRLRCPAQPDKPTTPASPSTSRPSLYTSSHLLWTNRFSVPDSESSETTTNTTTAKEMDKNENEEADLDEQSSKRLSIRERRRPKERRRGTGINFWTKDEDETDGSEEVKETWAERLKRLESGGSNPTTSDSYGDRASARARREAREARLATLTSRVEEDSNRDYKKLYESALTENQKLKTKLQEAQLELADIKSKLEKVAQQKQEKTSDRSSVLEMEKRERRALERKMSEMEEEMKVLTELKSDNQRLKDENGALIRVISKLSK

SEQ ID NO: 129127 - protein, 208 aa, Artificial Sequence
  derived and/or modified sequence
MDKNENEEADLDEQSSKRLSIRERRRPKERRRGTGINFWTKDEDETDGSEEVKETWHERLSRLESGGSNPTTSDSYGDRASARARREAREARLATLTSRVEEDSNRDYKKLYESALTENQKLKTKLQEAQLELADIKSKLEKVAQQKQEKTSDRSSVLEMEKRERRALERKMSEMEEEMKVLTELKSDNQRLKDENGALIRVISKLSK

SEQ ID NO: 129128 - protein, 982 aa, Artificial Sequence
  derived and/or modified sequence
MAELEHLGGKRAESARMRRAEQLRRWRGSLTEQEPAERRGAGRQPLTRRGSPRVRFEDGAVFLAACSSGDTDEVRKLLARGADINTVNVDGLTALHQACIDENLDMVKFLVENRANVNQQDNEGWTPLHAAASCGYLNIAEYFINHGASVGIVNSEGEVPSDLAEEPAMKDLLLEQVKKQGVDLEQSRKEEEQQMLQDARQWLNSGKIEDVRQARSGATALHVAAAKGYSEVLRLLIQAGYELNVQDYDGWTPLHAAAHWGVKEACSILAEALCDMDIRNKLGQTPFDVADEGLVEHLELLQKKQNVLRSEKETRNKLIESDLNSKIQSGFFKNKEKMLYEEETPKSQEMEEENKESSSSSSEEEEGEDEASESETEKEADKKPEAFVNHSNSESKSSITEQIPAPAQNTFSASSARRFSSGLFNKPEEPKDESPSSWRLGLRKTGSHNMLSEVANSREPIRDRGSSIYRSSSSPRISALLDNKDKERENKSYISSLAPRKLNSTSDIEEKENRESAVNLVRSGSYTRQLWRDEAKGNEIPQTIAPSTYVSTYLKRTPHKSQADTTAEKTADNVSSSTPLCVITNRPLPSTANGVTATPVLSITGTDSSVEAREKRRSYLTPVRDEEAESLRKARSRQARQTRRSTQGVTLTDLQEAERTFSRSRAERQAQEQPREKPTDTEGLEGSPEKHEPSAVPATEAGEGQQPWGRSLDEEPICHRLRCPAQPDKPTTPASPSTSRPSLYTSSHLLWTNRFSVPDSESSETTTNTTTAKEMDKNENEEADLDEQSSKRLSIRERRRPKERRRGTGINFWTKDEDETDGSEEVKETWHERLSRLESGGSNPTTSDSYGDRASARARREAREARLATLTSRVEEDSNRDYKKLYESALTENQKLKTKLQEAQLELADIKSKLEKVAQQKQEKTSDRSSVLEMEKRERRALERKMSEMEEEMKVLTELKSDNQRLKDENGALIRVISKLSK

SEQ ID NO: 129129 - DNA, 2949 bp, Artificial Sequence
  derived and/or modified sequence
atggccgagctggagcaccttggaggcaagcgagctgaaagcgccagaatgcgcagggcagaacagctgcggaggtggagggggtctctgacagaacaagaacctgctgaacgaagaggagctggcagacaacccctcacccggaggggatccccacgtgttaggttcgaagatggtgccgtgttcctggcagcatgtagcagtggagataccgacgaagttcggaaactgttggcccggggagccgacataaacacagtgaacgtggacgggctgaccgccttgcatcaggcttgtattgatgagaacctggacatggttaagtttctggttgagaaccgggctaatgtcaatcaacaggataatgaagggtggacacccctgcatgccgctgcctcttgcggatacctgaatattgccgagtatttcatcaatcatggggcttccgtgggcatcgtgaactcggaaggtgaggtaccatctgacttggcagaagagcctgctatgaaggacctcctgctcgagcaggtgaagaagcaaggggtggatcttgaacaatcccgcaaggaggaggaacagcaaatgctgcaagacgctagacagtggttgaattcaggcaagattgaagatgtgagacaagcacggagcggcgctacagctctccacgttgcagccgcgaagggctacagtgaggtattgaggcttctgattcaagccggctacgagctgaacgtgcaggattatgatggctggactcccctccatgcggcagctcactggggtgtgaaagaagcgtgctccatcctcgcagaagccctgtgtgatatggacataagaaataagctgggccagaccccatttgacgtggccgacgagggcttggtcgaacacttggaattgctacaaaagaaacagaacgtgcttcgctccgaaaaggaaactagaaacaagctaattgagtccgatttaaattctaagattcaatcaggtttctttaaaaataaagaaaaaatgctgtacgaggaagagacccctaaaagccaggagatggaggaggagaataaggagtcttccagcagtagcagcgaggaggaggagggcgaggatgaagccagtgagtctgagacagagaaagaggcggacaagaagccggaggcgttcgtgaaccactccaacagtgagagtaagtcttctatcacggagcagatccccgcgcctgcccagaacacattcagtgcctcttcggcaaggaggttctccagcggactgtttaataagccagaggaacctaaggacgagtcaccctcttcttggcgcctgggtcttcggaagacaggcagccataatatgcttagcgaagtcgccaattcaagagaacctattcgcgacaggggctcatctatttaccggtccagttcgtcacctcgtatcagtgccctgctagacaacaaggataaggaacgggagaacaaaagttacatttctagcctggctccacgaaagttaaactccacgagtgatatcgaagagaaagagaaccgtgagagcgctgttaacttagtccgcagtgggagttatactaggcagctgtggagagacgaggccaagggaaatgagattccacagacgatagccccaagcacatacgtgagcacttatctaaagaggacaccacacaaaagtcaagctgacacgaccgccgagaagacagccgataacgtcagttcttcgacaccgctgtgtgtaatcactaaccggcccctgccttcaaccgccaacggagtgaccgctacccccgttctctcaattactggaacagacagctccgtggaggcgagagaaaaacgtcgctcctatctaacccccgtacgcgatgaggaagccgaatcgctccggaaagcaaggtccagacaggcgaggcagacaaggaggtccactcagggcgtgacactgaccgatttgcaggaggctgagaggaccttctcccggagcagagccgagcgtcaggctcaggaacagccgcgcgagaagccaacagatacagagggccttgaaggatcacctgagaaacatgaaccttcagctgtccctgccactgaggctggcgaaggccaacagccatggggaaggtctctagacgaggaaccaatctgtcaccgcctgcgctgtcccgcccagccagacaaaccaacaacacccgccagtcccagtactagccggccatctctgtatacctcctcacacctgttgtggacaaatcgatttagtgtgcccgactcagagtccagtgaaacaaccaccaacacaaccacggcaaaggagatggataagaacgagaacgaagaggccgatctagatgagcagtcttccaagcgtttatccattagagagcgacgaaggcctaaggaaagacgaaggggcactggcatcaacttttggaccaaagacgaggacgagaccgatggtagcgaggaggtcaaggaaacatgggctgagcgcctgaaacgtctcgaaagcggaggatctaatcccaccaccagcgacagttatggagacagagctagtgctcgggcgaggagagaggcgagggaggcccggttagctacacttaccagtagagtggaggaagactctaaccgcgattacaaaaaactgtatgagtcagcactgacagagaatcagaaactgaagacaaagctgcaggaagcacaacttgagcttgcagacatcaaatctaaactggaaaaggtcgcacagcagaaacaggagaagacctcagacagatctagcgtactggaaatggagaagcgtgagagaagggcccttgagcggaaaatgtccgaaatggaggaggaaatgaaggtgctgactgagctgaagtctgacaatcagaggctgaaggacgaaaacggggcccttatcagagtcatctccaaactttctaagtag

SEQ ID NO: 129130 - DNA, 2949 bp, Artificial Sequence
  derived and/or modified sequence
atggcggaactcgaacacctgggaggcaaacgggctgagtccgcaaggatgaggagggcggagcagctccgtaggtggcggggaagtcttaccgagcaggaaccagctgagcggagaggcgcagggagacagcctttgacacggcgggggtctccaagagtgaggtttgaggacggagccgtgttcctggctgcatgcagttccggcgacacggacgaggtgcggaagctgttggcccgcggcgcagacatcaacacggttaatgtggacggtctgaccgccttacatcaggcatgtatcgacgaaaatctggacatggtcaagttcctggtggaaaacagggccaatgtcaatcaacaggacaacgaagggtggactcctctgcatgccgcagcttcttgcggctatctcaatattgctgagtacttcattaaccatggggctagcgtgggaatcgtgaactcagaaggtgaggtgccatcagacctggctgaagagcctgcgatgaaagaccttttgctcgagcaagtgaagaagcagggtgtcgatctggagcagtccaggaaggaggaggagcagcagatgctgcaagatgctcgtcaatggctgaactctggaaaaatcgaggacgtcaggcaagcgcgctcaggagccactgctttacacgtggcagcagccaaagggtactccgaggtactgcgcctgctgattcaggccggctacgagctgaatgtccaggattacgatggctggactcccctgcatgctgctgcacattggggggtcaaggaggcctgttcaatcctggcagaagcactctgcgacatggacatacgcaacaagctgggacagaccccatttgacgtggctgatgaggggttagtggagcatttggagctgttgcagaagaagcagaatgtactaaggtcggagaaagagacaaggaacaagttgatcgagagtgaccttaactcaaagatccagtctggcttctttaaaaataaagaaaaaatgctatacgaggaagagacacctaaatcacaggagatggaggaagagaacaaagagagctcctcatcttcttccgaggaggaggagggtgaggacgaagcttctgaatccgaaactgagaaagaggcagacaaaaaacctgaagcctttgtgaaccacagcaactcagagagtaagtctagcatcaccgagcagattccagcgcccgctcagaacaccttcagtgcaagcagcgccaggaggtttagctctggcctgttcaacaagcccgaggagccgaaggatgaaagtccatcttcgtggagactgggtttaaggaagaccggatcccataatatgttgtccgaggtcgccaattcaagggaaccgatccgagatagaggatctagcatctacagatcttcttcttctcctcgcataagcgctctgctggacaataaggacaaagaaagggagaataaatcctatatttcaagccttgcaccaagaaagcttaactcaactagcgacatcgaggaaaaggaaaatagagagtccgccgttaacctagtgcggtccggctcgtacacccgccagctgtggcgagatgaagccaaagggaacgaaatcccccagacgatagcaccttccacatacgtctcgacgtacttaaaaaggacacctcacaagagccaagccgacactaccgccgaaaaaacagctgacaacgtatcctcttccacccccttatgtgtcattactaatagacctctcccatctaccgccaatggggtgacggccacacccgtgctttctattacaggaacagacagcagcgttgaagctagggagaaacgccggagttatctgactcccgtgagggacgaagaagccgaaagtctgaggaaagcccggtcacgacaggctcggcagactagacgcagcacacagggagttaccctcactgacttgcaggaagcagagagaaccttctcacgctctagggccgagcgccaggctcaggaacagccacgcgagaagccgaccgacaccgaagggttggaaggaagtccggagaaacacgaaccgtctgccgtgcctgctacagaggcaggggagggtcagcaaccgtggggacggtcacttgatgaagagcccatctgtcaccgcctcagatgccccgctcagccagataagcccaccacccccgccagtcctagtacctctagaccttcactgtatactagttctcatctgttgtggactaatcgcttcagtgtgccagattcagagtcttctgagaccactacaaataccacgacagccaaagagatggataagaatgaaaacgaggaggctgacctagacgagcagagttccaaacgattgtcaattcgggagaggaggagacctaaagaacgaaggagaggcactgggatcaacttctggaccaaggatgaggatgagaccgatgggtctgaggaggtaaaggaaacatggcatgagagattatctcggctcgagtctggaggttctaatcccactacaagcgattcctatggcgaccgcgcctctgccagagcgcgccgagaggcccgcgaagcccggctggcgactctgacatcccgcgtcgaagaggattcaaatcgggactacaagaaactgtatgagtccgccctaacagagaaccagaagctgaaaactaagctccaggaggcccagctggagttagccgacatcaagtcaaagcttgaaaaagtagctcagcagaaacaagaaaagacttccgacagatcatcggtactggagatggagaagcgggagaggcgagccctggagcgcaagatgtcagaaatggaagaagagatgaaggtcctcacggaactcaaaagcgataaccagcgcctgaaggacgaaaacggggcactgattcgagtgattagcaaactgtctaagtag

SEQ ID NO: 129131 - DNA, 2949 bp, Artificial Sequence
  derived and/or modified sequence
atggccgagctggagcacctgggcggcaagagagctgagagcgccaggatgagaagagctgagcagctgcggcgctggaggggcagcctgacagagcaggagcctgctgagaggagaggagctggccggcagcccctgacccggcggggcagcccccgggtgcgctttgaagatggagctgtgttcctggccgcctgcagcagcggggacacagatgaggtgaggaagctgctggcccggggagctgacatcaacacagtgaatgtggatggcctgacagccctgcaccaggcctgcattgatgagaacctggacatggtgaagttcctggtggagaacagagccaacgtgaaccagcaggacaatgaaggctggacccccctgcacgccgccgccagctgtggctacctgaacattgctgagtacttcatcaaccacggggcctctgtgggcatcgtgaacagcgagggggaggtgcccagcgacctggccgaggagcccgccatgaaggacctgctgctggagcaggtgaagaagcagggcgtggacctggagcagagcaggaaggaggaggagcagcagatgctgcaggatgcccggcagtggctgaacagcggcaagattgaagatgtgcggcaggcccggagcggggccacagccctgcacgtggccgccgccaagggctacagcgaggtgctgcggctgctgatccaggccggctatgagctgaatgtgcaggactatgatggctggacccccctgcacgccgccgcccactggggcgtgaaggaggcctgcagcatcctggccgaggccctgtgtgacatggacatccggaacaagctgggccagaccccatttgatgtggctgatgagggcctggtggagcacctggagctgctgcagaagaagcagaatgtgctgcggtctgagaaggagaccaggaacaagctgattgaaagtgacctgaacagcaagatccagagcggcttcttcaagaacaaggagaagatgctgtatgaggaggagacccccaagagccaggagatggaggaggagaacaaggagagcagcagcagcagcagcgaggaggaggagggggaggatgaggccagcgagagcgagacagagaaggaggccgacaagaagccagaggcctttgtgaaccacagcaacagcgagagcaagagcagcatcacagagcagatcccagccccagcccagaacaccttcagcgccagcagcgcccggcgcttcagcagcggcctcttcaacaagccagaggagcccaaggatgagagccccagctcctggaggctgggcctgaggaagacaggcagccacaacatgctgtctgaggtggccaacagccgggagcccatccgggaccggggcagcagcatctaccgcagcagcagcagcccccgcatcagcgccctgctggacaacaaggacaaggagcgggagaacaagagctacatcagcagcctggcccccaggaagctgaacagcaccagtgacatcgaggagaaggagaaccgggagagcgctgtgaacctggtgcgcagcggcagctacacccggcagctgtggagagatgaggccaagggaaatgagatcccccagaccatcgcccccagcacctacgtgtccacctacctgaagaggaccccccacaagagccaggccgacaccacagctgagaagacagctgacaacgtgagcagcagcacccccctgtgtgtgatcaccaaccggcccctgcccagcacagccaatggagtgacagccacccctgtgctgagcatcaccggcacagacagctctgtggaggcccgggagaagaggaggagctacctgacccctgtgagagatgaggaggccgagagcctgaggaaggcccggagccggcaggcccggcagaccaggaggagcacccagggcgtgaccctgacagacctgcaggaggccgagaggaccttcagccgcagcagagctgagcggcaggcccaggagcagccccgggagaagcccacagacacagagggcctggagggcagccctgagaagcatgagcccagcgctgtgcctgccacagaagctggggagggccagcagccctggggccgcagcctggatgaggagcccatctgccaccggctgcgctgcccagcccagcctgacaagcccaccaccccagccagccccagcaccagccggcccagcctgtacaccagcagccacctgctgtggaccaaccgcttctctgtgcctgacagcgagagcagcgagaccaccaccaacaccaccacagccaaggagatggacaagaatgaaaatgaggaggccgacctggatgagcagagcagcaagaggctgagcatccgggagaggagaagacccaaggagaggagaagaggcaccggcatcaacttctggaccaaggatgaagatgaaacagatggcagcgaggaggtgaaggagacctgggccgagcggctgaagaggctggagagcggcggcagcaaccccaccaccagtgacagctatggagaccgggccagcgcccgggcccggcgggaggcccgggaggcccggctggccaccctgaccagccgggtggaggaggacagcaacagagactacaagaagctgtatgagagcgccctgacagagaaccagaagctgaagaccaagctgcaggaggcccagctggagctggccgacatcaagagcaagctggagaaggtggcccagcagaagcaggagaagaccagtgacaggagctctgtgctggagatggagaagcgggagcggcgggccctggagaggaagatgtctgagatggaggaggagatgaaggtgctgacagagctgaagagtgacaaccagaggctgaaggatgaaaatggagccctgatccgggtcatcagcaagctgagcaagtag

SEQ ID NO: 129132 - DNA, 2949 bp, Artificial Sequence
  derived and/or modified sequence
atggccgagctggagcacctgggcggcaagagagctgagagcgccaggatgagaagagctgagcagctgcggcgctggaggggcagcctgacagagcaggagcctgctgagaggagaggagctggccggcagcccctgacccggcggggcagcccccgggtgcgctttgaagatggagctgtgttcctggccgcctgcagcagcggggacacagatgaggtgaggaagctgctggcccggggagctgacatcaacacagtgaatgtggatggcctgacagccctgcaccaggcctgcattgatgagaacctggacatggtgaagttcctggtggagaacagagccaacgtgaaccagcaggacaatgaaggctggacccccctgcacgccgccgccagctgtggctacctgaacattgctgagtacttcatcaaccacggggcctctgtgggcatcgtgaacagcgagggggaggtgcccagcgacctggccgaggagcccgccatgaaggacctgctgctggagcaggtgaagaagcagggcgtggacctggagcagagcaggaaggaggaggagcagcagatgctgcaggatgcccggcagtggctgaacagcggcaagattgaagatgtgcggcaggcccggagcggggccacagccctgcacgtggccgccgccaagggctacagcgaggtgctgcggctgctgatccaggccggctatgagctgaatgtgcaggactatgatggctggacccccctgcacgccgccgcccactggggcgtgaaggaggcctgcagcatcctggccgaggccctgtgtgacatggacatccggaacaagctgggccagaccccatttgatgtggctgatgagggcctggtggagcacctggagctgctgcagaagaagcagaatgtgctgcggtctgagaaggagaccaggaacaagctgattgaaagtgacctgaacagcaagatccagagcggcttcttcaagaacaaggagaagatgctgtatgaggaggagacccccaagagccaggagatggaggaggagaacaaggagagcagcagcagcagcagcgaggaggaggagggggaggatgaggccagcgagagcgagacagagaaggaggccgacaagaagccagaggcctttgtgaaccacagcaacagcgagagcaagagcagcatcacagagcagatcccagccccagcccagaacaccttcagcgccagcagcgcccggcgcttcagcagcggcctcttcaacaagccagaggagcccaaggatgagagccccagctcctggaggctgggcctgaggaagacaggcagccacaacatgctgtctgaggtggccaacagccgggagcccatccgggaccggggcagcagcatctaccgcagcagcagcagcccccgcatcagcgccctgctggacaacaaggacaaggagcgggagaacaagagctacatcagcagcctggcccccaggaagctgaacagcaccagtgacatcgaggagaaggagaaccgggagagcgctgtgaacctggtgcgcagcggcagctacacccggcagctgtggagagatgaggccaagggaaatgagatcccccagaccatcgcccccagcacctacgtgtccacctacctgaagaggaccccccacaagagccaggccgacaccacagctgagaagacagctgacaacgtgagcagcagcacccccctgtgtgtgatcaccaaccggcccctgcccagcacagccaatggagtgacagccacccctgtgctgagcatcaccggcacagacagctctgtggaggcccgggagaagaggaggagctacctgacccctgtgagagatgaggaggccgagagcctgaggaaggcccggagccggcaggcccggcagaccaggaggagcacccagggcgtgaccctgacagacctgcaggaggccgagaggaccttcagccgcagcagagctgagcggcaggcccaggagcagccccgggagaagcccacagacacagagggcctggagggcagccctgagaagcatgagcccagcgctgtgcctgccacagaagctggggagggccagcagccctggggccgcagcctggatgaggagcccatctgccaccggctgcgctgcccagcccagcctgacaagcccaccaccccagccagccccagcaccagccggcccagcctgtacaccagcagccacctgctgtggaccaaccgcttctctgtgcctgacagcgagagcagcgagaccaccaccaacaccaccacagccaaggagatggacaagaatgaaaatgaggaggccgacctggatgagcagagcagcaagaggctgagcatccgggagaggagaagacccaaggagaggagaagaggcaccggcatcaacttctggaccaaggatgaagatgaaacagatggcagcgaggaggtgaaggagacctggcatgagcggctgagccggctggagagcggcggcagcaaccccaccaccagtgacagctatggagaccgggccagcgcccgggcccggcgggaggcccgggaggcccggctggccaccctgaccagccgggtggaggaggacagcaacagagactacaagaagctgtatgagagcgccctgacagagaaccagaagctgaagaccaagctgcaggaggcccagctggagctggccgacatcaagagcaagctggagaaggtggcccagcagaagcaggagaagaccagtgacaggagctctgtgctggagatggagaagcgggagcggcgggccctggagaggaagatgtctgagatggaggaggagatgaaggtgctgacagagctgaagagtgacaaccagaggctgaaggatgaaaatggagccctgatccgggtcatcagcaagctgagcaagtag

SEQ ID NO: 129133 - DNA, 2949 bp, Artificial Sequence
  derived and/or modified sequence
atggccgagctggagcacctgggcggcaagcgggccgagagcgcccgcatgagaagagcagagcaactgcggagatggcgagggagcctgaccgagcaggagcccgcagagcggagaggcgctggtcgacagcccctcacacgccgaggtagtcctagggtccgctttgaagatggcgcggtttttctggctgcttgcagtagtggggataccgatgaggttcggaaactgctggctcggggagcggatattaacactgttaacgtagacgggttaactgcccttcaccaggcctgtatcgatgaaaacttagacatggttaagttccttgttgagaatcgcgccaatgttaatcagcaggacaatgagggctggaccccacttcatgctgcggctagctgtgggtatttgaatattgcagaatattttattaaccatggggccagcgtggggatcgtgaacagtgaaggagaagtaccctctgatctggccgaggagcccgctatgaaggacctgctgctggaacaggtcaagaaacaaggagttgacctcgaacagtcccggaaggaggaagagcagcagatgctgcaggatgcacggcagtggctgaattccgggaaaattgaagacgtccgccaggcaaggtccggagcaacagccctgcacgtagccgcagccaaaggatattcagaggtcctccgtctcctgattcaggccggttatgagcttaacgtgcaggattatgacggatggactcccctccatgccgctgcacattggggagttaaggaggcatgtagcatcctcgcagaggcactgtgcgacatggatatccggaacaaacttggccagacgccctttgatgtggcagacgagggacttgtagagcacctcgagctgctacagaaaaagcagaacgttctgaggtccgaaaaagagaccagaaataagttaattgaaagtgacctgaacagtaagatacagtccggtttcttcaagaataaagaaaaaatgctctatgaagaggaaacccccaaatcgcaggaaatggaagaggaaaataaggaatcatcttcaagctcttctgaagaggaagaaggggaggatgaggcctcagaaagtgaaacggaaaaagaggcagataagaagcctgaggcattcgtgaatcattccaatagtgaaagcaaaagcagcattactgagcagattccagctcccgctcaaaataccttttctgcctcttcagctaggaggttctcttcagggctttttaataagcccgaagagccaaaagatgagtccccgtcaagctggcggctcgggctgcgcaaaacgggatcccataacatgctcagcgaagtggcaaatagcagagaaccgatcagagatcgaggttcttcaatttatcgaagctccagctccccgaggatcagtgctctgctcgacaacaaggataaggaaagggagaacaagagctatatttcatcactcgctccacggaaactgaattcgactagtgatatcgaagaaaaggagaacagggagtcagcagtgaacctcgttcgttcagggagctacacgcggcagctctggcgggacgaagccaaaggtaacgaaattccgcaaaccatagcaccttccacatacgtcagcacatatttgaagaggacaccgcacaagagccaggctgacactaccgccgagaagaccgccgacaacgtgagcagctccacacccctgtgtgtgataaccaacaggcctctgccctccaccgccaatggggtgaccgcgactcccgtcctgagtatcaccgggactgattcctccgtagaagcccgggagaaaaggcgtagctatctgacacccgtgagagacgaggaggccgagtctcttcgaaaggctcgctctaggcaagcacgacaaaccagacgttctactcaaggagtgaccctgacagacctccaggaggccgagcgaacgttttcacgctccagggcggagcgtcaggctcaggagcaaccccgggagaagcccactgacacagaaggcctagagggctcccccgagaagcacgagccttccgcagtccccgcgaccgaggcaggtgagggtcaacagccatggggacggtctcttgacgaagagcccatctgtcaccggctgcgctgcccagcccagccagataagccaactacaccggcgtcgccttcaacatcccggccctctctgtatacctcgtctcaccttctgtggacgaacagattttctgtccctgactccgagtccagtgaaaccacaacgaacacgactaccgctaaagagatggacaaaaacgaaaatgaagaggccgatctggatgaacagagctctaaaaggctgtcaatccgggagcgcagacgccctaaggagagaaggcggggcactggcattaacttctggaccaaagacgaggatgagaccgacgggagtgaggaagttaaagagacatgggccgaaaggctcaagcgtttggagtcaggcggttccaatccaaccactagtgacagctatggcgatcgcgcctcggccagggctcgacgggaagcccgcgaggcacggttggccaccctgacttccagggtggaggaagacagcaacagggactacaaaaaattgtacgaaagcgcactgaccgaaaaccagaagctaaagactaagctgcaggaagcacaactggagctggccgatatcaagagcaaactggaaaaggtcgcccagcagaagcaggaaaaaacctcggataggtctagcgttttagaaatggaaaagagggagagaagggcactagaaaggaaaatgtcggagatggaagaggaaatgaaggttcttaccgagctgaagtccgacaatcagcgattgaaggacgagaatggtgcccttatccgggtgatctcaaagttgagcaaatag

SEQ ID NO: 129134 - DNA, 2949 bp, Artificial Sequence
  derived and/or modified sequence
atggccgagctggagcacctgggcggcaagcgggccgagagcgcccggatgcgcagggctgaacagttgcgcagatggcgagggtctctcaccgagcaggaacccgcagagagacggggagcgggcaggcagcctcttacgcgcaggggcagtccccgagtccgtttcgaggacggcgctgtgtttctcgccgcttgttcctctggagacacagatgaggtgcgcaaactgctcgcgcggggtgctgacataaacacggtcaacgtggacggccttactgcgctccaccaagcttgtatcgacgagaacctggacatggtcaaattccttgtggagaaccgggcaaatgtgaatcagcaggataacgaaggttggacacccctccatgctgccgcgtcatgtgggtatctcaatatagcagaatacttcatcaaccatggcgccagtgtgggcatcgtcaattctgaaggtgaggtgccttccgacctggccgaagagcctgctatgaaagacctactattggaacaggtgaagaagcagggcgtggacctggaacagtctcggaaggaggaagaacagcaaatgctgcaggatgcacgccagtggctgaacagcggaaagattgaagacgtgcgacaagctagaagcggagcgacagctctgcacgtggccgcagctaaagggtactcagaagtccttaggctgcttatccaagccggttacgagttgaacgtccaggactacgacggttggacccccctgcacgccgcagcacactggggagtaaaggaagcctgttctatactggctgaggcactctgcgacatggacattcgtaataagctgggtcagacaccctttgacgtcgctgacgagggactcgttgaacatctcgaactgcttcagaagaagcagaacgtgctgcggtctgaaaaagagaccaggaacaagctgatcgaatctgacctgaactcaaagatccaatccggatttttcaaaaataaggagaagatgctgtatgaagaagagaccccaaagtcacaggaaatggaggaggagaacaaggaaagctcatcctcttcttcagaggaggaggaaggagaggacgaggccagcgaaagcgagacagagaaggaagctgacaagaaaccagaggctttcgtcaaccatagcaactctgagtcgaagagtagtattaccgaacagattcctgcgcccgcccagaataccttctctgcttcctcggcacggcgtttttcatccggactgtttaacaagcctgaagaaccaaaggatgagtccccatccagctggcggctggggctcagaaagactggatctcacaacatgctttccgaggtggctaactcgcgcgagcctatcagagatagagggtcctcaatttacaggagctccagtagtcctcggatctctgcacttcttgataacaaagacaaggagcgggagaacaagtcctacatttcgtctctggcgccgcggaaacttaactctacttctgatattgaggagaaggagaaccgtgagtcagctgtaaatctcgttagaagtggctcttacaccaggcagctctggcgcgacgaggcgaagggaaatgagattcctcaaactatcgcaccaagtacctacgtgtcaacctacctgaaacgtacacctcacaagagccaggcagatacgactgctgaaaaaacagcggacaatgtcagtagtagtacccccttgtgcgtgatcaccaaccgaccgctccccagtaccgctaacggcgtcaccgccaccccggtactgtcgattaccgggacagacagcagcgtggaggccagagaaaagagaaggtcctatttgactcctgtccgtgacgaggaagccgaatctctgcgcaaggcgcggagcaggcaggcccgacagacgagacggagcacgcaaggcgtgactctaacagacctccaggaggccgagagaacctttagccggtctagagctgagaggcaagctcaggaacagcccagggagaaacctacggataccgaaggcctggagggaagccccgagaaacatgaaccgtcagctgtaccagcaacggaggccggcgagggacagcagccttggggcaggagcttggatgaagagccaatctgtcaccggttacggtgtcctgcccagcccgataaacccacgacacctgcctctcccagcaccagccgtcctagtctgtacacctcatcccatcttttgtggacaaatcggttttctgtacctgacagcgagtcatccgaaactacaacgaacacaaccacagctaaggagatggacaagaatgagaacgaggaagccgatctggacgagcagagctcaaagcggctatccatccgtgaaaggcgcagacctaaggaacggaggcgaggcacgggcataaatttctggacaaaggacgaggatgaaacagacggaagcgaggaggtgaaggagacatggcatgagaggctgtcccgacttgaatcaggcggctccaatcccactaccagtgactcttacggcgaccgcgccagcgcgcgggctcgtagggaagctagagaagcccgcctggctacattaactagcagagtcgaagaggattctaaccgggattacaaaaaactgtatgagtccgctctgaccgaaaatcagaaacttaagacaaaactgcaagaggcacagcttgagcttgccgatatcaaaagcaagctagagaaggttgctcaacagaagcaggagaaaacatctgaccggtcgtccgtcttggaaatggagaaacgtgagaggagggccctagaacgcaaaatgtcagagatggaggaggaaatgaaggttcttaccgagctgaagagtgacaatcagagactgaaggacgaaaatggcgcactgatccgcgtgatctctaagctctctaaatag

SEQ ID NO: 129135 - DNA, 2949 bp, Artificial Sequence
  derived and/or modified sequence
atggctgaactggagcatttgggtggaaaacgggctgagtccgccagaatgcgcagagccgaacagttacggagatggaggggtagtctgaccgagcaggaacctgcggagcgtaggggagccggtcggcagccactgactcgcagaggtagccccagagtgcgattcgaagacggggcagtcttccttgctgcatgcagctccggcgacacagatgaggtgaggaaactgctcgccaggggtgccgatattaatactgtgaacgtggatggtttgacggctttgcaccaggcttgtatagacgaaaaccttgatatggtcaagttcctagtggaaaaccgggcaaatgtgaaccagcaagataatgagggatggactcctctgcatgcagccgcatcctgtggatatcttaatatcgcagagtactttataaaccacggcgcatcggttggtatcgtgaactctgaaggggaggtcccatcagatcttgctgaggaacccgctatgaaagaccttcttttagagcaagtgaaaaagcagggtgtcgatctcgagcaaagcagaaaggaggaggagcagcagatgctgcaagacgcacggcaatggctgaattccggcaagatcgaagacgttcggcaagccaggagcggagccaccgctctgcacgtggctgctgcgaaaggatattccgaagtcctacgcctgctgatccaggcagggtacgaattgaacgttcaggactatgatgggtggacacctttgcacgccgcagcacactggggggtgaaagaggcttgctccatcctggctgaagctctgtgtgacatggacatcagaaacaagttgggccaaactcctttcgatgtcgcggatgaaggcttggtggagcatcttgagctattgcaaaaaaagcagaatgttctacgtagcgagaaggaaacgcgcaataagcttatagagtcggacctgaatagcaagatacaatcaggattcttcaaaaacaaggagaagatgctatatgaggaagaaacgccaaagtcccaagagatggaagaagagaacaaagaatcatcctctagtagtagcgaagaggaagagggtgaggatgaggccagtgaaagcgaaaccgagaaagaggcagataaaaagccagaagcatttgtgaatcactctaattcagaatccaaaagcagcatcaccgagcagattcctgctccagcacagaacacattctctgcgtcaagtgctcgccgatttagcagtggtttattcaacaaaccggaggaacccaaggatgagtctccaagttcttggaggctgggcctgcgcaagacaggttctcacaacatgctgagcgaagtagccaattcccgcgaaccaatccgggaccggggtagctccatataccgttccagttcctctccgagaatttctgctctgctggataacaaggataaggagagagagaataagtcatatatcagttccctggccccacggaaactgaatagtacctctgacatcgaggagaaggagaacagggagagtgccgttaacttagtgcggtcgggcagctacacgagacagctctggcgcgatgaggccaagggaaacgaaatcccccagaccattgctccatccacctatgtctccacctatctgaagaggacccctcataaaagtcaagctgacaccaccgctgagaagacggccgataacgtcagcagctcaactcctctgtgcgtgatcaccaacagaccacttcctagcacggctaatggagtcacggccacaccagttctctctataaccggaactgatagctctgttgaagctcgggaaaagagacggagctacctgacaccagtaagggacgaagaggccgaaagtctgcgtaaggcgcgttccagacaggccagacaaacccgaaggtccactcagggcgtcactctgaccgacttacaggaagcagagcggacctttagcagatccagagccgagaggcaggctcaggaacagcctagggagaaacctacagacacagaaggtttagagggatcccctgagaagcatgaaccttctgctgtgcctgctacagaggccggagaaggccagcagccatggggaaggagcctggatgaagaacccatttgtcaccggttaagatgtcccgctcagcctgacaaacccacaacgcctgcatctccatctacctcccgacccagcctttacactagtagtcatctgctctggaccaataggttcagcgtccctgatagcgagagtagcgaaaccacaacaaatactaccacggccaaggagatggataagaatgagaatgaagaagctgaccttgatgagcaatccagcaagcggctgagtattcgggaacgaagaagaccaaaggaaagacgcaggggtacaggcataaatttctggacaaaggatgaggacgaaaccgatggatccgaggaagtgaaggaaacctgggctgagaggttgaagagattggagagtggaggtagcaatccaactacctccgatagttacggggacagagcaagcgccagggccaggagagaggccagggaagctaggctggccactctgacctcacgtgtcgaggaggattcaaacagagattacaaaaaattgtacgaatccgctttaacagaaaaccagaagctaaaaacgaaactgcaggaggctcaactcgaactggctgacattaagagcaagctcgagaaagtggctcagcagaaacaggaaaaaacttctgatagatcttctgttcttgaaatggaaaaacgcgaaaggagggccctggagaggaagatgtctgaaatggaggaggaaatgaaggtcctgactgaattaaagtcggacaaccagcgcttaaaggatgagaatggtgccctgatcagagttatctccaagttgtcaaaatag

SEQ ID NO: 129136 - DNA, 2949 bp, Artificial Sequence
  derived and/or modified sequence
atggctgagctggaacatttggggggaaaacgagcagagagcgccaggatgaggagggccgagcagctgcgtaggtggaggggatctctgaccgagcaagaaccagctgaacgccgtggagcaggcaggcaacccctgacaagacgaggcagtccacgcgtccgcttcgaagacggcgcagtgtttctggctgcatgttcatcaggagataccgatgaagtgaggaagctcctggctaggggcgcagacatcaacacagtgaacgtcgatggcctcacggcgctgcatcaggcttgcatagatgaaaacctagatatggtgaagtttctcgtagagaaccgggctaatgtcaatcagcaagacaacgagggctggacccccctccatgcagcagcctcatgtggataccttaacattgccgagtattttattaaccacggcgcttccgttgggatagtaaattccgaaggggaagtccctagcgacctcgccgaagaaccagctatgaaagaccttctattggagcaggtgaagaagcagggcgtagacctggagcagtccaggaaggaggaggagcagcagatgcttcaggacgctcggcagtggctgaactctggaaagatagaggacgtgcgacaggcaagatcaggcgcaactgcccttcatgtcgcggctgccaagggttactccgaggtgctgcggctgctgatccaggccggatacgagctgaacgtccaggactacgacggatggaccccactgcatgccgctgcccactggggagtcaaggaagcttgcagcattttggctgaagcactttgcgatatggacatccgcaacaagctcgggcaaacaccgtttgatgttgctgatgagggtctcgtcgagcatctggagctactgcagaaaaaacagaatgtgcttaggtcggagaaagagactcggaataagttgattgagtctgacctgaattctaagatccaaagtggattcttcaaaaacaaggagaagatgctatacgaggaggagacacccaaatcccaggaaatggaagaagagaacaaagagtcctccagtagctcttcggaagaagaggaaggcgaagatgaggcctctgagtccgaaacggagaaagaggcagataaaaaacccgaagcctttgtcaaccatagtaactccgagagtaagagcagcatcactgagcaaatcccagcccctgctcagaataccttttcagcctcttcggctagacgcttttcgtcgggtttgtttaataagccagaagaaccaaaggatgaatccccgagctcatggcgccttggacttcgaaaaacggggagccacaatatgctctccgaggtagctaactctcgcgagcccattcgagaccggggatcttctatctatcgcagctcttcatctccacgcatcagcgccctgctcgacaataaggataaggaaagagaaaacaaatcctatatctctagtctcgcaccaaggaaactcaacagtacttctgatattgaggaaaaggagaaccgggaatctgctgtgaacttggtgaggtctgggtcatacactaggcagctttggcgtgatgaagcaaaggggaacgagattccccagacaatcgcacctagcacctatgtttccacctaccttaaaagaactccccataagtcgcaggctgacaccacagcggagaaaaccgccgacaatgtgtcatcctctacccccctctgcgtcataaccaacagaccgctcccctcgactgcaaacggcgttacagccacaccagttctttctattaccggaaccgacagcagcgttgaggctcgcgaaaaacgtcgcagctacctgactccagtgcgcgatgaagaggcagagtccctgcgtaaggcgcgaagccggcaggccaggcagacaagacgcagtacccaaggtgttactctgaccgacttacaggaggctgagcgcacctttagtcgctccagggcagaacggcaagcacaagagcaaccacgcgaaaaaccgacggatacggaaggcctggagggctcccccgagaaacacgaacctagtgcggtcccagcgactgaggcaggtgagggccaacagccctggggccgatcactcgatgaagaacccatctgtcatagactaagatgccccgctcagccagataagcccactacccctgcttccccctctacctcccgcccttccctatacacttctagtcatttgttatggaccaatagattcagtgtgcccgacagcgagtcatccgaaaccacgactaataccactacggctaaggagatggacaaaaatgagaatgaggaagccgatctagatgagcagagctccaagcgcctgagtattagggaacggagaaggcccaaggagcggagacgaggaaccggaatcaacttttggaccaaggatgaagatgaaacagacggttccgaagaggtgaaggaaacctggcatgagagattaagccgattggaatcaggagggtctaatccaacaacctcggatagttacggggaccgtgcctctgcgagagctagaagggaagctagagaggcgaggctggctaccctgacatctcgcgtggaggaagactccaatagggattacaaaaagctgtacgaatctgcactaacggaaaaccagaaattgaagaccaagctccaggaggctcagctcgagcttgcagacattaaaagtaaactggaaaaagtggcccagcaaaaacaggagaaaacgagcgatcgaagcagcgtcctggaaatggagaaacgggaacggcgagctttagagcgcaaaatgtctgagatggaggaggaaatgaaggtgctgaccgagctgaagtccgacaatcagaggctgaaagacgaaaatggcgcattgatccgggtgataagtaagctgtcaaagtag

SEQ ID NO: 129137 - DNA, 11108 bp, Artificial Sequence
  derived and/or modified sequence
actactggcgggaggagtaaagatggcggcgcgagggtctccgccctctgctccgggctgaagcgctctgagagaggcggcagcggcaactcgagccccaacagtaatttagtgttggtagttttggcagcagctgccgaggccggagcaatggcggaactggagcacctaggagggaagcgggcagagtcggcgcgaatgcggcgggcagagcagcttcggcgctggcggggctcgctgacagagcaggagcctgcggagcgacgaggcgcggggcggcagccgctgaccaggcgcgggagccccagggtccgcttcgaggacggtgctgtctttctggccgcctgctctagcggggacaccgacgaggtgagaaagcttctggcaagaggtgctgatatcaacacggtcaacgtggacggcttgacagccctgcaccaggcatgtattgatgaaaatttggacatggtgaagtttctggtggagaacagagccaatgtaaaccagcaagacaacgagggctggacaccccttcatgcagcagcttcctgtggctatctcaacatagcagagtatttcattaatcacggagccagtgtaggtattgtcaatagtgaaggtgaagttccctctgaccttgcagaagagccagccatgaaggatcttcttctggagcaagtaaagaagcaaggagttgatctagagcagtcaagaaaagaagaagagcagcagatgttgcaggatgcccgccagtggctcaacagtgggaaaatagaggatgtgaggcaggctcgctcaggggctacagcccttcatgtggctgctgccaagggctactctgaagtcctcagacttttaattcaggctggctatgaactcaatgttcaggattatgatggctggactcccctccatgctgctgcacactggggagtgaaggaggcttgctccatcctggcagaagcactttgtgacatggatattcgaaataaactgggccagacaccatttgatgtggctgatgagggtctcgtggagcatttggagttgctccagaagaagcagaatgtgcttcgaagtgaaaaggagacacggaataaactcattgagtcagatctgaacagcaagattcagagtgggttctttaagaacaaagagaagatgctctatgaggaggagacacctaagtcccaagaaatggaggaagaaaataaagaatctagtagctccagctcagaggaggaggaaggtgaagatgaagcttctgagtcagaaactgagaaggaggcagataaaaagccagaagcctttgtcaatcattccaactctgaaagcaagagtagtatcacagagcagataccagcaccagctcaaaataccttctctgcctcttctgctaggaggttctcttctggcctttttaacaagccagaagagcccaaagatgaatctccttcttcatggagattgggactgagaaaaactggcagccacaacatgctgagtgaggtggccaattccagggaacctataagggaccgaggctcttccatctatcgctcctcttcaagccctcggatttctgctctactggacaacaaagataaggagagagaaaacaaaagctatattagttcactagcaccccggaagctcaacagcacaagtgatattgaagaaaaggagaacagagaatcagctgttaatctagtgaggagtggctcctatacccggcagctatggagggatgaagcaaaaggaaatgaaatcccacagacaattgctccctccacctatgtatcaacttacttgaaaaggactcctcacaaatcccaggccgacacaacagcagagaaaacagcagacaatgtctcttctagcaccccgctctgtgtgatcaccaatcgccctcttcctagcactgccaatggggttacagctactcctgtgctctccattactggaacagattcctctgtggaagccagggagaagaggaggtcctatctgactcctgtacgggatgaggaagcagagtctttacggaaagcacgctccagacaagctcggcagacacgaaggtctactcaaggtgtcaccctaacagaccttcaagaagcagaaaggacattcagccggtcgagggcagagaggcaagctcaggagcagcctcgtgagaagcccacagacactgaagggcttgaggggagccctgagaagcatgagccctcagcagttccagcaacagaagctggggagggccagcagccctggggcaggagtctggatgaagagcctatctgtcatcgcctgaggtgcccagctcagccagacaaacccaccacgccagcatctccttctacgtcaagaccctcactctacaccagttcccacctgctatggacaaatagattttcagtccctgattctgagagttcagagactaccacaaacactacaactgcaaaggaaatggacaaaaatgagaatgaagaagcagatttggatgagcagtcctctaagaggctgtccatccgagagaggaggcggcccaaggaacgacgaagaggcacaggcatcaatttctggacaaaggatgaggatgaaactgatggctctgaagaggtcaaagaaacgtgggcagagagattgaagaggttggaatcgggaggtagtaatcctacaaccagtgattcttacggtgaccgggcttcagcaagagcccgtcgggaggcccgggaggcccgcctagccaccctgaccagccgtgtagaagaagacagcaacagagattataaaaaactctatgagagtgctctgactgaaaaccaaaaactgaaaacaaaacttcaggaagcccagctagagctagcagatataaagtccaagcttgagaaggtggcccagcagaaacaagaaaagacctctgaccgatcatcagtgctggagatggagaaacgggagaggcgagccttggagcgcaaaatgtcagaaatggaggaagaaatgaaggtgttaacagaactgaaatccgacaaccagaggctgaaagatgaaaatggtgccctcatcagagtcatcagcaaactgtccaagtaggctaggctccagatttatgaggaaagaaagggacagcatttgctgcccccacccctcttttccagtccttgccttccaaccaaaagaaatggatgttttggtggaaggacacttctttctatcaccctcttcagtcacctctatacactctacattttctctgcactttcaatgccctgttcttccaaacccctatcccaagttttatgacagttttaattgaagcatgattgtggtaattcgagccatctggagaatgctctggggagtacaccaggctcagctgtggacccctcaacttcctgctgctcagctactttgtccacattggatttggtccaaacatgtaagacttctaccctaatcagtatccttcagctttttacattaacccagtgtcctctgatataggtgagtcttgtggtagccactccaggatcctgattggggtgccaagagaaacagcaggatgttgaattgatcatcagatgccctctggaatggttagcatccaaggtgacagtgactgcattgaggcgctctattcttcttcacctctcaggaactgacttttattttttctgtcaacacccagtaatctccctaactagttttaacccttattcctccctcatacctagccatttctccaaggcgcaaatggccctggcttcatttattcctttcctttctatccttttatatttttcccttccccaccccctcactcaatggtataaaagctaggacagagcacctgacctcagttgtctttggccattgtgggaagtcattattctggagacaagaaaatcatcactctggtgccttggtggcagcaccactgcctgctccctggaaggtagactatggcataagtgtcagctcattgttttcgtctcccacttatcttcccccttcaaagtgattttctttataagaaaatttgggctctgaatactccattctgcctcacttccttgaccttgttttcctctcttcgccctgacacctgcttctaatgagaaatgaagtcagtgcaaggaggaatgagaggtggggaggggagattgttgagagatggactaggaagtggaagcaggctggaaagacacatatggcgaaagtcaagtatctgaggccacttgcaacattgtgacaaagaagatggaagatagcagcctactgggctgtgagaatagtggtgaatttgattatttccagtggttagatttagcagagagatttactttcttagaaattaataggggaaatggcacttaatagaggtttaatggaatgaagtactttcaacccattgatgagagtcatggaagtttagagtggcaagacccagaggtcattaggtccagctttctattattgtgtcacagggacccctgctaccacagctttcacccatgggcatggtcaggtagcctctggtggctatgcatttattactcaaaagttgggcaactctaataacgagagagtttttcctcatatcagctgaagtctgcctgtggattctccttgtagtccagatctactatctgcaactctttaacggcacttgagatatgtgcagtgggtggtctccccctcagtcttactttgagctgctgttactctagtcctttaagtcattcctcatatggcatgcttttcttacctgtcacatcttggccatcctcctctagacaaaaccagcctttaaaatatcatgtccaggcctggaaagaatacaaatccagtgcaaaattaaaccattagttcttgatgataacctagcattaatacttacagtattttctttttgtaggagttttatcccttggttcacttgagtgtgcaagtcattaaatcctcatcattttagggttgccagtgatattcagtgtttagagtggttcattcccttaatatatactacctctgtctgttaattctttcctaacatgacatgtagctctccatggtcctccctctgaaacaccacatgctgtttaaactagaagctgtaattcaagatcccaattccaccaggtgcagtggctcatgcctgtaatcccagcacttcaggaggccgaggtggacagatcacgaggtcaggagttcgagaccatcctggctaacacggtgaaacccaatctctactaaaaatacaaaaaattagccaggcgtggtggcaggcgcctgtagtcccagctactcaggaggctgaggcaggagaatggcgtgaacccgggaggcggagcttgcagtgagccttgatcacgccactgcactccagcctgggtgacagagcaagactccatctcaaaaaaaataataataataaataaataaaaaatcccaattacagaacaggagatatgtttcctctgacaaaaccccatttttagagtgtataaaattctgtctttcatttccaaccatttttcaagagaagctgctactatcttgagacttcgtattatcatgggagtactgtaagttcagttctcagggaatgctaaattagagtaataagttttatatccttcattctgggagaggaaatcaacataaggtgttgactaattgattatcctggaacattttgaatattggggaaggaagatgatacttctttctcaagaaaagaaaattggattattaggaatacatcttgacccttttccactcaatagaccagggaaaggggttacagagagcctcctcagatctgtttgtgcctttcaaaagtactgggggcagattctcaaaactcttagattggtgttgcatccctgccacttcacatgacccttccatgttaaagctgacttttcttgccagaaagttttccttgtgacaagaaatttgcaagcttttcaatctcaggaatactggattctatagccaagaactcatgaaagtaagtgtaaactatcctaggtaatttcaggtactttctcttatgcaattaattttattaactgatttctggtctatctccagagataaaataccattccttcacaactgtattgtctggaagccccatgagatggtaattataggccttctactagccagcagttctctctggatactggcatcagcaggtctcctttttcttgtgctgcttggacaggtacctactgctggcctcttcagtggccacaatcctcagtcctcacctgctggtttggagactcatgagcaccccaggcagctcaagctgaataaatagctgcagacatggccaacaacatggggctcaggtctgtcacttaacttagagtctttacatgaaatatcagaatgggaaagagaatgttcctggtaaaactctgttttcattaatttgttatttttcaaaaaccgagccacacctttggaagtaatgatttggccattccagagattctggggctaaagtttgtttttccagggctgctgatccttttccagatagctccagagtatgatgaccccagccccatcccaatctctagcgaaagggttatgcaaatctcagggtgttgcctctaaagaatctaaagaatagacatgctttgggcttactcagtgtaccagattctctagtgggccattctcatttgatgttccctagaacctccctgtcttccaactgcaggatgtgtttacttctcttctgggcttcccctggtttctgtcctagttcccaccccaagtttaagaagacttagattcatttattgctatctgaggccactagtgagatttcagatctctcttttgcaacattttacccatttcccttccccaaaccatgtgcttattagatggttccactcaggaagcaaggaagctaaaactcaagttaatggtctgtggatcccacgaaagtgtgtgtaaactactgactgtttctccactagaggcatttaattgagccaaagatgatggaagaagaaactctcaaagccatgtactttgttaggtgtctggatttttggcctgtttgcagcctctcctagccacagacagacactgtctcctctcagagaaaggccagtgtttcggtccaggccactggtgagtgtcggcacccttgaggtgggcatggagtgagcagaagaagcctggagaagagagaactatttaaaagtgttgccagttattcagcttccaggcggctttgcacctccaaaggtgcaaaaaggaaaaagaaagcagaaaggattcagcatttaagcagaaagaaaagggaaattctactctaccagatgagccactggttccactggagcttatcagtgaagtaacactgcaggagccctggtatccttccctcagagatatcatcaggggccctcaaaccccattgtttatgccagcactgaccgcactttaagcacacacttaccaatcagaggtcgtgtaattggcctaaatctaggcccagttattactacaaatcttagtcaccatactctctcgcccaggctggagtgcagtggtgtgatctcagctcactgcaacctccacctcccaggctcaagggatcctctcacctcagctcccgagcagctaggactgcaggtgtgcaccaccatgcccagctaatttttgaatttttttgtagagatggggttttgccatgttgcccaggctggtctgaagctgctgggctcaagcaatccacctggctgggcctcccaaagcgataggattacaggcgtaagggcccacgcccagcctaccatactgattttcaaggcagggtctaacccttcataagatgtgagttcttccaacccaataagcaggcagctttgaggacaaaaaggcaacattaaaagataagaccctagaagtcagaacatctgtattccaaggccaccccttctccttttagtcatgtgactttgggcaggtcaccctccctgtctgtaaaatgaggttggactggataatctttatgtgccctttccttttggcttaaaattctgtgatttattcattcttaggaagatcagcatatttattgggatttctgcttcaaaaattctttctaacctcaaaaatccaagtccagaattttttgttttcttctggatttaaactgtttaatatgagcacatcaaggttgacttctcatcctttttgggaagtgaatttaatattgagggtaattgaatgatgttgcaatggctttccctcctgctggcttggtaagaatattaaagcctgcagaggtggaaattggagctcatggagaaatggatagaaagcaatttgttgcaggcagcctttggacaagttgttttaataggaaatagacctgctgcttcataggtttcctcaaccacctttcctcagctttcttaaaatgggatctacattggctcttcacacccaaatagcagactaatcgtttttctgcttagcaccgtctggttcattgtcttgaactctgccttacagcagcaagaaaattttcctcgacaagaacctcaatctttagttccattgagctccccctctggattttggacttaccagaagtaggaggttctgataccattcaagatggtctttccttcaaagcaggtctgaagaggagactaccaaagcagtgtttacaaacccagagtccacacaaccatattgcatagaacagcacttggctttcacaagcctcctacaggacctggtgtaattggagtgaaagggcagagaccctggaagtggaggtggctgtgtgctgcgatgggaagaaggcagaaggcccaggggctttggacatagagcagggtggaagctgcaagtactgggaaggaagagagtttcacagaaacaaagctttgtcacacagaaatgagttctgtctcactggtgacttcatccctcaggctccagctgagcagagattttaatcagcttccttaatgggtattgacactgctcaggaagcagtagaccctgtcagggacagctattgatcttttgtgttctgattagattggaaaatagatcaacttcattgtagtccaggaactgttggtcacagctactaggaatgaggtgatttctgagggctgagaaaaaacacagaatcttggccagcagccagcagctgcatggtgaaagatgcattcacttctcctttgagagttggggttgagggcaaacatagaacccaggtttggcttacaacccagtgtcccggaagccctccttcgggagaactgtaagtaagaggtgggtgtgtctaaagacaataccattaatgaatgttctggccttacctaaaaaggtttagcaatttggggataactcttggatctagcttatgtgcgttcacatgcacatttgctagcccagagcttttaaaatgaggtctggcatatacttgattacaaatgaaaactcagaaaccaattttatttattaaatcatatcttttgtttttccccctcccttctaatcccccaaaggacctatttgagctgttccccaattcatctgcttattttggaccatgaatctgccagagtgatattttctgttatttctcctccaaatttttccctgatgtttccaataaagatttacttgggtggccccttaaggtgacatcaggatgctcttatgtccttccagaataagcatacacttcactcctctccctttcatctccctctgcattcttaattccttgcttttctcacttggagccgagggtgctttagagaggtggttttccatgaatcagccaagattcctgtagaagttgggtataccaaccaccaccaccaccgccccctattccagtttcaaagctcctcggctatgctaatgtcccctcagagatgaggtttgacttttaggcccgtatgactcctccatagcctggccaaggagaccatgagtagccatgtctggtttactctttatcctgagactgtttatagcttaaaacagaagtgtgtcttcccagcacaaacctaatcaatcagtgtatcagtgcatctggtggcaacagctcagcccattcaaagagcaaggattcaggaaaggcacactgatggtggggagcctcttaagagcctctaatgttctcccaaaaccagagttgagagtcggagtgccagtcgtcggggcccactattcctgaataagggacatgcaagggccagaagtagcttgactctcgcctaaatatctgtgcctttgcctgtcctttctcccactctactgaaacccggaacagattcccgcttgccttctgatgaagagaggttaggtaaagagagtttggaggaaaaaagacaccaggaggcaggctgcggggtaggagagggttctgagaggaggcagcaatccagaatacctccttttctagccagcatcccttgaacttttgaaaggttgtgcctaccactggctggcacaccagggcaatgatttccctgcagaaggaaggaaagaatgtttcacccttgcatccttcttggagaagctacagcctgtgctcagttgagtggttcacactcagactttggctttatggttttccttcctccttgtctttgccctgaccttgatcaacaggggtgaaaagaaccaccctgaggtttccatgcctctcccattttagtggtagcattttgtgtctttactccacccttcaccctagttccaccaaggttcacacaccagatgtaactgtttttcagctgagttgtatggattaacttcagtccactgtaaatacacctgggatggggtggggttggggttgtttagggagaagcagccagacttgctttgtgaactgaatgtatttttatgcaattttgagtggcctttcaaccctaagatgaatggttttgttttactggttgttgttatatagttttgagtattctgtgtttgaaagtttgggaataataatattcacttctatatgatgcctgtaaacacaacagtatttataaatgagtaaataaaactgtgttttaactttg

SEQ ID NO: 129138 - DNA, 9644 bp, Artificial Sequence
  derived and/or modified sequence
gttgctggtacaatctcataaaatgggctccagtgtttagagaaggacagtcagaggagtggccacctgtttgttgaaaattgggcttctgggaaagttgctgcacaagtgtgtggcaaggtgtgtctgagatagcttgacctgctttcacctggaatgatttgatctggcaatagagttccttgccattcctggttttatggaaatcagaggcacaggaagttgatctgggtgttctggggaattgagacaagcctctgccatagtttgttagtactctgtgtttggatgctaactccagtgtgctgagttgagacatcagcaagtgctgggcctggaatgtcagaagcagcaggtcctatctgactcctgtacgggatgaggaagcagagtctttacggaaagcacgctccagacaagctcggcagacacgaaggtctactcaaggtgtcaccctaacagaccttcaagaagcagaaaggacattcagccggtcgagggcagagaggcaagctcaggagcagcctcgtgagaagcccacagacactgaagggcttgaggggagccctgagaagcatgagccctcagcagttccagcaacagaagctggggagggccagcagccctggggcaggagtctggatgaagagcctatctgtcatcgcctgaggtgcccagctcagccagacaaacccaccacgccagcatctccttctacgtcaagaccctcactctacaccagttcccacctgctatggacaaatagattttcagtccctgattctgagagttcagagactaccacaaacactacaactgcaaaggaaatggacaaaaatgagaatgaagaagcagatttggatgagcagtcctctaagaggctgtccatccgagagaggaggcggcccaaggaacgacgaagaggcacaggcatcaatttctggacaaaggatgaggatgaaactgatggctctgaagaggtcaaagaaacgtggcatgaaagactttctaggttggaatcgggaggtagtaatcctacaaccagtgattcttacggtgaccgggcttcagcaagagcccgtcgggaggcccgggaggcccgcctagccaccctgaccagccgtgtagaagaagacagcaacagagattataaaaaactctatgagagtgctctgactgaaaaccaaaaactgaaaacaaaacttcaggaagcccagctagagctagcagatataaagtccaagcttgagaaggtggcccagcagaaacaagaaaagacctctgaccgatcatcagtgctggagatggagaaacgggagaggcgagccttggagcgcaaaatgtcagaaatggaggaagaaatgaagaacctccaccagctaaaacagattcaaaccttgaagcagatgaacgagcaactgcaggctgagaacagggccctgacccgagtggtggccagactctcggagtccatcgagtcctcggacacccaggagctctagttcttgcccctactctccaactcacttccctcctccactactccaggtgttaacagaactgaaatccgacaaccagaggctgaaagatgaaaatggtgccctcatcagagtcatcagcaaactgtccaagtaggctaggctccagatttatgaggaaagaaagggacagcatttgctgcccccacccctcttttccagtccttgccttccaaccaaaagaaatggatgttttggtggaaggacacttctttctatcaccctcttcagtcacctctatacactctacattttctctgcactttcaatgccctgttcttccaaacccctatcccaagttttatgacagttttaattgaagcatgattgtggtaattcgagccatctggagaatgctctggggagtacaccaggctcagctgtggacccctcaacttcctgctgctcagctactttgtccacattggatttggtccaaacatgtaagacttctaccctaatcagtatccttcagctttttacattaacccagtgtcctctgatataggtgagtcttgtggtagccactccaggatcctgattggggtgccaagagaaacagcaggatgttgaattgatcatcagatgccctctggaatggttagcatccaaggtgacagtgactgcattgaggcgctctattcttcttcacctctcaggaactgacttttattttttctgtcaacacccagtaatctccctaactagttttaacccttattcctccctcatacctagccatttctccaaggcgcaaatggccctggcttcatttattcctttcctttctatccttttatatttttcccttccccaccccctcactcaatggtataaaagctaggacagagcacctgacctcagttgtctttggccattgtgggaagtcattattctggagacaagaaaatcatcactctggtgccttggtggcagcaccactgcctgctccctggaaggtagactatggcataagtgtcagctcattgttttcgtctcccacttatcttcccccttcaaagtgattttctttataagaaaatttgggctctgaatactccattctgcctcacttccttgaccttgttttcctctcttcgccctgacacctgcttctaatgagaaatgaagtcagtgcaaggaggaatgagaggtggggaggggagattgttgagagatggactaggaagtggaagcaggctggaaagacacatatggcgaaagtcaagtatctgaggccacttgcaacattgtgacaaagaagatggaagatagcagcctactgggctgtgagaatagtggtgaatttgattatttccagtggttagatttagcagagagatttactttcttagaaattaataggggaaatggcacttaatagaggtttaatggaatgaagtactttcaacccattgatgagagtcatggaagtttagagtggcaagacccagaggtcattaggtccagctttctattattgtgtcacagggacccctgctaccacagctttcacccatgggcatggtcaggtagcctctggtggctatgcatttattactcaaaagttgggcaactctaataacgagagagtttttcctcatatcagctgaagtctgcctgtggattctccttgtagtccagatctactatctgcaactctttaacggcacttgagatatgtgcagtgggtggtctccccctcagtcttactttgagctgctgttactctagtcctttaagtcattcctcatatggcatgcttttcttacctgtcacatcttggccatcctcctctagacaaaaccagcctttaaaatatcatgtccaggcctggaaagaatacaaatccagtgcaaaattaaaccattagttcttgatgataacctagcattaatacttacagtattttctttttgtaggagttttatcccttggttcacttgagtgtgcaagtcattaaatcctcatcattttagggttgccagtgatattcagtgtttagagtggttcattcccttaatatatactacctctgtctgttaattctttcctaacatgacatgtagctctccatggtcctccctctgaaacaccacatgctgtttaaactagaagctgtaattcaagatcccaattccaccaggtgcagtggctcatgcctgtaatcccagcacttcaggaggccgaggtggacagatcacgaggtcaggagttcgagaccatcctggctaacacggtgaaacccaatctctactaaaaatacaaaaaattagccaggcgtggtggcaggcgcctgtagtcccagctactcaggaggctgaggcaggagaatggcgtgaacccgggaggcggagcttgcagtgagccttgatcacgccactgcactccagcctgggtgacagagcaagactccatctcaaaaaaaataataataataaataaataaaaaatcccaattacagaacaggagatatgtttcctctgacaaaaccccatttttagagtgtataaaattctgtctttcatttccaaccatttttcaagagaagctgctactatcttgagacttcgtattatcatgggagtactgtaagttcagttctcagggaatgctaaattagagtaataagttttatatccttcattctgggagaggaaatcaacataaggtgttgactaattgattatcctggaacattttgaatattggggaaggaagatgatacttctttctcaagaaaagaaaattggattattaggaatacatcttgacccttttccactcaatagaccagggaaaggggttacagagagcctcctcagatctgtttgtgcctttcaaaagtactgggggcagattctcaaaactcttagattggtgttgcatccctgccacttcacatgacccttccatgttaaagctgacttttcttgccagaaagttttccttgtgacaagaaatttgcaagcttttcaatctcaggaatactggattctatagccaagaactcatgaaagtaagtgtaaactatcctaggtaatttcaggtactttctcttatgcaattaattttattaactgatttctggtctatctccagagataaaataccattccttcacaactgtattgtctggaagccccatgagatggtaattataggccttctactagccagcagttctctctggatactggcatcagcaggtctcctttttcttgtgctgcttggacaggtacctactgctggcctcttcagtggccacaatcctcagtcctcacctgctggtttggagactcatgagcaccccaggcagctcaagctgaataaatagctgcagacatggccaacaacatggggctcaggtctgtcacttaacttagagtctttacatgaaatatcagaatgggaaagagaatgttcctggtaaaactctgttttcattaatttgttatttttcaaaaaccgagccacacctttggaagtaatgatttggccattccagagattctggggctaaagtttgtttttccagggctgctgatccttttccagatagctccagagtatgatgaccccagccccatcccaatctctagcgaaagggttatgcaaatctcagggtgttgcctctaaagaatctaaagaatagacatgctttgggcttactcagtgtaccagattctctagtgggccattctcatttgatgttccctagaacctccctgtcttccaactgcaggatgtgtttacttctcttctgggcttcccctggtttctgtcctagttcccaccccaagtttaagaagacttagattcatttattgctatctgaggccactagtgagatttcagatctctcttttgcaacattttacccatttcccttccccaaaccatgtgcttattagatggttccactcaggaagcaaggaagctaaaactcaagttaatggtctgtggatcccacgaaagtgtgtgtaaactactgactgtttctccactagaggcatttaattgagccaaagatgatggaagaagaaactctcaaagccatgtactttgttaggtgtctggatttttggcctgtttgcagcctctcctagccacagacagacactgtctcctctcagagaaaggccagtgtttcggtccaggccactggtgagtgtcggcacccttgaggtgggcatggagtgagcagaagaagcctggagaagagagaactatttaaaagtgttgccagttattcagcttccaggcggctttgcacctccaaaggtgcaaaaaggaaaaagaaagcagaaaggattcagcatttaagcagaaagaaaagggaaattctactctaccagatgagccactggttccactggagcttatcagtgaagtaacactgcaggagccctggtatccttccctcagagatatcatcaggggccctcaaaccccattgtttatgccagcactgaccgcactttaagcacacacttaccaatcagaggtcgtgtaattggcctaaatctaggcccagttattactacaaatcttagtcaccatactctctcgcccaggctggagtgcagtggtgtgatctcagctcactgcaacctccacctcccaggctcaagggatcctctcacctcagctcccgagcagctaggactgcaggtgtgcaccaccatgcccagctaatttttgaatttttttgtagagatggggttttgccatgttgcccaggctggtctgaagctgctgggctcaagcaatccacctggctgggcctcccaaagcgataggattacaggcgtaagggcccacgcccagcctaccatactgattttcaaggcagggtctaacccttcataagatgtgagttcttccaacccaataagcaggcagctttgaggacaaaaaggcaacattaaaagataagaccctagaagtcagaacatctgtattccaaggccaccccttctccttttagtcatgtgactttgggcaggtcaccctccctgtctgtaaaatgaggttggactggataatctttatgtgccctttccttttggcttaaaattctgtgatttattcattcttaggaagatcagcatatttattgggatttctgcttcaaaaattctttctaacctcaaaaatccaagtccagaattttttgttttcttctggatttaaactgtttaatatgagcacatcaaggttgacttctcatcctttttgggaagtgaatttaatattgagggtaattgaatgatgttgcaatggctttccctcctgctggcttggtaagaatattaaagcctgcagaggtggaaattggagctcatggagaaatggatagaaagcaatttgttgcaggcagcctttggacaagttgttttaataggaaatagacctgctgcttcataggtttcctcaaccacctttcctcagctttcttaaaatgggatctacattggctcttcacacccaaatagcagactaatcgtttttctgcttagcaccgtctggttcattgtcttgaactctgccttacagcagcaagaaaattttcctcgacaagaacctcaatctttagttccattgagctccccctctggattttggacttaccagaagtaggaggttctgataccattcaagatggtctttccttcaaagcaggtctgaagaggagactaccaaagcagtgtttacaaacccagagtccacacaaccatattgcatagaacagcacttggctttcacaagcctcctacaggacctggtgtaattggagtgaaagggcagagaccctggaagtggaggtggctgtgtgctgcgatgggaagaaggcagaaggcccaggggctttggacatagagcagggtggaagctgcaagtactgggaaggaagagagtttcacagaaacaaagctttgtcacacagaaatgagttctgtctcactggtgacttcatccctcaggctccagctgagcagagattttaatcagcttccttaatgggtattgacactgctcaggaagcagtagaccctgtcagggacagctattgatcttttgtgttctgattagattggaaaatagatcaacttcattgtagtccaggaactgttggtcacagctactaggaatgaggtgatttctgagggctgagaaaaaacacagaatcttggccagcagccagcagctgcatggtgaaagatgcattcacttctcctttgagagttggggttgagggcaaacatagaacccaggtttggcttacaacccagtgtcccggaagccctccttcgggagaactgtaagtaagaggtgggtgtgtctaaagacaataccattaatgaatgttctggccttacctaaaaaggtttagcaatttggggataactcttggatctagcttatgtgcgttcacatgcacatttgctagcccagagcttttaaaatgaggtctggcatatacttgattacaaatgaaaactcagaaaccaattttatttattaaatcatatcttttgtttttccccctcccttctaatcccccaaaggacctatttgagctgttccccaattcatctgcttattttggaccatgaatctgccagagtgatattttctgttatttctcctccaaatttttccctgatgtttccaataaagatttacttgggtggccccttaaggtgacatcaggatgctcttatgtccttccagaataagcatacacttcactcctctccctttcatctccctctgcattcttaattccttgcttttctcacttggagccgagggtgctttagagaggtggttttccatgaatcagccaagattcctgtagaagttgggtataccaaccaccaccaccaccgccccctattccagtttcaaagctcctcggctatgctaatgtcccctcagagatgaggtttgacttttaggcccgtatgactcctccatagcctggccaaggagaccatgagtagccatgtctggtttactctttatcctgagactgtttatagcttaaaacagaagtgtgtcttcccagcacaaacctaatcaatcagtgtatcagtgcatctggtggcaacagctcagcccattcaaagagcaaggattcaggaaaggcacactgatggtggggagcctcttaagagcctctaatgttctcccaaaaccagagttgagagtcggagtgccagtcgtcggggcccactattcctgaataagggacatgcaagggccagaagtagcttgactctcgcctaaatatctgtgcctttgcctgtcctttctcccactctactgaaacccggaacagattcccgcttgccttctgatgaagagaggttaggtaaagagagtttggaggaaaaaagacaccaggaggcaggctgcggggtaggagagggttctgagaggaggcagcaatccagaatacctccttttctagccagcatcccttgaacttttgaaaggttgtgcctaccactggctggcacaccagggcaatgatttccctgcagaaggaaggaaagaatgtttcacccttgcatccttcttggagaagctacagcctgtgctcagttgagtggttcacactcagactttggctttatggttttccttcctccttgtctttgccctgaccttgatcaacaggggtgaaaagaaccaccctgaggtttccatgcctctcccattttagtggtagcattttgtgtctttactccacccttcaccctagttccaccaaggttcacacaccagatgtaactgtttttcagctgagttgtatggattaacttcagtccactgtaaatacacctgggatggggtggggttggggttgtttagggagaagcagccagacttgctttgtgaactgaatgtatttttatgcaattttgagtggcctttcaaccctaagatgaatggttttgttttactggttgttgttatatagttttgagtattctgtgtttgaaagtttgggaataataatattcacttctatatgatgcctgtaaacacaacagtatttataaatgagtaaataaaactgtgttttaactttg

SEQ ID NO: 129139 - DNA, 9463 bp, Artificial Sequence
  derived and/or modified sequence
gttgctggtacaatctcataaaatgggctccagtgtttagagaaggacagtcagaggagtggccacctgtttgttgaaaattgggcttctgggaaagttgctgcacaagtgtgtggcaaggtgtgtctgagatagcttgacctgctttcacctggaatgatttgatctggcaatagagttccttgccattcctggttttatggaaatcagaggcacaggaagttgatctgggtgttctggggaattgagacaagcctctgccatagtttgttagtactctgtgtttggatgctaactccagtgtgctgagttgagacatcagcaagtgctgggcctggaatgtcagaagcagcaggtcctatctgactcctgtacgggatgaggaagcagagtctttacggaaagcacgctccagacaagctcggcagacacgaaggtctactcaaggtgtcaccctaacagaccttcaagaagcagaaaggacattcagccggtcgagggcagagaggcaagctcaggagcagcctcgtgagaagcccacagacactgaagggcttgaggggagccctgagaagcatgagccctcagcagttccagcaacagaagctggggagggccagcagccctggggcaggagtctggatgaagagcctatctgtcatcgcctgaggtgcccagctcagccagacaaacccaccacgccagcatctccttctacgtcaagaccctcactctacaccagttcccacctgctatggacaaatagattttcagtccctgattctgagagttcagagactaccacaaacactacaactgcaaaggaaatggacaaaaatgagaatgaagaagcagatttggatgagcagtcctctaagaggctgtccatccgagagaggaggcggcccaaggaacgacgaagaggcacaggcatcaatttctggacaaaggatgaggatgaaactgatggctctgaagaggtcaaagaaacgtggcatgaaagactttctaggttggaatcgggaggtagtaatcctacaaccagtgattcttacggtgaccgggcttcagcaagagcccgtcgggaggcccgggaggcccgcctagccaccctgaccagccgtgtagaagaagacagcaacagagattataaaaaactctatgagagtgctctgactgaaaaccaaaaactgaaaacaaaacttcaggaagcccagctagagctagcagatataaagtccaagcttgagaaggtggcccagcagaaacaagaaaagacctctgaccgatcatcagtgctggagatggagaaacgggagaggcgagccttggagcgcaaaatgtcagaaatggaggaagaaatgaaggtgttaacagaactgaaatccgacaaccagaggctgaaagatgaaaatggtgccctcatcagagtcatcagcaaactgtccaagtaggctaggctccagatttatgaggaaagaaagggacagcatttgctgcccccacccctcttttccagtccttgccttccaaccaaaagaaatggatgttttggtggaaggacacttctttctatcaccctcttcagtcacctctatacactctacattttctctgcactttcaatgccctgttcttccaaacccctatcccaagttttatgacagttttaattgaagcatgattgtggtaattcgagccatctggagaatgctctggggagtacaccaggctcagctgtggacccctcaacttcctgctgctcagctactttgtccacattggatttggtccaaacatgtaagacttctaccctaatcagtatccttcagctttttacattaacccagtgtcctctgatataggtgagtcttgtggtagccactccaggatcctgattggggtgccaagagaaacagcaggatgttgaattgatcatcagatgccctctggaatggttagcatccaaggtgacagtgactgcattgaggcgctctattcttcttcacctctcaggaactgacttttattttttctgtcaacacccagtaatctccctaactagttttaacccttattcctccctcatacctagccatttctccaaggcgcaaatggccctggcttcatttattcctttcctttctatccttttatatttttcccttccccaccccctcactcaatggtataaaagctaggacagagcacctgacctcagttgtctttggccattgtgggaagtcattattctggagacaagaaaatcatcactctggtgccttggtggcagcaccactgcctgctccctggaaggtagactatggcataagtgtcagctcattgttttcgtctcccacttatcttcccccttcaaagtgattttctttataagaaaatttgggctctgaatactccattctgcctcacttccttgaccttgttttcctctcttcgccctgacacctgcttctaatgagaaatgaagtcagtgcaaggaggaatgagaggtggggaggggagattgttgagagatggactaggaagtggaagcaggctggaaagacacatatggcgaaagtcaagtatctgaggccacttgcaacattgtgacaaagaagatggaagatagcagcctactgggctgtgagaatagtggtgaatttgattatttccagtggttagatttagcagagagatttactttcttagaaattaataggggaaatggcacttaatagaggtttaatggaatgaagtactttcaacccattgatgagagtcatggaagtttagagtggcaagacccagaggtcattaggtccagctttctattattgtgtcacagggacccctgctaccacagctttcacccatgggcatggtcaggtagcctctggtggctatgcatttattactcaaaagttgggcaactctaataacgagagagtttttcctcatatcagctgaagtctgcctgtggattctccttgtagtccagatctactatctgcaactctttaacggcacttgagatatgtgcagtgggtggtctccccctcagtcttactttgagctgctgttactctagtcctttaagtcattcctcatatggcatgcttttcttacctgtcacatcttggccatcctcctctagacaaaaccagcctttaaaatatcatgtccaggcctggaaagaatacaaatccagtgcaaaattaaaccattagttcttgatgataacctagcattaatacttacagtattttctttttgtaggagttttatcccttggttcacttgagtgtgcaagtcattaaatcctcatcattttagggttgccagtgatattcagtgtttagagtggttcattcccttaatatatactacctctgtctgttaattctttcctaacatgacatgtagctctccatggtcctccctctgaaacaccacatgctgtttaaactagaagctgtaattcaagatcccaattccaccaggtgcagtggctcatgcctgtaatcccagcacttcaggaggccgaggtggacagatcacgaggtcaggagttcgagaccatcctggctaacacggtgaaacccaatctctactaaaaatacaaaaaattagccaggcgtggtggcaggcgcctgtagtcccagctactcaggaggctgaggcaggagaatggcgtgaacccgggaggcggagcttgcagtgagccttgatcacgccactgcactccagcctgggtgacagagcaagactccatctcaaaaaaaataataataataaataaataaaaaatcccaattacagaacaggagatatgtttcctctgacaaaaccccatttttagagtgtataaaattctgtctttcatttccaaccatttttcaagagaagctgctactatcttgagacttcgtattatcatgggagtactgtaagttcagttctcagggaatgctaaattagagtaataagttttatatccttcattctgggagaggaaatcaacataaggtgttgactaattgattatcctggaacattttgaatattggggaaggaagatgatacttctttctcaagaaaagaaaattggattattaggaatacatcttgacccttttccactcaatagaccagggaaaggggttacagagagcctcctcagatctgtttgtgcctttcaaaagtactgggggcagattctcaaaactcttagattggtgttgcatccctgccacttcacatgacccttccatgttaaagctgacttttcttgccagaaagttttccttgtgacaagaaatttgcaagcttttcaatctcaggaatactggattctatagccaagaactcatgaaagtaagtgtaaactatcctaggtaatttcaggtactttctcttatgcaattaattttattaactgatttctggtctatctccagagataaaataccattccttcacaactgtattgtctggaagccccatgagatggtaattataggccttctactagccagcagttctctctggatactggcatcagcaggtctcctttttcttgtgctgcttggacaggtacctactgctggcctcttcagtggccacaatcctcagtcctcacctgctggtttggagactcatgagcaccccaggcagctcaagctgaataaatagctgcagacatggccaacaacatggggctcaggtctgtcacttaacttagagtctttacatgaaatatcagaatgggaaagagaatgttcctggtaaaactctgttttcattaatttgttatttttcaaaaaccgagccacacctttggaagtaatgatttggccattccagagattctggggctaaagtttgtttttccagggctgctgatccttttccagatagctccagagtatgatgaccccagccccatcccaatctctagcgaaagggttatgcaaatctcagggtgttgcctctaaagaatctaaagaatagacatgctttgggcttactcagtgtaccagattctctagtgggccattctcatttgatgttccctagaacctccctgtcttccaactgcaggatgtgtttacttctcttctgggcttcccctggtttctgtcctagttcccaccccaagtttaagaagacttagattcatttattgctatctgaggccactagtgagatttcagatctctcttttgcaacattttacccatttcccttccccaaaccatgtgcttattagatggttccactcaggaagcaaggaagctaaaactcaagttaatggtctgtggatcccacgaaagtgtgtgtaaactactgactgtttctccactagaggcatttaattgagccaaagatgatggaagaagaaactctcaaagccatgtactttgttaggtgtctggatttttggcctgtttgcagcctctcctagccacagacagacactgtctcctctcagagaaaggccagtgtttcggtccaggccactggtgagtgtcggcacccttgaggtgggcatggagtgagcagaagaagcctggagaagagagaactatttaaaagtgttgccagttattcagcttccaggcggctttgcacctccaaaggtgcaaaaaggaaaaagaaagcagaaaggattcagcatttaagcagaaagaaaagggaaattctactctaccagatgagccactggttccactggagcttatcagtgaagtaacactgcaggagccctggtatccttccctcagagatatcatcaggggccctcaaaccccattgtttatgccagcactgaccgcactttaagcacacacttaccaatcagaggtcgtgtaattggcctaaatctaggcccagttattactacaaatcttagtcaccatactctctcgcccaggctggagtgcagtggtgtgatctcagctcactgcaacctccacctcccaggctcaagggatcctctcacctcagctcccgagcagctaggactgcaggtgtgcaccaccatgcccagctaatttttgaatttttttgtagagatggggttttgccatgttgcccaggctggtctgaagctgctgggctcaagcaatccacctggctgggcctcccaaagcgataggattacaggcgtaagggcccacgcccagcctaccatactgattttcaaggcagggtctaacccttcataagatgtgagttcttccaacccaataagcaggcagctttgaggacaaaaaggcaacattaaaagataagaccctagaagtcagaacatctgtattccaaggccaccccttctccttttagtcatgtgactttgggcaggtcaccctccctgtctgtaaaatgaggttggactggataatctttatgtgccctttccttttggcttaaaattctgtgatttattcattcttaggaagatcagcatatttattgggatttctgcttcaaaaattctttctaacctcaaaaatccaagtccagaattttttgttttcttctggatttaaactgtttaatatgagcacatcaaggttgacttctcatcctttttgggaagtgaatttaatattgagggtaattgaatgatgttgcaatggctttccctcctgctggcttggtaagaatattaaagcctgcagaggtggaaattggagctcatggagaaatggatagaaagcaatttgttgcaggcagcctttggacaagttgttttaataggaaatagacctgctgcttcataggtttcctcaaccacctttcctcagctttcttaaaatgggatctacattggctcttcacacccaaatagcagactaatcgtttttctgcttagcaccgtctggttcattgtcttgaactctgccttacagcagcaagaaaattttcctcgacaagaacctcaatctttagttccattgagctccccctctggattttggacttaccagaagtaggaggttctgataccattcaagatggtctttccttcaaagcaggtctgaagaggagactaccaaagcagtgtttacaaacccagagtccacacaaccatattgcatagaacagcacttggctttcacaagcctcctacaggacctggtgtaattggagtgaaagggcagagaccctggaagtggaggtggctgtgtgctgcgatgggaagaaggcagaaggcccaggggctttggacatagagcagggtggaagctgcaagtactgggaaggaagagagtttcacagaaacaaagctttgtcacacagaaatgagttctgtctcactggtgacttcatccctcaggctccagctgagcagagattttaatcagcttccttaatgggtattgacactgctcaggaagcagtagaccctgtcagggacagctattgatcttttgtgttctgattagattggaaaatagatcaacttcattgtagtccaggaactgttggtcacagctactaggaatgaggtgatttctgagggctgagaaaaaacacagaatcttggccagcagccagcagctgcatggtgaaagatgcattcacttctcctttgagagttggggttgagggcaaacatagaacccaggtttggcttacaacccagtgtcccggaagccctccttcgggagaactgtaagtaagaggtgggtgtgtctaaagacaataccattaatgaatgttctggccttacctaaaaaggtttagcaatttggggataactcttggatctagcttatgtgcgttcacatgcacatttgctagcccagagcttttaaaatgaggtctggcatatacttgattacaaatgaaaactcagaaaccaattttatttattaaatcatatcttttgtttttccccctcccttctaatcccccaaaggacctatttgagctgttccccaattcatctgcttattttggaccatgaatctgccagagtgatattttctgttatttctcctccaaatttttccctgatgtttccaataaagatttacttgggtggccccttaaggtgacatcaggatgctcttatgtccttccagaataagcatacacttcactcctctccctttcatctccctctgcattcttaattccttgcttttctcacttggagccgagggtgctttagagaggtggttttccatgaatcagccaagattcctgtagaagttgggtataccaaccaccaccaccaccgccccctattccagtttcaaagctcctcggctatgctaatgtcccctcagagatgaggtttgacttttaggcccgtatgactcctccatagcctggccaaggagaccatgagtagccatgtctggtttactctttatcctgagactgtttatagcttaaaacagaagtgtgtcttcccagcacaaacctaatcaatcagtgtatcagtgcatctggtggcaacagctcagcccattcaaagagcaaggattcaggaaaggcacactgatggtggggagcctcttaagagcctctaatgttctcccaaaaccagagttgagagtcggagtgccagtcgtcggggcccactattcctgaataagggacatgcaagggccagaagtagcttgactctcgcctaaatatctgtgcctttgcctgtcctttctcccactctactgaaacccggaacagattcccgcttgccttctgatgaagagaggttaggtaaagagagtttggaggaaaaaagacaccaggaggcaggctgcggggtaggagagggttctgagaggaggcagcaatccagaatacctccttttctagccagcatcccttgaacttttgaaaggttgtgcctaccactggctggcacaccagggcaatgatttccctgcagaaggaaggaaagaatgtttcacccttgcatccttcttggagaagctacagcctgtgctcagttgagtggttcacactcagactttggctttatggttttccttcctccttgtctttgccctgaccttgatcaacaggggtgaaaagaaccaccctgaggtttccatgcctctcccattttagtggtagcattttgtgtctttactccacccttcaccctagttccaccaaggttcacacaccagatgtaactgtttttcagctgagttgtatggattaacttcagtccactgtaaatacacctgggatggggtggggttggggttgtttagggagaagcagccagacttgctttgtgaactgaatgtatttttatgcaattttgagtggcctttcaaccctaagatgaatggttttgttttactggttgttgttatatagttttgagtattctgtgtttgaaagtttgggaataataatattcacttctatatgatgcctgtaaacacaacagtatttataaatgagtaaataaaactgtgttttaactttg

SEQ ID NO: 129140 - DNA, 11111 bp, Artificial Sequence
  derived and/or modified sequence
ggtactactggcgggaggagtaaagatggcggcgcgagggtctccgccctctgctccgggctgaagcgctctgagagaggcggcagcggcaactcgagccccaacagtaatttagtgttggtagttttggcagcagctgccgaggccggagcaatggcggaactggagcacctaggagggaagcgggcagagtcggcgcgaatgcggcgggcagagcagcttcggcgctggcggggctcgctgacagagcaggagcctgcggagcgacgaggcgcggggcggcagccgctgaccaggcgcgggagccccagggtccgcttcgaggacggtgctgtctttctggccgcctgctctagcggggacaccgacgaggtgagaaagcttctggcaagaggtgctgatatcaacacggtcaacgtggacggcttgacagccctgcaccaggcatgtattgatgaaaatttggacatggtgaagtttctggtggagaacagagccaatgtaaaccagcaagacaacgagggctggacaccccttcatgcagcagcttcctgtggctatctcaacatagcagagtatttcattaatcacggagccagtgtaggtattgtcaatagtgaaggtgaagttccctctgaccttgcagaagagccagccatgaaggatcttcttctggagcaagtaaagaagcaaggagttgatctagagcagtcaagaaaagaagaagagcagcagatgttgcaggatgcccgccagtggctcaacagtgggaaaatagaggatgtgaggcaggctcgctcaggggctacagcccttcatgtggctgctgccaagggctactctgaagtcctcagacttttaattcaggctggctatgaactcaatgttcaggattatgatggctggactcccctccatgctgctgcacactggggagtgaaggaggcttgctccatcctggcagaagcactttgtgacatggatattcgaaataaactgggccagacaccatttgatgtggctgatgagggtctcgtggagcatttggagttgctccagaagaagcagaatgtgcttcgaagtgaaaaggagacacggaataaactcattgagtcagatctgaacagcaagattcagagtgggttctttaagaacaaagagaagatgctctatgaggaggagacacctaagtcccaagaaatggaggaagaaaataaagaatctagtagctccagctcagaggaggaggaaggtgaagatgaagcttctgagtcagaaactgagaaggaggcagataaaaagccagaagcctttgtcaatcattccaactctgaaagcaagagtagtatcacagagcagataccagcaccagctcaaaataccttctctgcctcttctgctaggaggttctcttctggcctttttaacaagccagaagagcccaaagatgaatctccttcttcatggagattgggactgagaaaaactggcagccacaacatgctgagtgaggtggccaattccagggaacctataagggaccgaggctcttccatctatcgctcctcttcaagccctcggatttctgctctactggacaacaaagataaggagagagaaaacaaaagctatattagttcactagcaccccggaagctcaacagcacaagtgatattgaagaaaaggagaacagagaatcagctgttaatctagtgaggagtggctcctatacccggcagctatggagggatgaagcaaaaggaaatgaaatcccacagacaattgctccctccacctatgtatcaacttacttgaaaaggactcctcacaaatcccaggccgacacaacagcagagaaaacagcagacaatgtctcttctagcaccccgctctgtgtgatcaccaatcgccctcttcctagcactgccaatggggttacagctactcctgtgctctccattactggaacagattcctctgtggaagccagggagaagaggaggtcctatctgactcctgtacgggatgaggaagcagagtctttacggaaagcacgctccagacaagctcggcagacacgaaggtctactcaaggtgtcaccctaacagaccttcaagaagcagaaaggacattcagccggtcgagggcagagaggcaagctcaggagcagcctcgtgagaagcccacagacactgaagggcttgaggggagccctgagaagcatgagccctcagcagttccagcaacagaagctggggagggccagcagccctggggcaggagtctggatgaagagcctatctgtcatcgcctgaggtgcccagctcagccagacaaacccaccacgccagcatctccttctacgtcaagaccctcactctacaccagttcccacctgctatggacaaatagattttcagtccctgattctgagagttcagagactaccacaaacactacaactgcaaaggaaatggacaaaaatgagaatgaagaagcagatttggatgagcagtcctctaagaggctgtccatccgagagaggaggcggcccaaggaacgacgaagaggcacaggcatcaatttctggacaaaggatgaggatgaaactgatggctctgaagaggtcaaagaaacgtggcatgaaagactttctaggttggaatcgggaggtagtaatcctacaaccagtgattcttacggtgaccgggcttcagcaagagcccgtcgggaggcccgggaggcccgcctagccaccctgaccagccgtgtagaagaagacagcaacagagattataaaaaactctatgagagtgctctgactgaaaaccaaaaactgaaaacaaaacttcaggaagcccagctagagctagcagatataaagtccaagcttgagaaggtggcccagcagaaacaagaaaagacctctgaccgatcatcagtgctggagatggagaaacgggagaggcgagccttggagcgcaaaatgtcagaaatggaggaagaaatgaaggtgttaacagaactgaaatccgacaaccagaggctgaaagatgaaaatggtgccctcatcagagtcatcagcaaactgtccaagtaggctaggctccagatttatgaggaaagaaagggacagcatttgctgcccccacccctcttttccagtccttgccttccaaccaaaagaaatggatgttttggtggaaggacacttctttctatcaccctcttcagtcacctctatacactctacattttctctgcactttcaatgccctgttcttccaaacccctatcccaagttttatgacagttttaattgaagcatgattgtggtaattcgagccatctggagaatgctctggggagtacaccaggctcagctgtggacccctcaacttcctgctgctcagctactttgtccacattggatttggtccaaacatgtaagacttctaccctaatcagtatccttcagctttttacattaacccagtgtcctctgatataggtgagtcttgtggtagccactccaggatcctgattggggtgccaagagaaacagcaggatgttgaattgatcatcagatgccctctggaatggttagcatccaaggtgacagtgactgcattgaggcgctctattcttcttcacctctcaggaactgacttttattttttctgtcaacacccagtaatctccctaactagttttaacccttattcctccctcatacctagccatttctccaaggcgcaaatggccctggcttcatttattcctttcctttctatccttttatatttttcccttccccaccccctcactcaatggtataaaagctaggacagagcacctgacctcagttgtctttggccattgtgggaagtcattattctggagacaagaaaatcatcactctggtgccttggtggcagcaccactgcctgctccctggaaggtagactatggcataagtgtcagctcattgttttcgtctcccacttatcttcccccttcaaagtgattttctttataagaaaatttgggctctgaatactccattctgcctcacttccttgaccttgttttcctctcttcgccctgacacctgcttctaatgagaaatgaagtcagtgcaaggaggaatgagaggtggggaggggagattgttgagagatggactaggaagtggaagcaggctggaaagacacatatggcgaaagtcaagtatctgaggccacttgcaacattgtgacaaagaagatggaagatagcagcctactgggctgtgagaatagtggtgaatttgattatttccagtggttagatttagcagagagatttactttcttagaaattaataggggaaatggcacttaatagaggtttaatggaatgaagtactttcaacccattgatgagagtcatggaagtttagagtggcaagacccagaggtcattaggtccagctttctattattgtgtcacagggacccctgctaccacagctttcacccatgggcatggtcaggtagcctctggtggctatgcatttattactcaaaagttgggcaactctaataacgagagagtttttcctcatatcagctgaagtctgcctgtggattctccttgtagtccagatctactatctgcaactctttaacggcacttgagatatgtgcagtgggtggtctccccctcagtcttactttgagctgctgttactctagtcctttaagtcattcctcatatggcatgcttttcttacctgtcacatcttggccatcctcctctagacaaaaccagcctttaaaatatcatgtccaggcctggaaagaatacaaatccagtgcaaaattaaaccattagttcttgatgataacctagcattaatacttacagtattttctttttgtaggagttttatcccttggttcacttgagtgtgcaagtcattaaatcctcatcattttagggttgccagtgatattcagtgtttagagtggttcattcccttaatatatactacctctgtctgttaattctttcctaacatgacatgtagctctccatggtcctccctctgaaacaccacatgctgtttaaactagaagctgtaattcaagatcccaattccaccaggtgcagtggctcatgcctgtaatcccagcacttcaggaggccgaggtggacagatcacgaggtcaggagttcgagaccatcctggctaacacggtgaaacccaatctctactaaaaatacaaaaaattagccaggcgtggtggcaggcgcctgtagtcccagctactcaggaggctgaggcaggagaatggcgtgaacccgggaggcggagcttgcagtgagccttgatcacgccactgcactccagcctgggtgacagagcaagactccatctcaaaaaaaataataataataaataaataaaaaatcccaattacagaacaggagatatgtttcctctgacaaaaccccatttttagagtgtataaaattctgtctttcatttccaaccatttttcaagagaagctgctactatcttgagacttcgtattatcatgggagtactgtaagttcagttctcagggaatgctaaattagagtaataagttttatatccttcattctgggagaggaaatcaacataaggtgttgactaattgattatcctggaacattttgaatattggggaaggaagatgatacttctttctcaagaaaagaaaattggattattaggaatacatcttgacccttttccactcaatagaccagggaaaggggttacagagagcctcctcagatctgtttgtgcctttcaaaagtactgggggcagattctcaaaactcttagattggtgttgcatccctgccacttcacatgacccttccatgttaaagctgacttttcttgccagaaagttttccttgtgacaagaaatttgcaagcttttcaatctcaggaatactggattctatagccaagaactcatgaaagtaagtgtaaactatcctaggtaatttcaggtactttctcttatgcaattaattttattaactgatttctggtctatctccagagataaaataccattccttcacaactgtattgtctggaagccccatgagatggtaattataggccttctactagccagcagttctctctggatactggcatcagcaggtctcctttttcttgtgctgcttggacaggtacctactgctggcctcttcagtggccacaatcctcagtcctcacctgctggtttggagactcatgagcaccccaggcagctcaagctgaataaatagctgcagacatggccaacaacatggggctcaggtctgtcacttaacttagagtctttacatgaaatatcagaatgggaaagagaatgttcctggtaaaactctgttttcattaatttgttatttttcaaaaaccgagccacacctttggaagtaatgatttggccattccagagattctggggctaaagtttgtttttccagggctgctgatccttttccagatagctccagagtatgatgaccccagccccatcccaatctctagcgaaagggttatgcaaatctcagggtgttgcctctaaagaatctaaagaatagacatgctttgggcttactcagtgtaccagattctctagtgggccattctcatttgatgttccctagaacctccctgtcttccaactgcaggatgtgtttacttctcttctgggcttcccctggtttctgtcctagttcccaccccaagtttaagaagacttagattcatttattgctatctgaggccactagtgagatttcagatctctcttttgcaacattttacccatttcccttccccaaaccatgtgcttattagatggttccactcaggaagcaaggaagctaaaactcaagttaatggtctgtggatcccacgaaagtgtgtgtaaactactgactgtttctccactagaggcatttaattgagccaaagatgatggaagaagaaactctcaaagccatgtactttgttaggtgtctggatttttggcctgtttgcagcctctcctagccacagacagacactgtctcctctcagagaaaggccagtgtttcggtccaggccactggtgagtgtcggcacccttgaggtgggcatggagtgagcagaagaagcctggagaagagagaactatttaaaagtgttgccagttattcagcttccaggcggctttgcacctccaaaggtgcaaaaaggaaaaagaaagcagaaaggattcagcatttaagcagaaagaaaagggaaattctactctaccagatgagccactggttccactggagcttatcagtgaagtaacactgcaggagccctggtatccttccctcagagatatcatcaggggccctcaaaccccattgtttatgccagcactgaccgcactttaagcacacacttaccaatcagaggtcgtgtaattggcctaaatctaggcccagttattactacaaatcttagtcaccatactctctcgcccaggctggagtgcagtggtgtgatctcagctcactgcaacctccacctcccaggctcaagggatcctctcacctcagctcccgagcagctaggactgcaggtgtgcaccaccatgcccagctaatttttgaatttttttgtagagatggggttttgccatgttgcccaggctggtctgaagctgctgggctcaagcaatccacctggctgggcctcccaaagcgataggattacaggcgtaagggcccacgcccagcctaccatactgattttcaaggcagggtctaacccttcataagatgtgagttcttccaacccaataagcaggcagctttgaggacaaaaaggcaacattaaaagataagaccctagaagtcagaacatctgtattccaaggccaccccttctccttttagtcatgtgactttgggcaggtcaccctccctgtctgtaaaatgaggttggactggataatctttatgtgccctttccttttggcttaaaattctgtgatttattcattcttaggaagatcagcatatttattgggatttctgcttcaaaaattctttctaacctcaaaaatccaagtccagaattttttgttttcttctggatttaaactgtttaatatgagcacatcaaggttgacttctcatcctttttgggaagtgaatttaatattgagggtaattgaatgatgttgcaatggctttccctcctgctggcttggtaagaatattaaagcctgcagaggtggaaattggagctcatggagaaatggatagaaagcaatttgttgcaggcagcctttggacaagttgttttaataggaaatagacctgctgcttcataggtttcctcaaccacctttcctcagctttcttaaaatgggatctacattggctcttcacacccaaatagcagactaatcgtttttctgcttagcaccgtctggttcattgtcttgaactctgccttacagcagcaagaaaattttcctcgacaagaacctcaatctttagttccattgagctccccctctggattttggacttaccagaagtaggaggttctgataccattcaagatggtctttccttcaaagcaggtctgaagaggagactaccaaagcagtgtttacaaacccagagtccacacaaccatattgcatagaacagcacttggctttcacaagcctcctacaggacctggtgtaattggagtgaaagggcagagaccctggaagtggaggtggctgtgtgctgcgatgggaagaaggcagaaggcccaggggctttggacatagagcagggtggaagctgcaagtactgggaaggaagagagtttcacagaaacaaagctttgtcacacagaaatgagttctgtctcactggtgacttcatccctcaggctccagctgagcagagattttaatcagcttccttaatgggtattgacactgctcaggaagcagtagaccctgtcagggacagctattgatcttttgtgttctgattagattggaaaatagatcaacttcattgtagtccaggaactgttggtcacagctactaggaatgaggtgatttctgagggctgagaaaaaacacagaatcttggccagcagccagcagctgcatggtgaaagatgcattcacttctcctttgagagttggggttgagggcaaacatagaacccaggtttggcttacaacccagtgtcccggaagccctccttcgggagaactgtaagtaagaggtgggtgtgtctaaagacaataccattaatgaatgttctggccttacctaaaaaggtttagcaatttggggataactcttggatctagcttatgtgcgttcacatgcacatttgctagcccagagcttttaaaatgaggtctggcatatacttgattacaaatgaaaactcagaaaccaattttatttattaaatcatatcttttgtttttccccctcccttctaatcccccaaaggacctatttgagctgttccccaattcatctgcttattttggaccatgaatctgccagagtgatattttctgttatttctcctccaaatttttccctgatgtttccaataaagatttacttgggtggccccttaaggtgacatcaggatgctcttatgtccttccagaataagcatacacttcactcctctccctttcatctccctctgcattcttaattccttgcttttctcacttggagccgagggtgctttagagaggtggttttccatgaatcagccaagattcctgtagaagttgggtataccaaccaccaccaccaccgccccctattccagtttcaaagctcctcggctatgctaatgtcccctcagagatgaggtttgacttttaggcccgtatgactcctccatagcctggccaaggagaccatgagtagccatgtctggtttactctttatcctgagactgtttatagcttaaaacagaagtgtgtcttcccagcacaaacctaatcaatcagtgtatcagtgcatctggtggcaacagctcagcccattcaaagagcaaggattcaggaaaggcacactgatggtggggagcctcttaagagcctctaatgttctcccaaaaccagagttgagagtcggagtgccagtcgtcggggcccactattcctgaataagggacatgcaagggccagaagtagcttgactctcgcctaaatatctgtgcctttgcctgtcctttctcccactctactgaaacccggaacagattcccgcttgccttctgatgaagagaggttaggtaaagagagtttggaggaaaaaagacaccaggaggcaggctgcggggtaggagagggttctgagaggaggcagcaatccagaatacctccttttctagccagcatcccttgaacttttgaaaggttgtgcctaccactggctggcacaccagggcaatgatttccctgcagaaggaaggaaagaatgtttcacccttgcatccttcttggagaagctacagcctgtgctcagttgagtggttcacactcagactttggctttatggttttccttcctccttgtctttgccctgaccttgatcaacaggggtgaaaagaaccaccctgaggtttccatgcctctcccattttagtggtagcattttgtgtctttactccacccttcaccctagttccaccaaggttcacacaccagatgtaactgtttttcagctgagttgtatggattaacttcagtccactgtaaatacacctgggatggggtggggttggggttgtttagggagaagcagccagacttgctttgtgaactgaatgtatttttatgcaattttgagtggcctttcaaccctaagatgaatggttttgttttactggttgttgttatatagttttgagtattctgtgtttgaaagtttgggaataataatattcacttctatatgatgcctgtaaacacaacagtatttataaatgagtaaataaaactgtgttttaactttg

SEQ ID NO: 129141 - DNA, 2949 bp, Artificial Sequence
  derived and/or modified sequence
atggccgagctggagcacctgggcggcaagagagccgagagcgccagaatgagaagagccgagcagctgagaagatggagaggcagcctgaccgagcaggagcccgccgagagaagaggcgccggcagacagcccctgaccagaagaggcagccccagagtgagattcgaggacggcgccgtgttcctggccgcctgcagcagcggcgacaccgacgaggtgagaaagctgctggccagaggcgccgacatcaacaccgtgaacgtggacggcctgaccgccctgcaccaggcctgcatcgacgagaacctggacatggtgaagttcctggtggagaacagagccaacgtgaaccagcaggacaacgagggctggacccccctgcacgccgccgccagctgcggctacctgaacatcgccgagtacttcatcaaccacggcgccagcgtgggcatcgtgaacagcgagggcgaggtgcccagcgacctggccgaggagcccgccatgaaggacctgctgctggagcaggtgaagaagcagggcgtggacctggagcagagcagaaaggaggaggagcagcagatgctgcaggacgccagacagtggctgaacagcggcaagatcgaggacgtgagacaggccagaagcggcgccaccgccctgcacgtggccgccgccaagggctacagcgaggtgctgagactgctgatccaggccggctacgagctgaacgtgcaggactacgacggctggacccccctgcacgccgccgcccactggggcgtgaaggaggcctgcagcatcctggccgaggccctgtgcgacatggacatcagaaacaagctgggccagacccccttcgacgtggccgacgagggcctggtggagcacctggagctgctgcagaagaagcagaacgtgctgagaagcgagaaggagaccagaaacaagctgatcgagagcgacctgaacagcaagatccagagcggcttcttcaagaacaaggagaagatgctgtacgaggaggagacccccaagagccaggagatggaggaggagaacaaggagagcagcagcagcagcagcgaggaggaggagggcgaggacgaggccagcgagagcgagaccgagaaggaggccgacaagaagcccgaggccttcgtgaaccacagcaacagcgagagcaagagcagcatcaccgagcagatccccgcccccgcccagaacaccttcagcgccagcagcgccagaagattcagcagcggcctgttcaacaagcccgaggagcccaaggacgagagccccagcagctggagactgggcctgagaaagaccggcagccacaacatgctgagcgaggtggccaacagcagagagcccatcagagacagaggcagcagcatctacagaagcagcagcagccccagaatcagcgccctgctggacaacaaggacaaggagagagagaacaagagctacatcagcagcctggcccccagaaagctgaacagcaccagcgacatcgaggagaaggagaacagagagagcgccgtgaacctggtgagaagcggcagctacaccagacagctgtggagagacgaggccaagggcaacgagatcccccagaccatcgcccccagcacctacgtgagcacctacctgaagagaaccccccacaagagccaggccgacaccaccgccgagaagaccgccgacaacgtgagcagcagcacccccctgtgcgtgatcaccaacagacccctgcccagcaccgccaacggcgtgaccgccacccccgtgctgagcatcaccggcaccgacagcagcgtggaggccagagagaagagaagaagctacctgacccccgtgagagacgaggaggccgagagcctgagaaaggccagaagcagacaggccagacagaccagaagaagcacccagggcgtgaccctgaccgacctgcaggaggccgagagaaccttcagcagaagcagagccgagagacaggcccaggagcagcccagagagaagcccaccgacaccgagggcctggagggcagccccgagaagcacgagcccagcgccgtgcccgccaccgaggccggcgagggccagcagccctggggcagaagcctggacgaggagcccatctgccacagactgagatgccccgcccagcccgacaagcccaccacccccgccagccccagcaccagcagacccagcctgtacaccagcagccacctgctgtggaccaacagattcagcgtgcccgacagcgagagcagcgagaccaccaccaacaccaccaccgccaaggagatggacaagaacgagaacgaggaggccgacctggacgagcagagcagcaagagactgagcatcagagagagaagaagacccaaggagagaagaagaggcaccggcatcaacttctggaccaaggacgaggacgagaccgacggcagcgaggaggtgaaggagacctgggccgagagactgaagagactggagagcggcggcagcaaccccaccaccagcgacagctacggcgacagagccagcgccagagccagaagagaggccagagaggccagactggccaccctgaccagcagagtggaggaggacagcaacagagactacaagaagctgtacgagagcgccctgaccgagaaccagaagctgaagaccaagctgcaggaggcccagctggagctggccgacatcaagagcaagctggagaaggtggcccagcagaagcaggagaagaccagcgacagaagcagcgtgctggagatggagaagagagagagaagagccctggagagaaagatgagcgagatggaggaggagatgaaggtgctgaccgagctgaagagcgacaaccagagactgaaggacgagaacggcgccctgatcagagtgatcagcaagctgagcaagtag

SEQ ID NO: 129142 - DNA, 2949 bp, Artificial Sequence
  derived and/or modified sequence
atggccgagctggagcacctgggcggcaagagagccgagagcgccagaatgagaagagccgagcagctgagaagatggagaggcagcctgaccgagcaggagcccgccgagagaagaggcgccggcagacagcccctgaccagaagaggcagccccagagtgagattcgaggacggcgccgtgttcctggccgcctgcagcagcggcgacaccgacgaggtgagaaagctgctggccagaggcgccgacatcaacaccgtgaacgtggacggcctgaccgccctgcaccaggcctgcatcgacgagaacctggacatggtgaagttcctggtggagaacagagccaacgtgaaccagcaggacaacgagggctggacccccctgcacgccgccgccagctgcggctacctgaacatcgccgagtacttcatcaaccacggcgccagcgtgggcatcgtgaacagcgagggcgaggtgcccagcgacctggccgaggagcccgccatgaaggacctgctgctggagcaggtgaagaagcagggcgtggacctggagcagagcagaaaggaggaggagcagcagatgctgcaggacgccagacagtggctgaacagcggcaagatcgaggacgtgagacaggccagaagcggcgccaccgccctgcacgtggccgccgccaagggctacagcgaggtgctgagactgctgatccaggccggctacgagctgaacgtgcaggactacgacggctggacccccctgcacgccgccgcccactggggcgtgaaggaggcctgcagcatcctggccgaggccctgtgcgacatggacatcagaaacaagctgggccagacccccttcgacgtggccgacgagggcctggtggagcacctggagctgctgcagaagaagcagaacgtgctgagaagcgagaaggagaccagaaacaagctgatcgagagcgacctgaacagcaagatccagagcggcttcttcaagaacaaggagaagatgctgtacgaggaggagacccccaagagccaggagatggaggaggagaacaaggagagcagcagcagcagcagcgaggaggaggagggcgaggacgaggccagcgagagcgagaccgagaaggaggccgacaagaagcccgaggccttcgtgaaccacagcaacagcgagagcaagagcagcatcaccgagcagatccccgcccccgcccagaacaccttcagcgccagcagcgccagaagattcagcagcggcctgttcaacaagcccgaggagcccaaggacgagagccccagcagctggagactgggcctgagaaagaccggcagccacaacatgctgagcgaggtggccaacagcagagagcccatcagagacagaggcagcagcatctacagaagcagcagcagccccagaatcagcgccctgctggacaacaaggacaaggagagagagaacaagagctacatcagcagcctggcccccagaaagctgaacagcaccagcgacatcgaggagaaggagaacagagagagcgccgtgaacctggtgagaagcggcagctacaccagacagctgtggagagacgaggccaagggcaacgagatcccccagaccatcgcccccagcacctacgtgagcacctacctgaagagaaccccccacaagagccaggccgacaccaccgccgagaagaccgccgacaacgtgagcagcagcacccccctgtgcgtgatcaccaacagacccctgcccagcaccgccaacggcgtgaccgccacccccgtgctgagcatcaccggcaccgacagcagcgtggaggccagagagaagagaagaagctacctgacccccgtgagagacgaggaggccgagagcctgagaaaggccagaagcagacaggccagacagaccagaagaagcacccagggcgtgaccctgaccgacctgcaggaggccgagagaaccttcagcagaagcagagccgagagacaggcccaggagcagcccagagagaagcccaccgacaccgagggcctggagggcagccccgagaagcacgagcccagcgccgtgcccgccaccgaggccggcgagggccagcagccctggggcagaagcctggacgaggagcccatctgccacagactgagatgccccgcccagcccgacaagcccaccacccccgccagccccagcaccagcagacccagcctgtacaccagcagccacctgctgtggaccaacagattcagcgtgcccgacagcgagagcagcgagaccaccaccaacaccaccaccgccaaggagatggacaagaacgagaacgaggaggccgacctggacgagcagagcagcaagagactgagcatcagagagagaagaagacccaaggagagaagaagaggcaccggcatcaacttctggaccaaggacgaggacgagaccgacggcagcgaggaggtgaaggagacctggcacgagagactgagcagactggagagcggcggcagcaaccccaccaccagcgacagctacggcgacagagccagcgccagagccagaagagaggccagagaggccagactggccaccctgaccagcagagtggaggaggacagcaacagagactacaagaagctgtacgagagcgccctgaccgagaaccagaagctgaagaccaagctgcaggaggcccagctggagctggccgacatcaagagcaagctggagaaggtggcccagcagaagcaggagaagaccagcgacagaagcagcgtgctggagatggagaagagagagagaagagccctggagagaaagatgagcgagatggaggaggagatgaaggtgctgaccgagctgaagagcgacaaccagagactgaaggacgagaacggcgccctgatcagagtgatcagcaagctgagcaagtag

SEQ ID NO: 129143 - protein, 177 aa, Artificial Sequence
  derived and/or modified sequence
MGPPSASPHRECIPWQGLLLTASLLNFWNPPTTAKLTIESMPLSVAEGKEVLLLVHNLPQHLFGYSWYKGERVDGNSLIVGYVIGTQQATPGAAYSGRETIYTNASLLIQNVTQNDIGFYTLQVIKSDLVNEEATGQFHVYPELPKPSISSNNSNPKEDKDAVAFTCEPEIHSTTCL

SEQ ID NO: 129144 - protein, 344 aa, Artificial Sequence
  derived and/or modified sequence
MGPPSAPPCRLHVPWKEVLLTASLLTFWNPPTTAKLTIESTPFNVAEGKEVLLLAHNLPQNRIGYSWYKGERVDGNSLIVGYVIGTQQATPGPAYSGRETIYPNASLLIQNVTQNDTGFYTLQVIKSDLVNEEATGQFHVYPELPKPSISSNNSNPVEDKDAVAFTCEPEVQNTTYLWWVNGQSLPVSPRLQLSNGNMTLTLLSVKRNDAGSYECEIQNPASANRSDPVTLNVLYGPDGPTISPSKANYRPGENLNLSCHAASNPPAQYSWFINGTFQQSTQELFIPNITVNNSGSYMCQAHNSATGLNRTTVTMITVSGSAPVLSAVATVGITIGVLARVALI

SEQ ID NO: 129145 - DNA, 1035 bp, Artificial Sequence
  derived and/or modified sequence
atgggaccacccagcgcgcccccatgcagactgcatgtgccatggaaagaggtgttgctgactgcttcactgttgaccttctggaacccccccactaccgcgaagctgactatcgaatccaccccatttaacgtggccgaaggaaaggaggtgttgctgcttgctcacaacttaccacagaaccgcattggctatagttggtacaaaggcgagagggtggatgggaactcacttatagtgggttacgttatcggtacacagcaggcaacccctggacctgcttacagtggaagagaaactatttatcctaacgccagcctcctaattcaaaacgtcactcagaacgacactggtttttacacattgcaggtcattaagtccgacctggtgaatgaagaggccacagggcaatttcacgtataccccgaattgcccaagcctagcattagcagcaacaactctaaccctgtggaagataaggatgccgtcgcttttacttgtgagcccgaagtccagaatactacctacctatggtgggtaaacgggcagagccttccagtctctccccgcctccagctgagcaacggtaatatgactctcaccctactgtctgtcaagagaaacgatgcaggtagttacgaatgtgaaattcagaaccctgcctcagcgaaccggtccgacccggtcacactcaacgtcttatacggccccgacggccccacaataagtcctagcaaagcaaattacagaccgggcgagaatttaaacttgagttgtcatgcagcctcaaaccctccggcccagtatagttggtttattaatgggacctttcagcagtcgacgcaggagctgtttataccgaatatcactgtcaataacagcggctcttacatgtgccaggctcataatagtgcaaccggtttaaacaggacaactgtcaccatgattactgtcagtggcagcgcacctgtgctctctgccgtggccacagttggcattaccatcggggtgctagcacgcgtggctctcatatag

SEQ ID NO: 129146 - DNA, 1035 bp, Artificial Sequence
  derived and/or modified sequence
atgggccccccatctgccccaccctgccgcctgcacgtgccctggaaggaggtgctgctgacagccagcctgctgaccttctggaacccccccaccacagccaagctgaccatcgagagcacccccttcaacgtggccgagggcaaggaggtgctgctgctggcccacaacctgccccagaacagaattggctacagctggtacaagggggagcgggtggatggcaacagcctgattgtgggctacgtgattggcacccagcaggccaccccaggccctgcctacagcggccgggagaccatctacccaaatgccagcctgctgatccagaatgtgacccagaatgacaccggcttctacaccctgcaggtgatcaagagtgacctggtgaatgaggaggccaccggccagttccacgtgtacccagagctgcccaagcccagcatcagcagcaacaacagcaaccctgtggaggacaaggatgctgtggccttcacctgtgagcctgaggtgcagaacaccacctacctgtggtgggtgaatggccagagcctgcctgtgagcccccggctgcagctgagcaatggaaacatgaccctgaccctgctgtctgtgaagagaaatgatgctggcagctatgaatgtgagatccagaacccagccagcgccaacagaagtgaccctgtgaccctgaatgtgctgtatggcccagatggccccaccatcagccccagcaaggccaactacagacctggagagaacctgaacctgagctgccacgccgccagcaaccccccagcccagtacagctggttcatcaatggcaccttccagcagagcacccaggagctgttcatccccaacatcaccgtgaacaacagcggcagctacatgtgccaggcccacaacagcgccaccggcctgaacagaaccaccgtgaccatgatcaccgtgtctggcagcgcccctgtgctgtctgctgtggccaccgtgggcatcaccatcggcgtgctggcccgggtggccctgatctag

SEQ ID NO: 129147 - DNA, 1035 bp, Artificial Sequence
  derived and/or modified sequence
atgggcccccccagcgcccccccctgccggctgcacgtgccctggaaagaagtcctgctaactgccagcttgctcactttttggaaccccccaaccacagcgaagctgacaattgagtcaactcctttcaacgtggccgaaggcaaggaagtcctgttgctggcacacaacctcccccagaacaggatcggatactcctggtacaagggggagcgggtggacgggaattcactaatcgtgggatatgtgatcggaacccagcaagccactcctgggccggcctatagcggtagagagaccatctaccccaatgcctctttactgatccagaatgtgacgcagaacgacaccggattctatacgttgcaggtcattaaatctgacctggttaatgaggaagccacaggacagttccacgtgtacccagagctgcctaagccatccatctccagcaacaactcaaaccccgtcgaagataaggatgctgtggcatttacctgcgagcctgaagttcagaacacaacctatttgtggtgggttaatggacagagtttgcctgtctcccccaggctccagctctccaatgggaatatgactctaaccttgttgtctgttaagagaaatgatgctgggtcctacgagtgcgaaattcagaaccctgccagcgctaatagatccgatcccgtgacgctgaacgtgctttacggacccgacggaccaaccatttctccttccaaagcaaactacagaccgggcgaaaacctgaacctttcatgtcatgctgcaagtaacccccccgcccagtacagctggtttatcaacggtacatttcagcagagcacccaggagctctttattcccaacattacggtcaacaatagcggatcgtatatgtgccaagcccataattctgctacagggctcaacagaacgaccgtgactatgattacggtgtcaggttctgcccctgtcttgtccgcagtggcaaccgtgggaatcacgattggcgtactggcccgggtcgctctaatctag

SEQ ID NO: 129148 - DNA, 1035 bp, Artificial Sequence
  derived and/or modified sequence
atgggaccacctagtgcacctccgtgcaggctgcacgtaccgtggaaggaggtcttgctgaccgcttccctgctgaccttctggaatccgccaacaaccgccaaactgactatcgagtccacacctttcaatgtggccgaaggaaaggaggtgctgctgctcgcacacaaccttcctcaaaatagaatcggctattcctggtacaaaggcgaaagagtcgacggcaacagtctgatcgtgggctacgtgatcggcactcagcaagctacaccaggacctgcatattcaggtcgtgaaaccatctaccccaacgcctctcttctgatacagaacgtgacccagaacgatacaggcttctataccctgcaggttataaagtctgacctcgtgaacgaggaggccaccggtcagtttcacgtgtaccctgaactgccgaagccttctatctccagtaataatagtaatccagtggaggacaaggacgccgtggccttcacttgtgaaccagaggtacagaatacgacttatttgtggtgggtaaatggccaaagccttcccgtgtcccctagactgcagctgtcgaacggaaacatgaccctgacactactgagtgtcaagcggaatgacgccggttcctacgagtgcgaaatccagaatcccgcatccgcaaataggtccgaccctgtcactctgaacgtgctgtacggccctgacgggcctacaataagcccaagcaaagcaaactacagaccgggagagaacttaaatttgagctgccatgccgcaagcaatccccctgctcagtactcttggttcatcaatgggacatttcagcaaagcacccaggagcttttcatccccaatatcactgtgaataactccggatcatatatgtgccaagctcacaactccgccacaggtctgaatcgcacaacggtcaccatgatcactgtgagcggaagcgcgcctgtgctcagcgcagtggccacagttgggattacaatcggggtcctcgctcgggtggccttgatatag

SEQ ID NO: 129149 - DNA, 2700 bp, Artificial Sequence
  derived and/or modified sequence
aaaagagacagaaatgagaggggaggggatagaggattcctgaacagagaccgcacccatgacccacgtgaccctgggaaatgcttctatccctgagaggaggctcagcacagaaggaggaaggacagcagggccaacagtcacagcagccctgaccagagcattcctggagctcaagctcctctacaaagaggtggacagagaagacagcagagaccatgggacccccctcagcccctccctgcagattgcatgtcccctggaaggaggtcctgctcacagcctcacttctaaccttctggaacccacccaccactgccaagctcactattgaatccacgccgttcaatgtcgcagaggggaaggaggttcttctactcgcccacaacctgccccagaatcgtattggttacagctggtacaaaggcgaaagagtggatggcaacagtctaattgtaggatatgtaataggaactcaacaagctaccccagggcccgcatacagtggtcgagagacaatataccccaatgcatccctgctgatccagaacgtcacccagaatgacacaggattctataccctacaagtcataaagtcagatcttgtgaatgaagaagcaaccggacagttccatgtatacccggagctgcccaagccctccatctccagcaacaactccaaccccgtggaggacaaggatgctgtggccttcacctgtgaacctgaggttcagaacacaacctacctgtggtgggtaaatggtcagagcctcccggtcagtcccaggctgcagctgtccaatggcaacatgaccctcactctactcagcgtcaaaaggaacgatgcaggatcctatgaatgtgaaatacagaacccagcgagtgccaaccgcagtgacccagtcaccctgaatgtcctctatggcccagatggccccaccatttccccctcaaaggccaattaccgtccaggggaaaatctgaacctctcctgccacgcagcctctaacccacctgcacagtactcttggtttatcaatgggacgttccagcaatccacacaagagctctttatccccaacatcactgtgaataatagcggatcctatatgtgccaagcccataactcagccactggcctcaataggaccacagtcacgatgatcacagtctctggaagtgctcctgtcctctcagctgtggccaccgtcggcatcacgattggagtgctggccagggtggctctgatatagcagccctggtgtattttcgatatttcaggaagactggcagattggaccagaccctgaattcttctagctcctccaatcccattttatcccatggaaccactaaaaacaaggtctgctctgctcctgaagccctatatgctggagatggacaactcaatgaaaatttaaagggaaaaccctcaggcctgaggtgtgtgccactcagagacttcacctaactagagacaggcaaactgcaaaccatggtgagaaattgacgacttcacactatggacagcttttcccaagatgtcaaaacaagactcctcatcatgataaggctcttacccccttttaatttgtccttgcttatgcctgcctctttcgcttggcaggatgatgctgtcattagtatttcacaagaagtagcttcagagggtaacttaacagagtatcagatctatcttgtcaatcccaacgttttacataaaataagagatcctttagtgcacccagtgactgacattagcagcatctttaacacagccgtgtgttcaaatgtacagtggtccttttcagagttggacttctagactcacctgttctcactccctgttttaattcaacccagccatgcaatgccaaataatagaattgctccctaccagctgaacagggaggagtctgtgcagtttctgacacttgttgttgaacatggctaaatacaatgggtatcgctgagactaagttgtagaaattaacaaatgtgctgcttggttaaaatggctacactcatctgactcattctttattctattttagttggtttgtatcttgcctaaggtgcgtagtccaactcttggtattaccctcctaatagtcatactagtagtcatactccctggtgtagtgtattctctaaaagctttaaatgtctgcatgcagccagccatcaaatagtgaatggtctctctttggctggaattacaaaactcagagaaatgtgtcatcaggagaacatcataacccatgaaggataaaagccccaaatggtggtaactgataatagcactaatgctttaagatttggtcacactctcacctaggtgagcgcattgagccagtggtgctaaatgctacatactccaactgaaatgttaaggaagaagatagatccaattaaaaaaaattaaaaccaatttaaaaaaaaaaagaacacaggagattccagtctacttgagttagcataatacagaagtcccctctactttaacttttacaaaaaagtaacctgaactaatctgatgttaaccaatgtatttatttctgtggttctgtttccttgttccaatttgacaaaacccactgttcttgtattgtattgcccagggggagctatcactgtacttgtagagtggtgctgctttaattcataaatcacaaataaaagccaattagctctataact

SEQ ID NO: 129150 - DNA, 1035 bp, Artificial Sequence
  derived and/or modified sequence
atgggcccccccagcgcccccccctgcagactgcacgtgccctggaaggaggtgctgctgaccgccagcctgctgaccttctggaacccccccaccaccgccaagctgaccatcgagagcacccccttcaacgtggccgagggcaaggaggtgctgctgctggcccacaacctgccccagaacagaatcggctacagctggtacaagggcgagagagtggacggcaacagcctgatcgtgggctacgtgatcggcacccagcaggccacccccggccccgcctacagcggcagagagaccatctaccccaacgccagcctgctgatccagaacgtgacccagaacgacaccggcttctacaccctgcaggtgatcaagagcgacctggtgaacgaggaggccaccggccagttccacgtgtaccccgagctgcccaagcccagcatcagcagcaacaacagcaaccccgtggaggacaaggacgccgtggccttcacctgcgagcccgaggtgcagaacaccacctacctgtggtgggtgaacggccagagcctgcccgtgagccccagactgcagctgagcaacggcaacatgaccctgaccctgctgagcgtgaagagaaacgacgccggcagctacgagtgcgagatccagaaccccgccagcgccaacagaagcgaccccgtgaccctgaacgtgctgtacggccccgacggccccaccatcagccccagcaaggccaactacagacccggcgagaacctgaacctgagctgccacgccgccagcaacccccccgcccagtacagctggttcatcaacggcaccttccagcagagcacccaggagctgttcatccccaacatcaccgtgaacaacagcggcagctacatgtgccaggcccacaacagcgccaccggcctgaacagaaccaccgtgaccatgatcaccgtgagcggcagcgcccccgtgctgagcgccgtggccaccgtgggcatcaccatcggcgtgctggccagagtggccctgatctag

SEQ ID NO: 129151 - protein, 320 aa, Artificial Sequence
  derived and/or modified sequence
MEEVPHDCPGADSAQAGRGASCQGCPNQRLCASGAGATPDTAIEEIKEKMKTVKHKILVLSGKGGVGKSTFSAHLAHGLAEDENTQIALLDIDICGPSIPKIMGLEGEQVHQSGSGWSPVYVEDNLGVMSVGFLLSSPDDAVIWRGPKKNGMIKQFLRDVDWGEVDYLIVDTPPGTSDEHLSVVRYLATAHIDGAVIITTPQEVSLQDVRKEINFCRKVKLPIIGVVENMSGFICPKCKKESQIFPPTTGGAELMCQDLEVPLLGRVPLDPLIGKNCDKGQSFFIDAPDSPATLAYRSIIQRIQEFCNLHQSKEENLISS

SEQ ID NO: 129152 - DNA, 963 bp, Artificial Sequence
  derived and/or modified sequence
atggaggaagtgccacatgattgccccggggctgacagcgcccaggctggcaggggcgcctcctgtcaaggctgcccaaaccagcggctgtgcgcctcaggagctggtgctacccccgacacagcaatcgaagagataaaagaaaagatgaaaaccgttaagcataaaatcttagtcctgtctggcaaaggcggcgtgggtaagtctacatttagcgcccacttagcccatggcttagcagaagatgaaaacactcagattgcacttctggacatagacatctgcgggccatctatccccaaaataatgggccttgagggggagcaggtccatcagagcggttcgggctggtctccggtttacgtagaagataatctgggagtgatgtccgtgggctttctgctgtcttcccccgatgatgccgttatttggcgcgggcccaagaagaacggaatgattaagcaattccttagggatgtcgactggggggaggtggattacctgatcgttgatactccccccggtacatcggatgaacatttgtccgtggtgaggtacctcgctacagcccatatcgatggtgccgtaatcataaccacgccccaggaggtgagcctgcaggatgtcaggaaagaaattaacttctgcagaaaggtgaagcttccaataataggcgtggtagagaacatgtctggattcatctgccctaaatgcaagaaggagtcccagattttccccccgacaaccggaggggctgaactgatgtgtcaggatctggaggtgcccctcctcgggcgagtccccctcgatccattgataggcaagaattgcgataaaggtcagagcttcttcatcgacgcacctgactcgcctgctactctggcgtatagatccatcattcaacgcatacaagagttctgcaacctgcatcagagcaaggaggaaaatttaatctcaagctag

SEQ ID NO: 129153 - DNA, 963 bp, Artificial Sequence
  derived and/or modified sequence
atggaggaggtgccccatgactgccctggagctgacagcgcccaggccggccgcggggccagctgccagggctgccccaaccagaggctgtgtgccagcggggccggggccaccccagacacagccatcgaggagatcaaggagaagatgaagacagtgaagcacaagatcctggtgctgtctggaaaaggaggagtgggcaagagcaccttcagcgcccacctggcccacggcctggctgaagatgagaacacccagatcgccctgctggacatcgacatctgtggccccagcatccccaagatcatgggcctggagggggagcaggtgcaccagagcggcagcggctggagccctgtgtatgtggaggacaacctgggcgtgatgtctgtgggcttcctgctgagcagcccagatgatgctgtgatctggaggggccccaagaagaatggcatgatcaagcagttcctgagagatgtggactggggcgaggtggactacctgattgtggacaccccacctggcaccagtgatgagcacctgtctgtggtgcgctacctggccacagcccacattgatggagctgtgatcatcaccaccccccaggaggtgtccctgcaggatgtgaggaaggagatcaacttctgcaggaaggtgaagctgcccatcatcggcgtggtggagaacatgagcggcttcatctgccccaagtgcaagaaggagagccagatcttcccccccaccactggaggagctgagctgatgtgccaggacctggaggtgcccctgctgggccgggtgcccctggaccccctgattggcaagaactgtgacaagggccagagcttcttcattgatgccccagacagccctgccaccctggcctaccgcagcatcatccagaggatccaggagttctgcaacctgcaccagagcaaggaggagaacctgatcagcagctag

SEQ ID NO: 129154 - DNA, 963 bp, Artificial Sequence
  derived and/or modified sequence
atggaggaggtgccccacgactgccccggcgccgacagcgcccaggctgggaggggcgcgagttgccaagggtgtcctaatcagcggctctgtgcttccggggctggggctacacccgataccgctatcgaggagatcaaggaaaaaatgaagacagttaagcacaaaatattagtgcttagcggcaagggaggagtgggcaaatcaaccttttcagcccatttggcccacggcctggccgaggatgagaacacccaaatcgcactcctggacatcgatatatgcggcccgtctatccctaagataatgggtctcgagggggagcaggtgcatcagtctgggtcaggctggagtccagtgtatgtggaggacaacctgggtgtgatgtctgtggggtttctcctgtcatccccggacgacgctgtgatatggcggggtccaaaaaaaaacgggatgatcaagcagtttctgcgagacgtggattggggcgaggtagattatctcatcgtggataccccacctggcacatccgacgaacatctctcagtggtccgttacctagccaccgcccatatcgatggcgctgtcataattaccacccctcaagaggtgtcattgcaagacgtccggaaagagataaatttctgtagaaaggtgaagctgcccatcataggggttgtagagaatatgagtgggtttatttgcccaaaatgcaagaaggaatcccaaatttttcctcctactaccggaggcgccgagcttatgtgtcaagacctcgaagtcccattgttgggtcgtgtgccactggatcccttgattggtaaaaattgcgacaagggccagtctttttttatcgatgcacctgatagccctgccaccctcgcttatcggtctatcatccagcggattcaggaattttgcaacctccaccagagcaaggaggagaacctgatctcaagctag

SEQ ID NO: 129155 - DNA, 1252 bp, Artificial Sequence
  derived and/or modified sequence
gacagcgggttccggtgaccacgaaggcggcaaaggcgacggaatggaggaggtgcctcacgactgtccaggggccgacagcgcccaggcgggcagaggggcttcatgtcagggatgccccaaccagcggctgtgcgcttctggagcgggggccactccggacacggctatagaggaaatcaaagagaaaatgaagactgtaaaacacaaaatcttggtattgtctgggaaaggcggtgttgggaaaagcacattcagcgcccaccttgcccatggcctagcagaggatgaaaacacacagattgctcttctagacatcgatatatgtgggccatcgattcccaagataatgggattggaaggagagcaggttcaccagagtggctcaggctggtctccagtgtacgtggaagacaacctgggggtgatgtcagtgggcttcctgctcagcagtcctgatgatgctgttatctggaggggacccaagaaaaacggcatgatcaagcagttcctccgagatgtggactggggagaggtcgactacctcattgtggacaccccacctgggacgtcggatgaacacctctcggtcgtccggtacctggccacagcacacatcgatggagcagtgatcatcaccactccccaggaggtgtcactccaggatgtccggaaagaaatcaacttctgccgcaaggtgaagctgcccatcatcggggtggtggagaacatgagtggcttcatctgtcctaagtgcaagaaagaatctcagatattccctcccacaaccgggggcgcggagctcatgtgccaggacttggaggtccctctcctcggcagagtgcccctggatccgctcataggtaagaattgtgacaaaggccagtcttttttcattgacgccccagattccccagccacgttagcctacagaagtataattcagagaatccaagagttttgtaatctccatcagtcaaaagaagagaacctcatcagttcctgaaacgagagaatgttcaggaccaagcagttaccgagcgaggcactcactgggcagcacatccagccagacccgaccagctccgggatggggtgggtcacagcaaaaggaccagatgctggtgtggtccgaagccactttctcagagacactttaatcattgagtatttgtacacttttctttagaacatatataaagggcattctctacaaatgtgccgttttaagaataaaaccccctcaaatctc

SEQ ID NO: 129156 - DNA, 963 bp, Artificial Sequence
  derived and/or modified sequence
atggaggaggtacctcatgattgccctggtgccgacagtgcccaagctggtagaggtgcttcatgtcagggctgtcccaatcagcgtctttgcgcatctggagctggcgctacccccgacactgctatagaggagataaaggagaagatgaagacagtaaagcataaaattctagtcctgagcggcaagggtggcgtagggaaaagtaccttttcggcacatctggctcatggcctggcagaggacgaaaacacccaaatcgccctgttagatatcgatatttgtggtccatcaattcctaagattatgggactggaaggcgagcaggtccaccagagcggctcgggttggtccccagtctatgtggaagataacctgggagtgatgtctgttggattcctactgagttcccccgatgacgcagtaatctggaggggtccaaaaaaaaacggcatgataaagcagtttcttagagacgtggactggggagaggtggactacttaatcgtagacacaccaccaggtacatctgacgagcacctgtcagtagtgagatacctagctaccgctcatattgatggagccgtcatcatcacaacgcctcaggaagtcagcttgcaggatgtgaggaaggaaataaatttctgtcggaaagtcaaactccccataattggcgtcgttgagaatatgagcggcttcatttgccccaagtgcaagaaggagtcgcagattttccctcccacgactggcggtgctgaactgatgtgccaggatcttgaagtgcctctgctggggagagtccctctggacccactgattgggaagaactgcgacaaggggcagtctttctttatcgacgccccagatagtcccgctacactggcatacagaagcatcattcagcgaatccaagaattctgcaacctgcatcagtcaaaggaagagaaccttatctccagttag

SEQ ID NO: 129157 - DNA, 963 bp, Artificial Sequence
  derived and/or modified sequence
atggaggaggtgccccacgactgccccggcgccgacagcgcccaggccggcagaggcgccagctgccagggctgccccaaccagagactgtgcgccagcggcgccggcgccacccccgacaccgccatcgaggagatcaaggagaagatgaagaccgtgaagcacaagatcctggtgctgagcggcaagggcggcgtgggcaagagcaccttcagcgcccacctggcccacggcctggccgaggacgagaacacccagatcgccctgctggacatcgacatctgcggccccagcatccccaagatcatgggcctggagggcgagcaggtgcaccagagcggcagcggctggagccccgtgtacgtggaggacaacctgggcgtgatgagcgtgggcttcctgctgagcagccccgacgacgccgtgatctggagaggccccaagaagaacggcatgatcaagcagttcctgagagacgtggactggggcgaggtggactacctgatcgtggacaccccccccggcaccagcgacgagcacctgagcgtggtgagatacctggccaccgcccacatcgacggcgccgtgatcatcaccaccccccaggaggtgagcctgcaggacgtgagaaaggagatcaacttctgcagaaaggtgaagctgcccatcatcggcgtggtggagaacatgagcggcttcatctgccccaagtgcaagaaggagagccagatcttcccccccaccaccggcggcgccgagctgatgtgccaggacctggaggtgcccctgctgggcagagtgcccctggaccccctgatcggcaagaactgcgacaagggccagagcttcttcatcgacgcccccgacagccccgccaccctggcctacagaagcatcatccagagaatccaggagttctgcaacctgcaccagagcaaggaggagaacctgatcagcagctag

SEQ ID NO: 129158 - protein, 754 aa, Artificial Sequence
  derived and/or modified sequence
MWKLLPAAGPAGGEPYRLLTGVEYVVGRKNCAILIENDQSISRNHAVLTANFSVTNLSQTDEIPVLTLKDNSKYGTFVNEEKMQNGFSRTLKSGDGITFGVFGSKFRIEYEPLVACSSCLDVSGKTALNQAILQLGGFTVNNWTEECTHLVMVSVKVTIKTICALICGRPIVKPEYFTEFLKAVESKKQPPQIESFYPPLDEPSIGSKNVDLSGRQERKQIFKGKTFIFLNAKQHKKLSSAVVFGGGEARLITEENEEEHNFFLAPGTCVVDTGITNSQTLIPDCQKKWIQSIMDMLQRQGLRPIPEAEIGLAVIFMTTKNYCDPQGHPSTGLKTTTPGPSLSQGVSVDEKLMPSAPVNTTTYVADTESEQADTWDLSERPKEIKVSKMEQKFRMLSQDAPTVKESCKTSSNNNSMVSNTLAKMRIPNYQLSPTKLPSINKSKDRASQQQQTNSIRNYFQPSTKKRERDEENQEMSSCKSARIETSCSLLEQTQPATPSLWKNKEQHLSENEPVDTNSDNNLFTDTDLKSIVKNSASKSHAAEKLRSNKKREMDDVAIEDEVLEQLFKDTKPELEIDVKVQKQEEDVNVRKRPRMDIETNDTFSDEAVPESSKISQENEIGKKRELKEDSLWSAKEISNNDKLQDDSEMLPKKLLLTEFRSLVIKNSTSRNPSGINDDYGQLKNFKKFKKVTYPGAGKLPHIIGGSDLIAHHARKNTELEEWLRQEMEVQNQHAKEESLADDLFRYNPYLKRRR

SEQ ID NO: 129159 - protein, 478 aa, Artificial Sequence
  derived and/or modified sequence
MWKLLPAAGPAGGEPYRLLTGVEYVVGRKNCAILIENDQSISRNHAVLTANFSVTNLSQTDEIPVLTLKDNSKYGTFVNEEKMQNGFSRTLKSGDGITFGVFGSKFRIEYEPLVACSSCLDVSGKTALNQAILQLGGFTVNNWTEECTHLVMVSVKVTIKTICALICGRPIVKPEYFTEFLKAVESKKQPPQIESFYPPLDEPSIGSKNVDLSGRQERKQIFKGKTFIFLNAKQHKKLSSAVVFGGGEARLITEENEEEHNFFLAPGTCVVDTGITNSQTLIPDCQKKWIQSIMDMLQRQGLRPIPEAEIGLAVIFMTTKNYCDPQGHPSTGLKTTTPGPSLSQGVSVDEKLMPSAPVNTTTYVADTESEQADTWDLSERPKEIKVSKMEQKFRMLSQDAPTVKESCKTSSNNNSMVSNTLAKMRIPNYQLSPTKLPSINKSKDRASQQQQTNSIRNYFQPSTKKRERLHLKKKKKKK

SEQ ID NO: 129160 - DNA, 2265 bp, Artificial Sequence
  derived and/or modified sequence
atgtggaagctgctgcccgccgccggccccgccggcggcgagccctacagactgctgaccggcgtggagtacgtggtgggcagaaagaactgcgccatcctgatcgagaacgaccagagcatcagcagaaaccacgccgtgctgaccgccaacttcagcgtgaccaacctgagccagaccgacgagatccccgtgctgaccctgaaggacaacagcaagtacggcaccttcgtgaacgaggagaagatgcagaacggcttcagcagaaccctgaagagcggcgacggcatcaccttcggcgtgttcggcagcaagttcagaatcgagtacgagcccctggtggcctgcagcagctgcctggacgtgagcggcaagaccgccctgaaccaggccatcctgcagctgggcggcttcaccgtgaacaactggaccgaggagtgcacccacctggtgatggtgagcgtgaaggtgaccatcaagaccatctgcgccctgatctgcggcagacccatcgtgaagcccgagtacttcaccgagttcctgaaggccgtggagagcaagaagcagcccccccagatcgagagcttctacccccccctggacgagcccagcatcggcagcaagaacgtggacctgagcggcagacaggagagaaagcagatcttcaagggcaagaccttcatcttcctgaacgccaagcagcacaagaagctgagcagcgccgtggtgttcggcggcggcgaggccagactgatcaccgaggagaacgaggaggagcacaacttcttcctggcccccggcacctgcgtggtggacaccggcatcaccaacagccagaccctgatccccgactgccagaagaagtggatccagagcatcatggacatgctgcagagacagggcctgagacccatccccgaggccgagatcggcctggccgtgatcttcatgaccaccaagaactactgcgacccccagggccaccccagcaccggcctgaagaccaccacccccggccccagcctgagccagggcgtgagcgtggacgagaagctgatgcccagcgcccccgtgaacaccaccacctacgtggccgacaccgagagcgagcaggccgacacctgggacctgagcgagagacccaaggagatcaaggtgagcaagatggagcagaagttcagaatgctgagccaggacgcccccaccgtgaaggagagctgcaagaccagcagcaacaacaacagcatggtgagcaacaccctggccaagatgagaatccccaactaccagctgagccccaccaagctgcccagcatcaacaagagcaaggacagagccagccagcagcagcagaccaacagcatcagaaactacttccagcccagcaccaagaagagagagagagacgaggagaaccaggagatgagcagctgcaagagcgccagaatcgagaccagctgcagcctgctggagcagacccagcccgccacccccagcctgtggaagaacaaggagcagcacctgagcgagaacgagcccgtggacaccaacagcgacaacaacctgttcaccgacaccgacctgaagagcatcgtgaagaacagcgccagcaagagccacgccgccgagaagctgagaagcaacaagaagagagagatggacgacgtggccatcgaggacgaggtgctggagcagctgttcaaggacaccaagcccgagctggagatcgacgtgaaggtgcagaagcaggaggaggacgtgaacgtgagaaagagacccagaatggacatcgagaccaacgacaccttcagcgacgaggccgtgcccgagagcagcaagatcagccaggagaacgagatcggcaagaagagagagctgaaggaggacagcctgtggagcgccaaggagatcagcaacaacgacaagctgcaggacgacagcgagatgctgcccaagaagctgctgctgaccgagttcagaagcctggtgatcaagaacagcaccagcagaaaccccagcggcatcaacgacgactacggccagctgaagaacttcaagaagttcaagaaggtgacctaccccggcgccggcaagctgccccacatcatcggcggcagcgacctgatcgcccaccacgccagaaagaacaccgagctggaggagtggctgagacaggagatggaggtgcagaaccagcacgccaaggaggagagcctggccgacgacctgttcagatacaacccctacctgaagagaagaagatag

SEQ ID NO: 129161 - DNA, 1437 bp, Artificial Sequence
  derived and/or modified sequence
atgtggaagctgctgcccgccgccggccccgccggcggcgagccctacagactgctgaccggcgtggagtacgtggtgggcagaaagaactgcgccatcctgatcgagaacgaccagagcatcagcagaaaccacgccgtgctgaccgccaacttcagcgtgaccaacctgagccagaccgacgagatccccgtgctgaccctgaaggacaacagcaagtacggcaccttcgtgaacgaggagaagatgcagaacggcttcagcagaaccctgaagagcggcgacggcatcaccttcggcgtgttcggcagcaagttcagaatcgagtacgagcccctggtggcctgcagcagctgcctggacgtgagcggcaagaccgccctgaaccaggccatcctgcagctgggcggcttcaccgtgaacaactggaccgaggagtgcacccacctggtgatggtgagcgtgaaggtgaccatcaagaccatctgcgccctgatctgcggcagacccatcgtgaagcccgagtacttcaccgagttcctgaaggccgtggagagcaagaagcagcccccccagatcgagagcttctacccccccctggacgagcccagcatcggcagcaagaacgtggacctgagcggcagacaggagagaaagcagatcttcaagggcaagaccttcatcttcctgaacgccaagcagcacaagaagctgagcagcgccgtggtgttcggcggcggcgaggccagactgatcaccgaggagaacgaggaggagcacaacttcttcctggcccccggcacctgcgtggtggacaccggcatcaccaacagccagaccctgatccccgactgccagaagaagtggatccagagcatcatggacatgctgcagagacagggcctgagacccatccccgaggccgagatcggcctggccgtgatcttcatgaccaccaagaactactgcgacccccagggccaccccagcaccggcctgaagaccaccacccccggccccagcctgagccagggcgtgagcgtggacgagaagctgatgcccagcgcccccgtgaacaccaccacctacgtggccgacaccgagagcgagcaggccgacacctgggacctgagcgagagacccaaggagatcaaggtgagcaagatggagcagaagttcagaatgctgagccaggacgcccccaccgtgaaggagagctgcaagaccagcagcaacaacaacagcatggtgagcaacaccctggccaagatgagaatccccaactaccagctgagccccaccaagctgcccagcatcaacaagagcaaggacagagccagccagcagcagcagaccaacagcatcagaaactacttccagcccagcaccaagaagagagagagactgcacctgaagaagaagaagaagaagaagtag

SEQ ID NO: 129162 - DNA, 2265 bp, Artificial Sequence
  derived and/or modified sequence
atgtggaaacttctgcccgccgccggaccggccggcggcgagccttaccgactgctgacaggggtcgagtatgtcgtgggtcgaaaaaattgtgctatactgattgagaatgatcaatcgatatctagaaatcacgctgtcctcacagctaacttctcagtcactaacctgtcgcagacagacgagatcccagtgcttacccttaaggataatagtaagtacggcacattcgtgaatgaggagaagatgcagaatggcttttcgcgcacgctgaagagcggcgacggcattacattcggagtctttgggagtaaattcagaatcgagtacgaacctctggtggcttgttcatcctgcttggatgtgtcagggaagacagccctcaaccaggccattcttcaactcggtggctttaccgttaataattggactgaagagtgtacgcatctggtgatggtgtcggttaaggtaacgattaaaactatttgcgccttgatatgcggcaggcctatcgttaagccagaatatttcaccgagtttctcaaggcggttgagagtaagaaacaaccgcctcagatcgaatcattctacccccctcttgacgagccttcgattggctctaagaacgtcgacctgtcaggaaggcaggaacgcaagcagatctttaagggcaagacttttatatttctgaacgcgaaacagcataaaaagctgtctagtgctgtcgtctttggtggcggggaggcccgattaataactgaggagaacgaagaggagcacaacttctttctggcacccggcacctgcgtggtggacactggaataactaatagccaaactttaatcccagactgtcagaagaaatggatccagtccatcatggatatgctgcagagacagggactgcgccctatccctgaggccgaaatcgggttggctgtgattttcatgactactaagaactattgtgacccccagggccaccctagcacagggctgaagaccacaaccccaggacctagcctgtctcagggggtctcagttgacgagaaactgatgccctccgctcctgtgaatactactacttatgtcgccgacaccgagtctgagcaagctgatacttgggatctgagcgagcgtcctaaggagattaaggtgtcaaagatggaacagaagttccggatgctgagccaggatgctccaacggttaaggaatcctgcaagaccagctccaataataacagtatggttagtaatactttagccaaaatgaggataccaaattatcagctctctccaaccaagttaccatcaatcaacaagagcaaggacagagccagccagcaacagcagaccaattcgattcggaactactttcagccatccacaaagaaaagagaaagagatgaagagaatcaggaaatgtcaagctgtaagtcagctcgcattgaaacctcatgctccctgttagaacagacccagccagcgacaccttccctgtggaagaacaaggaacagcatctaagcgaaaatgagcctgtcgacactaactcagataataacctttttactgataccgacctaaaatctattgtcaaaaattcagcttctaagagtcatgctgccgaaaagctcagaagcaataagaagcgggagatggatgatgtggctatcgaagatgaggtgctggaacaacttttcaaggacacaaaacctgagctcgaaatcgacgtgaaggtgcagaaacaagaggaagacgtcaatgtaagaaaacgccctcggatggatatagaaactaatgacacgttctcggatgaggccgttccagaaagttccaagatttcccaggagaatgaaatagggaaaaagcgagagttgaaagaggacagcctatggagcgccaaagaaatctccaacaatgacaaactgcaggacgactcggagatgctaccgaaaaagctcctgttgactgaatttaggtctctggtaataaagaatagcactagtaggaatccctctggtataaatgacgactacggacagctgaagaattttaaaaagtttaagaaagtgacatacccgggagccggcaaactgccccatatcattggagggagcgacttaatcgcccaccatgctagaaaaaatacagagctcgaagagtggctccggcaggagatggaggtgcagaaccaacacgcgaaagaggaatccctggccgacgacctttttagatacaacccttacttgaagagaagaagatag

SEQ ID NO: 129163 - DNA, 1437 bp, Artificial Sequence
  derived and/or modified sequence
atgtggaaattgctgcctgccgccgggccggcagggggagagccctatcgactcctgacaggggtcgagtatgtcgtgggccgaaagaactgtgctatccttattgaaaatgatcagtccatctcacggaaccacgccgttctgaccgccaatttctcggtgactaacctgagtcaaacggacgagatcccagtcctgactctgaaggacaactcaaagtatgggacttttgtgaatgaggaaaagatgcagaatggtttctcacgcaccctcaagagcggggacggcattacattcggcgtgttcggctctaaattccgaatagaatacgaacccctggtagcctgcagttcctgtttggatgtgtctggcaagacggccttaaatcaggcaatactccaactgggaggttttaccgtgaataattggaccgaggaatgtactcacctggtcatggtttctgtgaaggtcacaatcaaaactatttgtgctcttatctgtggccgaccaattgttaaaccagaatatttcacagagttcctgaaggcggtcgagtccaaaaagcaaccaccacagatcgaatcattctacccaccacttgacgagccaagcattggtagcaagaacgtcgacctttccggacgacaggaaagaaaacagattttcaaagggaagactttcatattcttgaatgcaaagcagcacaagaaactgtcctccgctgtcgtctttggaggaggtgaggcaagacttattaccgaggagaacgaagaggagcacaacttttttctggcacctgggacatgcgtggttgacactggcatcacgaactctcagaccttgattcccgactgtcagaaaaaatggatacagagtataatggatatgctccagaggcaggggttgcggcctatcccagaagccgagatcgggctggccgtgatatttatgactacaaagaactattgtgatcctcaggggcatcctagcacaggccttaagactactacaccgggtccctccctcagccagggtgtatctgtggacgagaagctgatgccttcagcacctgtcaacaccaccacctatgtggccgacactgaatcagagcaagccgacacgtgggacctatctgagcggccaaaggaaattaaggtgtcaaagatggagcagaagtttcgcatgctctcccaggacgcccccacagtgaaagagtcctgtaaaacttctagcaacaataactcaatggtgtcaaataccctggctaaaatgagaatccccaattatcagcttagccccaccaaacttccatctatcaacaaatccaaagatagagcatctcaacaacaacagaccaacagtattcggaattactttcaaccatccaccaaaaagagagagcggctacacctcaagaaaaagaagaagaaaaaatag

SEQ ID NO: 129164 - DNA, 2265 bp, Artificial Sequence
  derived and/or modified sequence
atgtggaagctgctgcctgctgctggccctgctggaggagagccctaccgcctgctgactggagtggagtatgtggtgggcaggaagaactgtgccatcctgattgaaaatgaccagagcatcagcagaaatcatgctgtgctgacagccaacttctctgtgaccaacctgagccagacagatgagatccctgtgctgaccctgaaggacaacagcaaatatggcacctttgtgaatgaggagaagatgcagaatggcttcagcaggaccctgaagtctggagatggcatcacctttggagtgtttggcagcaagttccgcatcgagtatgagcccctggtggcctgcagcagctgcctggatgtgtctgggaagacagccctgaaccaggccatcctgcagctgggcggcttcaccgtgaacaactggacagaggagtgcacccacctggtgatggtgtctgtgaaggtgaccatcaagaccatctgtgccctgatctgtggccggcccatcgtgaagccagagtacttcacagagttcctgaaggctgtggagagcaagaagcagcccccccagatcgagagcttctacccacccctggatgagcccagcatcggcagcaagaatgtggacctgagcggccggcaggagaggaagcagatcttcaagggcaagaccttcatcttcctgaatgccaagcagcacaagaagctgagcagcgctgtggtgtttggaggaggagaggcccggctcatcacagaagaaaatgaggaggagcacaacttcttcctggcccctggcacctgtgtggtggacaccggcatcaccaacagccagaccctcatcccagactgccagaagaagtggatccagagcatcatggacatgctgcagaggcagggcctgcggcccatccctgaggccgagatcggcctggccgtcatcttcatgaccaccaagaactactgtgacccccagggccaccccagcacaggcctgaagaccaccaccccaggccccagcctgagccagggcgtgtctgtggatgagaagctgatgcccagcgcccctgtgaacaccaccacctacgtggccgacacagaaagtgagcaggccgacacctgggacctgtctgagcggcccaaggagatcaaggtgtccaagatggagcagaagttcaggatgctgagccaggatgcccccaccgtgaaggagagctgcaagaccagcagcaacaacaacagcatggtgagcaacaccctggccaagatgaggatccccaactaccagctgagccccaccaagctgcccagcatcaacaagagcaaggaccgggccagccagcagcagcagaccaacagcatccggaactacttccagcccagcaccaagaagcgggagagagatgaggagaaccaggagatgagcagctgcaagagcgccagaattgagaccagctgcagcctgctggagcagacccagcctgccacccccagcctgtggaagaacaaggagcagcacctgtctgaaaatgaacctgtggacaccaacagcgacaacaacctcttcacagacacagacctgaagagcatcgtgaagaacagcgccagcaagagccatgctgctgagaagctgcggagcaacaagaagcgggagatggatgatgtggccattgaagatgaggtgctggagcagctgttcaaggacaccaagccagagctggagattgatgtgaaggtgcagaagcaggaggaggatgtgaatgtgaggaagaggcccaggatggacatcgagaccaatgacaccttcagtgatgaagctgtgcctgagagcagcaagatcagccaggagaatgagatcggcaagaagcgggagctgaaggaggacagcctgtggagcgccaaggagatcagcaacaatgacaagctgcaggatgattctgagatgctgcccaagaagctgctgctgacagagttccgcagcctggtgatcaagaacagcaccagcaggaaccccagcggcatcaatgatgattatggccagctgaagaacttcaagaagttcaagaaggtgacctacccaggggccggcaagctgccccacatcattggaggcagtgacctgattgcccaccacgccaggaagaacacagagctggaggagtggctgcggcaggagatggaggtgcagaaccagcacgccaaggaggagagcctggctgatgacctcttccgctacaacccctacctgaagagaagaagatag

SEQ ID NO: 129165 - DNA, 1437 bp, Artificial Sequence
  derived and/or modified sequence
atgtggaagctgctgcctgctgctggccctgctggaggagagccctaccgcctgctgactggagtggagtatgtggtgggcaggaagaactgtgccatcctgattgaaaatgaccagagcatcagcagaaatcatgctgtgctgacagccaacttctctgtgaccaacctgagccagacagatgagatccctgtgctgaccctgaaggacaacagcaaatatggcacctttgtgaatgaggagaagatgcagaatggcttcagcaggaccctgaagtctggagatggcatcacctttggagtgtttggcagcaagttccgcatcgagtatgagcccctggtggcctgcagcagctgcctggatgtgtctgggaagacagccctgaaccaggccatcctgcagctgggcggcttcaccgtgaacaactggacagaggagtgcacccacctggtgatggtgtctgtgaaggtgaccatcaagaccatctgtgccctgatctgtggccggcccatcgtgaagccagagtacttcacagagttcctgaaggctgtggagagcaagaagcagcccccccagatcgagagcttctacccacccctggatgagcccagcatcggcagcaagaatgtggacctgagcggccggcaggagaggaagcagatcttcaagggcaagaccttcatcttcctgaatgccaagcagcacaagaagctgagcagcgctgtggtgtttggaggaggagaggcccggctcatcacagaagaaaatgaggaggagcacaacttcttcctggcccctggcacctgtgtggtggacaccggcatcaccaacagccagaccctcatcccagactgccagaagaagtggatccagagcatcatggacatgctgcagaggcagggcctgcggcccatccctgaggccgagatcggcctggccgtcatcttcatgaccaccaagaactactgtgacccccagggccaccccagcacaggcctgaagaccaccaccccaggccccagcctgagccagggcgtgtctgtggatgagaagctgatgcccagcgcccctgtgaacaccaccacctacgtggccgacacagaaagtgagcaggccgacacctgggacctgtctgagcggcccaaggagatcaaggtgtccaagatggagcagaagttcaggatgctgagccaggatgcccccaccgtgaaggagagctgcaagaccagcagcaacaacaacagcatggtgagcaacaccctggccaagatgaggatccccaactaccagctgagccccaccaagctgcccagcatcaacaagagcaaggaccgggccagccagcagcagcagaccaacagcatccggaactacttccagcccagcaccaagaagcgggagcggctgcacctgaagaagaagaagaagaagaagtag

SEQ ID NO: 129166 - DNA, 2265 bp, Artificial Sequence
  derived and/or modified sequence
atgtggaagctgctgcccgccgccggccccgccggcggcgagccctatagactgctgaccggcgttgagtatgtggtaggtcggaagaactgcgcgattcttattgaaaatgatcagtccataagccgtaaccacgcggtcctgactgccaacttctccgtaaccaatcttagccaaacagacgaaatccccgtgctaacactgaaggacaattctaagtatggtacattcgtgaatgaggagaagatgcagaacgggttttcaaggacccttaagtctggcgacggaatcacctttggtgtgttcggatcaaagtttcgcattgaatacgaacctctcgttgcctgctcaagctgcctcgacgtatccggcaagacggcacttaatcaggccatcctgcagctgggggggtttacagtcaataactggactgaggagtgcacacatctggtcatggtgtcggtgaaggtgaccatcaagacgatctgcgcccttatctgtggccggcccatagtaaagccagagtattttaccgagttcttaaaagctgttgaatccaagaaacagcccccacagatcgagtccttctatcctccactggacgagccctccatcgggagtaagaacgtcgacttgtcagggcgccaggaacgaaaacagatcttcaagggcaaaacgttcatttttctaaacgctaaacagcacaagaaactgtcaagtgctgtggtgtttggtggcggagaggcacgactgattacggaagagaacgaagaagagcataacttttttctagcccccggcacctgcgttgttgacacggggattaccaactcacagacccttataccggattgtcagaagaaatggattcagtctattatggatatgctgcagcgccagggcctaagaccaatccctgaggctgagatcggactcgccgtgatcttcatgaccaccaagaattattgcgatcctcaaggacatccatccaccggtcttaaaactacaacaccgggcccatccctgtcacagggcgtttctgtagatgagaaactcatgccttccgctcccgtgaataccacgacatatgttgctgacacagagtccgaacaggcagatacctgggacctatccgagagacccaaagaaattaaggtgtcaaagatggaacagaaattccggatgctgtctcaggacgcacccaccgttaaggagagctgcaaaacttcttccaacaataattctatggtgtcaaacacgctggctaaaatgcggattcccaactatcagctgagtcctaccaaactcccatcgatcaacaaatccaaagatcgggctagtcaacagcaacaaaccaattcaattcggaactatttccagccgagtacgaaaaagagagagagggatgaggaaaaccaagagatgtcctcctgcaaaagtgctaggattgagacctcctgcagtcttctggagcaaacacaacccgcgaccccatccttgtggaagaacaaggagcagcatctcagcgagaacgagcctgttgatacaaattccgacaacaacctatttaccgacactgatctgaaatcaattgtcaagaactcagcctccaagtcccacgcagccgagaagctcagaagcaataaaaagcgggagatggatgacgtcgccatcgaagacgaggttcttgagcagctctttaaggacacaaagcctgagctggagattgacgtcaaagtgcaaaagcaagaggaggacgttaacgtgcggaaacggcctcgtatggacattgagaccaatgatacatttagtgacgaggcagtgccagagagctccaaaatcagccaggaaaatgagattggcaagaaacgcgaactgaaggaagactctctctggtcggctaaggagatttctaacaatgacaaactgcaggatgattctgaaatgctccccaaaaaattgcttctgaccgagtttcggtctctcgttatcaaaaacagcacgtctagaaacccgtccggcattaacgatgactatggtcagctgaagaattttaaaaagttcaagaaagtgacatatcctggagccggtaagctcccccatatcattggcggaagcgatctcatagcacaccacgctcggaagaacaccgagttagaggagtggttgcgccaggagatggaggttcagaaccagcacgcgaaagaagagtctttagctgatgacctattcagatacaatccctatctgaagagaagacgttag

SEQ ID NO: 129167 - DNA, 1437 bp, Artificial Sequence
  derived and/or modified sequence
atgtggaagctgctgcccgccgccggccccgccggcggcgagccctaccgcctgctgacaggcgtggaatacgttgtggggcgcaagaactgcgccattctgatcgagaatgaccagagtatatcccgcaaccacgcagtcctcacagcgaacttcagcgtgactaatctctcacaaacagatgagattccagtgctgacattgaaggacaattctaagtacggcacattcgtcaacgaggagaaaatgcagaatggtttcagtcggactttgaaatctggggacggcatcacatttggagtatttggctcgaagtttagaattgaatacgagcccttggtcgcatgtagcagctgtttggatgtcagcgggaagactgctctgaaccaggctatacttcaattgggaggtttcactgtgaacaactggacggaggaatgcacgcacctggtgatggtttcagttaaggtcacgattaaaacaatctgtgccctgatctgcggccgtcctattgtgaaacccgagtactttacagagtttctgaaagccgtcgaatcaaagaagcagccaccccagattgagtccttctatccacctctagatgagccatccattggcagtaagaatgtcgacctgtcaggcaggcaggagagaaagcaaatcttcaagggaaaaacgttcatttttctgaacgccaagcagcataaaaagctgagctcagccgtggtcttcggtgggggcgaggccagactcatcaccgaagagaacgaggaggaacacaacttctttctagcccccggcacttgcgttgtggatacaggtatcacgaattctcagactctgatcccggattgtcagaagaagtggatacagagcatcatggacatgcttcagcggcaggggctgcgacctattccagaggctgagatcgggttggccgtgattttcatgaccacgaagaattactgcgaccctcaagggcaccccagcacgggcctgaaaactaccacaccagggccctccttatcccagggagtaagcgtggacgaaaaattgatgccctccgctccagtcaacactacaacctatgtcgccgacactgagtccgagcaggctgatacgtgggatctgagcgaacggccaaaggagattaaggtgtccaagatggagcagaagtttaggatgctgtcccaggacgcacctactgtgaaagaatcctgtaaaacaagttctaacaacaactcaatggtgtcaaacactcttgccaaaatgcggatcccaaactatcagctatcccctacgaagcttccaagcattaacaagagtaaggaccgagcgtctcagcaacaacagactaatagtatcagaaactactttcagccatcaacaaagaagcgggagaggttgcatcttaagaaaaaaaagaagaagaagtag

SEQ ID NO: 129168 - DNA, 4666 bp, Artificial Sequence
  derived and/or modified sequence
aagtcgcactcccgcctcatccaaggcagcctgcgtggctcccgggagcgcgcacgtcccggagcccatgccgaccgcaggcgccgtatccgcgctcgtctagcagccccggttacgcggttgcacgtcggccccagccctgaggagccggaccgatgtggaaactgctgcccgccgcgggcccggcaggaggagaaccatacagacttttgactggcgttgagtacgttgttggaaggaaaaactgtgccattctgattgaaaatgatcagtcgatcagccgaaatcatgctgtgttaactgctaacttttctgtaaccaacctgagtcaaacagatgaaatccctgtattgacattaaaagataattctaagtatggtacctttgttaatgaggaaaaaatgcagaatggcttttcccgaactttgaagtcgggggatggtattacttttggagtgtttggaagtaaattcagaatagagtatgagcctttggttgcatgctcttcttgtttagatgtctctgggaaaactgctttaaatcaagctatattgcaacttggaggatttactgtaaacaattggacagaagaatgcactcaccttgtcatggtatcagtgaaagttaccattaaaacaatatgtgcactcatttgtggacgtccaattgtaaagccagaatattttactgaattcctgaaagcagttgagtccaagaagcagcctccacaaattgaaagtttttacccacctcttgatgaaccatctattggaagtaaaaatgttgatctgtcaggacggcaggaaagaaaacaaatcttcaaagggaaaacatttatatttttgaatgccaaacagcataagaaattgagttccgcagttgtctttggaggtggggaagctaggttgataacagaagagaatgaagaagaacataatttctttttggctccgggaacgtgtgttgttgatacaggaataacaaactcacagaccttaattcctgactgtcagaagaaatggattcagtcaataatggatatgctccaaaggcaaggtcttagacctattcctgaagcagaaattggattggcggtgattttcatgactacaaagaattactgtgatcctcagggccatcccagtacaggattaaagacaacaactccaggaccaagcctttcacaaggcgtgtcagttgatgaaaaactaatgccaagcgccccagtgaacactacaacatacgtagctgacacagaatcagagcaagcagatacatgggatttgagtgaaaggccaaaagaaatcaaagtctccaaaatggaacaaaaattcagaatgctttcacaagatgcacccactgtaaaggagtcctgcaaaacaagctctaataataatagtatggtatcaaatactttggctaagatgagaatcccaaactatcagctttcaccaactaaattgccaagtataaataaaagtaaagatagggcttctcagcagcagcagaccaactccatcagaaactactttcagccgtctaccaaaaaaagggaaagggatgaagaaaatcaagaaatgtcttcatgcaaatcagcaagaatagaaacgtcttgttctcttttagaacaaacacaacctgctacaccctcattgtggaaaaataaggagcagcatctatctgagaatgagcctgtggacacaaactcagacaataacttatttacagatacagatttaaaatctattgtgaaaaattctgccagtaaatctcatgctgcagaaaagctaagatcaaataaaaaaagggaaatggatgatgtggccatagaagatgaagtattggaacagttattcaaggacacaaaaccagagttagaaattgatgtgaaagttcaaaaacaggaggaagatgtcaatgttagaaaaaggccaaggatggatatagaaacaaatgacactttcagtgatgaagcagtaccagaaagtagcaaaatatctcaagaaaatgaaattgggaagaaacgtgaactcaaggaagactcactatggtcagctaaagaaatatctaacaatgacaaacttcaggatgatagtgagatgcttccaaaaaagctgttattgactgaatttagatcactggtgattaaaaactctacttccagaaatccatctggcataaatgatgattatggtcaactaaaaaatttcaagaaattcaaaaaggtcacatatcctggagcaggaaaacttccacacatcattggaggatcagatctaatagctcatcatgctcgaaagaatacagaactagaagagtggctaaggcaggaaatggaggtacaaaatcaacatgcaaaagaagagtctcttgctgatgatctttttagatacaatccttatttaaaaaggagaagataactgaggattttaaaaagaagccatggaaaaacttcctagtaagcatctacttcaggccaacaaggttatatgaatatatagtgtatagaagcgatttaagttacaatgttttatggcctaaatttattaaataaaatgcacaaaactttgattcttttgtatgtaacaattgtttgttctgttttcaggctttgtcattgcatctttttttcatttttaaatgtgttttgtttattaaatagttaatatagtcacagttcaaaattctaaatgtacgtaaggtaaagactaaagtcacccttccaccattgtcctagctacttggttcccctcagaaaaaaattcatgatactcatttcttatgaatctttccagggatttttgagtcctattcaaattcctatttttaaataatttcctacacaaatgatagcataacatatgcagtgttctacaccttgcttttttacttagtagattaaaaattataggaatatcaatataatgtttttaatattttttcttttccattatgctgtagtcttacctaaactctggtgatccaaacaaaatggcttcagtggtgcagatgtcacctacatgttattctagtactagaaactgaagaccatgtggagacttcatcaaacatgggtttagttttcaccagaatggaaagacctgtacccctttttggtggtcttactgagctgggtgggtgtctgttttgagcttatttagagtcctagttttcctacttataaagtagaaatggtgagattgttttctttttctaccttaaagggagatggtaagaaacaatgaatgtcttttttcaaactttattgacaagtgattttcaagtctgtgttcaaaaatatattcatgtacctgtgatccagcaagaagggagttccagtcaagagtcactacaactgattagttgtttagagaatgagaaatggaacagtgaggaatggaggccatatttccatgacttcccttgtaaacagaagcaacagaagggacaagaggctggcctctacatcactctcaccttccaaatcttgtggaagtgcatctacttgccagaaccaaattaacttacttccaagttctggctgcttgcaggtggaactccagctgcaagggagttagggaaatgaaggtctttttttaaaagcttctcagccttcctagggaacagaaattgggtgagccaatctgcaatttctactacaggcattgagaccagttagattattgaaatattatagagagttatgaacacttaaattatgatagtggtatgacattggatagaacatgggatactttagaagtagaattgacagggcatattagttgatgaaatggagtcatttgagtctcttaatagccatgtatcataattaccaagtgaagctggtggaacatatggtctccattttacagttaaggaatataatggacagattaatattgttctctgtcatgcccacaatccctttctaaggaagactgccctactatagcagtttttatatttgtcaatttatgaatataatgaatgagagttctggtacctcctgtctttacaaatattggtgttgtcagtatttttcctttttaaccattccaatcggtgtgtagtgatgtttcattttggttttaatttgtatatccctgatagctataattgggtcatagaaattctttatacattctagatgcaagtctcttgtcggatatatgtattgagatattacacctagtctgtggcttgactgttttctttatgtcttttgatgaatagaagttttaaattttgacaaggtcaaatttatttttttcttttgtttgatattttttctctccaatttaaccccaagatttcagatattctgctctattatataaactttatatttttatatttgtgatctaccttgaattgatatgtatgttgtgaattatggatcagggttctttttttcccccatacaagtatccagtcattgtaacactgtttattgaaagaattatcctttcctcattaaattaccttgccaattagtaaaaaatcaattaaccataatggtggatctgtttctggactttctgtttggttacactgaaatgtttgtccatccttgcactcactcataccatactgccttgaattactgtagctgcatagatgctccttaagttgggattacattgtaataaacgcaatgtaagtt

SEQ ID NO: 129169 - DNA, 2265 bp, Artificial Sequence
  derived and/or modified sequence
atgtggaaattgttaccggcagccggaccagccggaggggagccctaccgcctgcttaccggtgttgaatacgtggtgggtcggaaaaactgcgcaatcctaattgagaatgatcagtctatctcccgaaaccatgcagtacttaccgcgaatttttccgtgacgaatctgtcacagaccgatgagatccccgttttgactttgaaggataactcgaaatacggcacttttgtcaacgaggagaaaatgcaaaatggcttcagtcgcaccttgaagtctggcgacggaatcacttttggcgttttcggctccaaattccgaatcgagtacgaaccactggtcgcttgctctagctgtcttgacgtgtcaggaaaaacagcactcaatcaggccattctacagctagggggatttacagtgaataactggactgaggagtgcactcatttagtgatggtgtctgtgaaagttacaatcaaaactatctgcgccctaatctgtggcaggcctattgtgaaaccagagtacttcacagagttcctgaaggccgtggagtcaaagaagcaaccccctcagatcgaaagcttctatccaccacttgatgagccttcgatcgggtccaagaacgtagacttgtcgggtcgacaggagcgaaagcagatttttaagggaaagaccttcatatttttgaatgcgaagcagcataagaaactgtcatctgccgtggtgtttggtggaggtgaagcaagacttataactgaggagaacgaagaggaacacaattttttccttgcacccggtacatgtgtcgttgataccgggattacaaatagccaaacactcattcccgattgtcagaaaaagtggatccagagcattatggacatgcttcagaggcagggtctgagacctatacctgaggctgagatcggacttgccgtcatctttatgaccaccaaaaactactgtgaccctcaagggcacccatcaacagggctcaagacgacaactccaggtccaagcctgagccagggagtgtctgtggacgagaaacttatgccaagtgctccagtgaatacgacgacttacgtagccgacactgaaagcgaacaggccgacacctgggacctgagcgaacggcctaaggagattaaggttagtaaaatggaacagaaattccgcatgcttagtcaggacgccccaaccgtgaaagagagttgtaagacctcgtccaacaataatagtatggtttctaacacccttgccaaaatgcgtattcctaactatcagttgtcccctactaagttgcccagtataaataagagcaaagatcgagcttctcaacagcagcagaccaattctataaggaattactttcagcctagcacaaagaagcgggagcgggacgaagagaaccaggaaatgtcaagctgcaaatccgctagaattgaaacttcatgttctctcctcgagcagacccagccagcgacgccgtctctgtggaagaataaagaacagcatttgtcagagaatgaacctgttgacaccaacagtgacaataatctcttcactgatacggatctcaaatccatcgttaagaactcggcaagcaagtcccatgcagctgagaagctgaggtctaataagaagagagaaatggacgatgtggctatcgaggacgaggtgctcgagcagcttttcaaagatacaaaacctgaacttgagattgatgtgaaggtgcaaaagcaggaggaggacgtgaacgtgcgcaagcgccctaggatggatatcgagaccaacgacacattctcggacgaggctgtacccgagtcatctaagatctcccaagagaacgagatcggcaagaaaagagaactcaaagaagactccctgtggagcgccaaggaaatctcaaataacgacaaattgcaagatgattccgaaatgctgcccaagaaattacttctgaccgagtttcgatcactggtgataaaaaatagcacatctaggaatccttcaggcattaatgatgattacggtcagttaaaaaattttaagaagttcaaaaaggtcacttacccaggcgcagggaagctgcctcacatcatcggcggttccgacctgatcgcccaccatgccagaaaaaacactgagctagaggagtggttaagacaggaaatggaggttcaaaaccaacatgccaaagaggaaagcttagctgatgatctttttaggtataacccttacctcaaaagaaggcgatag

SEQ ID NO: 129170 - DNA, 1437 bp, Artificial Sequence
  derived and/or modified sequence
atgtggaaactcctcccagcagctggtcccgcaggaggcgaaccttaccggcttttgactggcgtggaatatgtcgtgggcaggaagaactgtgctatcctaattgagaacgatcagagcatttcaagaaaccacgccgtgctgaccgcgaacttctccgtgacaaacctctctcagacggacgagatcccagtgctgaccttaaaggataattctaagtatggcacatttgtgaatgaagagaagatgcagaatggcttttctcgcacactgaagtctggcgacgggattacatttggcgtgtttgggagcaagttcaggatcgaatatgagcccctggttgcttgctcctcgtgcctcgatgtatccggtaagacagctctgaatcaagcaatcctgcagctcgggggtttcactgttaataattggaccgaagagtgtacgcacctcgttatggtgtctgtaaaggtcaccattaagactatatgcgcgctgatttgtgggagacccatcgtgaaacctgagtattttacagagttccttaaagccgtggagagtaaaaaacagccccctcagatcgagtccttctacccgcctcttgatgagcctagcattgggtcaaaaaatgtggacctgagcgggagacaggaacggaagcagatttttaagggaaagacattcattttcctcaacgctaagcagcataagaagttgagctctgctgttgttttcgggggtggcgaggctagactgattaccgaagagaatgaagaagagcacaattttttcctggctccgggaacgtgcgtggtagataccggaataactaactcgcagaccctcattcccgattgtcagaagaaatggattcagagcatcatggatatgctgcaacggcaaggtttgcggccaatcccggaagcagagatagggttggcggtcatcttcatgaccaccaagaactactgtgacccacaggggcatcccagcaccggcttaaagacaacaacacccggacccagtctgtcccagggagtttccgtcgacgagaagctgatgccatctgctcccgtgaacaccacaacatatgtggccgacactgagagcgagcaggctgacacctgggatctgagcgaaaggccaaaggaaatcaaggtgtccaagatggagcagaaattcagaatgttgtcacaggatgccccaaccgtgaaggagtcgtgcaagaccagctcaaataacaacagtatggttagcaacaccctcgcgaaaatgaggattccaaactaccagctgagcccgaccaagctcccctctatcaacaagtccaaagatagggcctcccagcaacagcagactaacagtattaggaattattttcagccaagtacaaagaaaagggagcggctgcacctcaagaagaaaaaaaagaaaaagtag

SEQ ID NO: 129171 - protein, 321 aa, Artificial Sequence
  derived and/or modified sequence
MSEQSKDLSDPNFAAEAPNSEVHSSPGVSEGVPPSATLAEPQSPPLGPTAAPQAAPPPQAPNDEGDPKALQQAAEEGRAHQAPSAAQPGPAPPAPAQLVQKAHELMWYVLVKDQKKMIIWFPDMVKDVIGSYKKWCRSILRRTSLILARVFGLHLRLTSLHTMEFALVKALEPEELDRVALSNRMPMTGLLLMILSLIYVKGRGARESAVWNVLRILGLRPWKKHSTFGDVRKLITEEFVQMNYLKYQRVPYVEPPEYEFFWGSRASREITKMQIMEFLARVFKKDPQAWPSRYREALEEARALREANPTAHYPRSSVSED

SEQ ID NO: 129172 - DNA, 966 bp, Artificial Sequence
  derived and/or modified sequence
atgagcgagcagtctaaagatctctctgatccaaacttcgccgcagaagcacctaatagtgaggtgcatagtagtcccggcgttagcgagggtgttccaccctctgcgacgttagcagaacctcaaagccccccacttggtcctaccgccgctccccaggctgcgcccccaccccaagcacccaacgacgagggagatcctaaggctcttcagcaggctgccgaggagggacgggcccaccaggcccctagcgccgcacagcccggtcccgccccgcctgcccccgcccaattggttcagaaggcgcatgaacttatgtggtatgttctggtgaaggaccagaaaaagatgatcatatggttccccgacatggtaaaggacgtcattggcagttacaaaaagtggtgtcggtctatcttgcggcggaccagcctcatattggccagagtgtttggactgcacttacgcctaaccagcctgcataccatggaattcgctctggtgaaggccctggagcccgaagaacttgacagagtcgctctgtcaaataggatgccaatgacgggcctgctccttatgattctgtctctgatctacgtcaagggcaggggagctcgggaaagcgccgtatggaatgtacttagaattttgggactacgcccttggaaaaagcactctacattcggagatgtcagaaagctcatcacagaggaattcgtgcaaatgaattacctcaagtatcagcgagttccatacgtcgaaccccctgagtacgaatttttttggggcagtcgagcgtcacgcgagattaccaagatgcagattatggaatttcttgctagggtttttaagaaagacccgcaagcatggcccagtcgttatagagaagcacttgaggaagcaagagccctgcgggaggcaaatcccactgcacactatccccgctccagtgtgagcgaggattag

SEQ ID NO: 129173 - DNA, 966 bp, Artificial Sequence
  derived and/or modified sequence
atgtctgagcagagcaaggacctgagtgaccccaactttgctgctgaggcccccaacagcgaggtgcacagcagccctggggtgtctgaaggagtgcccccatctgccaccctggccgagccccagagcccccccctgggccccacagctgccccccaggccgcccccccaccccaggccccaaatgatgaaggagaccccaaggccctgcagcaggccgctgaggagggccgggcccaccaggcccccagcgctgcccagcccggccctgcccccccagccccagcccagctggtgcagaaggcccacgagctgatgtggtacgtgctggtgaaggaccagaagaagatgatcatctggttcccagacatggtgaaggatgtgattggcagctacaagaagtggtgccgcagcatcctgcggaggaccagcctcatcctggcccgggtgtttggcctgcacctgcggctgaccagcctgcacaccatggagtttgccctggtgaaggccctggagcctgaggagctggacagagtggccctgagcaacaggatgcccatgacaggcctgctgctgatgatcctgagcctcatctacgtgaagggccgcggggcccgggagagcgctgtgtggaatgtgctgcgcatcctgggcctgcggccctggaagaagcacagcacctttggagatgtgaggaagctgatcacagaggagtttgtgcagatgaactacctgaagtaccagagggtgccctacgtggagcccccagaatatgagttcttctggggcagccgggccagccgggagatcaccaagatgcagatcatggagttcctggcccgggtcttcaagaaggacccccaggcctggcccagccgctaccgggaggccctggaggaggcccgggccctgcgggaggccaaccccacagcccactaccccaggagctctgtgtctgaggactag

SEQ ID NO: 129174 - DNA, 966 bp, Artificial Sequence
  derived and/or modified sequence
atgagcgagcagagcaaggacctgagcgaccccaacttcgccgccgaagctcccaacagcgaggtgcactcatcaccaggggtgtctgagggagttcctcccagcgctacactcgccgaacctcagagcccgcccctggggcccacggccgcgccccaagccgctccccctcctcaggctcccaatgacgagggcgatcctaaggcactgcagcaggccgccgaagagggacgggctcatcaggccccctcagccgcgcagccaggtcctgcaccacctgctcccgcccaactggttcagaaagcacatgagctcatgtggtacgtcctcgtgaaagaccagaagaagatgattatttggtttccagacatggtcaaggacgtaattggctcatataagaaatggtgcagatctattctgcggcgcactagcctgattctcgcacgggtgttcgggctgcatctgcgcctaacatctctgcacacaatggaattcgccctggtcaaggccctggagcctgaagaacttgacagggttgctctctccaatcgtatgcccatgacaggacttctgcttatgatcctctcactcatctacgttaaaggccgcggtgctcgtgaaagtgcagtgtggaatgtactgcggatactcggactgcggccttggaagaagcattccacatttggggatgttcgcaaactgattacagaagagtttgtccagatgaactatctcaaataccagcgggtcccctacgtagagccccctgagtatgagttcttctgggggtcaagggcatcccgcgaaatcacaaaaatgcagattatggagtttctggcaagggtgtttaaaaaggacccccaggcctggccttcaaggtatagggaggccctggaagaagcccgagctttgcgcgaggcaaacccaactgcccactatccacgttccagcgtctccgaagattag

SEQ ID NO: 129175 - DNA, 1886 bp, Artificial Sequence
  derived and/or modified sequence
acttcctctccaggaatccgcggagggagcgcaggctcgaagagctcctggacgcagaggccctgcccttgccagacggcgcagacatgtcagaacaaagtaaggatctgagcgaccctaactttgcagccgaggcccccaactccgaggtgcacagcagccctggggtttcggagggggttcctccgtccgcgaccctggcagagccgcagagccctcctctaggcccgacggccgctccgcaggccgcgccgcctccccaggccccgaacgacgagggcgacccgaaggccctgcagcaggctgcggaggagggccgcgcccaccaggccccgagcgcggcccagccgggcccggcaccgccagccccggcgcagctggtgcagaaggcgcacgagctcatgtggtacgtgctggtcaaggaccagaagaagatgatcatctggtttccagacatggtgaaagatgtcatcggcagctacaagaagtggtgcaggagcatcctccggcgcaccagcctcatcctcgcccgggtgttcgggctgcacctgaggctaaccagcctgcacaccatggagtttgcgctggtcaaagcgctggagcccgaggagctggacagggtggcgctgagcaaccgcatgcccatgacaggcctcctgctcatgatcctgagcctcatctacgtgaagggccgcggcgccagagagagcgccgtctggaacgtgctgcgcatcctggggctgcggccctggaagaagcactccaccttcggggacgtgcggaagctcatcactgaggagttcgtccaaatgaattacctgaagtaccagcgcgtcccatacgtggagccgcccgaatacgagttcttttggggctcccgggccagccgcgaaatcaccaagatgcaaatcatggagttcctggccagggtctttaagaaagacccccaggcctggccctcccgatacagagaagctctggaggaggccagagctctgcgggaggctaatcccactgcccactaccctcgcagcagtgtctctgaggactagcaaagtctggaggcagatgaatggtttctgaccctcaccagggctgtggaagggtgggggtgggtcattatagtattcaggatttacagtgcagtattcacgtgtaacttttaagttttcagtacagtgcttttatacctttaatgcaatgttgtattcatttgggtactattgtgtagtatttaggatgtatgcatgtttgtttatatgtaagcttggttggtgctttcgcttttgtgctacctttcttggatttttgtaccagagatgtgctaaactgatgaaatacattgagaaagtttccatcttattcttttatatgggactgatgatgtgtgttggggtagactgctcctgcagagtttggaagaagtcaccagcaaagccggcctaaccaagaaaagtcaaggcccttcatgaccttgctgggcacagaaaacaccctcgtggagtacactaatttgaactggactggtctcagtgtgagcacttggcacactttactaaacacatatacaaccccaccgtgagtcaactttaaagtaaacattaaagattcttgtgatacaatcatttttggaaaagtgtactttatcattttaacaaagcagtatggttgggaatgagacaattctctattttacagtgtatacagatacaactatttcccctaatagggtgggaaaaatcgctactcatgattactcctaaatttgtgaagtttatagttctattgtctttaaatgtaactcatgtttatttcaaaaacattcacaaatatagaaaagtatacaaaacaaaacagtaagattgtctgtaatcacatcatatggg

SEQ ID NO: 129176 - DNA, 966 bp, Artificial Sequence
  derived and/or modified sequence
atgtccgaacaatcaaaagatctgtccgaccctaatttcgccgctgaagcaccaaattcagaagtccactctagccccggagtgagtgaaggggtccccccaagcgccacattggccgagccgcaatcgccccctctgggcccaacggcagcaccacaggccgcacccccaccccaggcgcctaacgatgagggtgaccctaaagcactacagcaggctgctgaggaaggcagagcccatcaagccccttctgcagcccagccaggtccggcaccacccgcaccagcccaattggttcaaaaggcacacgaactaatgtggtacgtgcttgtgaaagatcagaagaagatgataatttggttccctgatatggtgaaggatgtcatcggctcgtacaaaaaatggtgcagatccatcttaaggcgcaccagtctgatcctagctagggtgttcgggctgcatctccggctgacctcgttgcataccatggaattcgctctggtgaaggcccttgagccagaggaactggaccgggtggctctgtctaatcggatgccaatgacagggcttctcctcatgatccttagccttatctacgtgaaaggacggggagcaagggagtccgctgtgtggaacgtactgagaattttaggactccgaccttggaaaaaacacagcacgttcggagacgtaagaaaactgatcaccgaggaatttgtccagatgaattacctcaagtaccaacgcgtcccctatgtggagccacccgaatacgaattcttttggggctccagagccagccgcgagatcacaaaaatgcagataatggagttcctggccagagtgttcaagaaagacccccaagcttggccctctcgctatcgagaggctctggaggaggcacgggcactgagggaggcgaaccctaccgcccattatcccagaagctcggtgagcgaagattag

SEQ ID NO: 129177 - DNA, 966 bp, Artificial Sequence
  derived and/or modified sequence
atgagcgagcagagcaaggacctgagcgaccccaacttcgccgccgaggcccccaacagcgaggtgcacagcagccccggcgtgagcgagggcgtgccccccagcgccaccctggccgagccccagagcccccccctgggccccaccgccgccccccaggccgccccccccccccaggcccccaacgacgagggcgaccccaaggccctgcagcaggccgccgaggagggcagagcccaccaggcccccagcgccgcccagcccggccccgccccccccgcccccgcccagctggtgcagaaggcccacgagctgatgtggtacgtgctggtgaaggaccagaagaagatgatcatctggttccccgacatggtgaaggacgtgatcggcagctacaagaagtggtgcagaagcatcctgagaagaaccagcctgatcctggccagagtgttcggcctgcacctgagactgaccagcctgcacaccatggagttcgccctggtgaaggccctggagcccgaggagctggacagagtggccctgagcaacagaatgcccatgaccggcctgctgctgatgatcctgagcctgatctacgtgaagggcagaggcgccagagagagcgccgtgtggaacgtgctgagaatcctgggcctgagaccctggaagaagcacagcaccttcggcgacgtgagaaagctgatcaccgaggagttcgtgcagatgaactacctgaagtaccagagagtgccctacgtggagccccccgagtacgagttcttctggggcagcagagccagcagagagatcaccaagatgcagatcatggagttcctggccagagtgttcaagaaggacccccaggcctggcccagcagatacagagaggccctggaggaggccagagccctgagagaggccaaccccaccgcccactaccccagaagcagcgtgagcgaggactag

SEQ ID NO: 129178 - protein, 99 aa, Artificial Sequence
  derived and/or modified sequence
MAAAAASRGVGAKLGLREIRIHLCQRSPGSQGVRDFIEKRYVELKKANPDLPILIRECSDVQPKLWARYAFGQETNVPLNNFSADQVTRALENVLSGKA

SEQ ID NO: 129179 - DNA, 300 bp, Artificial Sequence
  derived and/or modified sequence
atggccgcagcagctgcttcacggggtgtgggggctaagctcggtcttagggagatccgtatacacttgtgccaacggagtccggggtcccagggggtgcgggatttcattgaaaaacggtatgtggagcttaagaaggctaacccagacttgccaattctaattcgtgagtgtagcgacgtgcagcctaagctatgggccagatatgcctttggtcaggagacgaacgttcccctcaataatttctccgccgaccaggtcactagagcactagagaacgtgcttagcggcaaggcttag

SEQ ID NO: 129180 - DNA, 300 bp, Artificial Sequence
  derived and/or modified sequence
atggctgctgctgctgccagcagaggagtgggcgccaagctgggcctgcgggagatccgcatccacctgtgccagaggagccctggcagccagggcgtgcgggacttcatcgagaagagatatgtggagctgaagaaggccaacccagacctgcccatcctgatcagagaatgttctgatgtgcagcccaagctgtgggcccgctatgccttcggccaggagaccaacgtgcccctgaacaacttctctgctgaccaggtgacccgggccctggagaatgtgctgagcggcaaggcctag

SEQ ID NO: 129181 - DNA, 804 bp, Artificial Sequence
  derived and/or modified sequence
gcttcctgtttttccctccgaccaaccccgagcgcaaagaaattgacctcgcagcggtcctacaatacttttatatcattggccaagctttaccccgcccctgcctcatgcagcctatgggctaggctttagggtccgcggttggtcagaccggagcacttggcctgaagacctggaattggcgacttcgatattaacaaggatggcggcggccgcagcaagtcgaggagtcggggcaaagctgggcctgcgtgagattcgcatccacttatgtcagcgctcgcccggcagccagggcgtcagggacttcattgagaaacgctacgtggagctgaagaaggcgaatcccgacctacccatcctaatccgcgaatgctccgatgtgcagcccaagctctgggcccgctacgcatttggccaagagacgaatgtccctttgaacaacttcagtgctgatcaggtaaccagagccctggagaacgttctaagtggtaaagcctgaagcctccactgaggattaagagcaacagccccagagcctgggctctgctggacttagtataatgtgaaaaaaatgtgttctcctattcctcataaagcttgtgctgtaaaatactttctcagggtgttcttgtcctcatctaccctctaccccttactgtgcaaccactgaggcaaagtagcttaatataaaaataaaactttattctgtctcatcaaaagctaccagctgctgaagcaaacatgaagggtggcgggggggcagggattctagggccccagagtaagtagaccacactgagt

SEQ ID NO: 129182 - DNA, 300 bp, Artificial Sequence
  derived and/or modified sequence
atggccgccgccgccgccagccggggcgtgggcgccaagctgggcctgagggagatcagaatccatctgtgccagcgatcacccggctcccagggcgtgagagatttcattgaaaagaggtacgtggagcttaagaaggcaaaccctgacctgcctatcctcattagggaatgttccgacgttcaacctaagctatgggcacgatacgccttcgggcaagagacaaatgtgcccttgaataacttctcagccgaccaggtgacccgcgcattggagaatgtgctatcaggcaaggcctag

SEQ ID NO: 129183 - DNA, 300 bp, Artificial Sequence
  derived and/or modified sequence
atggctgccgctgccgctagcaggggagtgggcgcaaaactggggctacgggagattagaatccatttgtgccagagatcccccggatcccagggtgttagggatttcatcgaaaaacgttatgtggaactgaaaaaggctaaccccgacctacctatcctcattcgggaatgttcggacgtccagcccaagctgtgggccagatacgcttttggccaggagactaatgtccctttgaataatttctccgctgaccaggtaactcgcgcactggaaaatgtgctgtccggcaaagcttag

SEQ ID NO: 129184 - DNA, 300 bp, Artificial Sequence
  derived and/or modified sequence
atggccgccgccgccgccagcagaggcgtgggcgccaagctgggcctgagagagatcagaatccacctgtgccagagaagccccggcagccagggcgtgagagacttcatcgagaagagatacgtggagctgaagaaggccaaccccgacctgcccatcctgatcagagagtgcagcgacgtgcagcccaagctgtgggccagatacgccttcggccaggagaccaacgtgcccctgaacaacttcagcgccgaccaggtgaccagagccctggagaacgtgctgagcggcaaggcctag

SEQ ID NO: 129185 - protein, 154 aa, Artificial Sequence
  derived and/or modified sequence
MGKDIRPRSARAACKGVGLWSGCFGKMAGSGVRQATSTASTFVKPIFSRDMNEAKRRVRELYRAWYREVPNTVHQFQLDITVKMGRDKVREMFMKNAHVTDPRVVDLLVIKGKIELEETIKVWKQRTHVMRFFHETEAPRPKDFLSKFYVGHDP

SEQ ID NO: 129186 - DNA, 465 bp, Artificial Sequence
  derived and/or modified sequence
atgggtaaagacattagacctcgctctgcccgtgccgcgtgtaagggcgttggcctatggagcggctgcttcggcaagatggccggttcaggtgtgcgacaagccaccagtactgcctctacattcgtgaaacctatctttagcagagacatgaacgaggccaagcgccgagtgagggaattgtatcgggcatggtaccgcgaggtgccgaatactgtgcaccagtttcagctggacatcactgtcaagatgggtagggacaaggttcgtgagatgttcatgaagaatgcgcacgtgaccgacccccgggtggtggacctgctggtcatcaagggaaaaatcgagcttgaagagactattaaggtctggaagcagagaacccacgtgatgcgctttttccacgagacagaggcccccaggccgaaggatttcctcagtaagttctatgtgggccacgatccttag

SEQ ID NO: 129187 - DNA, 465 bp, Artificial Sequence
  derived and/or modified sequence
atgggcaaggacatccggcccaggtctgcccgggccgcctgcaagggcgtgggcctgtggagcggctgcttcggcaagatggccggcagcggcgtgcggcaggccaccagcacagccagcacctttgtgaagcccatcttcagccgggacatgaatgaggccaagagaagagtgcgggagctgtaccgggcctggtaccgggaggtgcccaacacagtgcaccagttccagctggacatcaccgtgaagatgggccgggacaaggtgcgggagatgttcatgaagaatgcccacgtgacagacccccgggtggtggacctgctggtgatcaagggcaagattgagctggaggagaccatcaaggtgtggaagcagaggacccacgtgatgaggttcttccacgagacagaggccccccggcccaaggacttcctgagcaagttctacgtgggccatgacccctag

SEQ ID NO: 129188 - DNA, 1256 bp, Artificial Sequence
  derived and/or modified sequence
ggcgtttctgtagatgagcatgcgcagcacccaccgttcgctcagccagagagaggcttcccagccaatccgagagcctcagagtcatcctcccgcccacccagcatacaggcggggcgttcctccttagccaatgggaaaagacattcgcccgcggtccgcacgcgctgcttgcaaaggggtggggttgtggagtggatgctttggcaagatggcggggagcggcgtccgccaagctacttctaccgccagcaccttcgtgaagcccattttcagtcgggacatgaacgaggccaagcggagggtgcgcgagctctaccgcgcctggtatcgggaggtgccgaacactgtgcaccaattccagctggacatcactgtgaaaatgggacgggataaagtccgagaaatgtttatgaagaatgcccatgtcacagaccccagggtggttgatcttctggtcattaagggaaagatcgaactggaagaaacaattaaagtatggaagcagcggacacatgttatgcggttcttccatgaaacagaagcgccaaggccaaaggatttcctatccaagttctatgttggccacgatccatgaagtcattcagtggaaagatgcacgttgatactattttagagcacaaataaactcactatacaatggtcactttgtgatagaattccattgatgaaccaattttctgcagcctctttttgcctgagcaagtgggaccttggtatacacatcacctgttctttcccttttcttgaaatgtggtgtttgctgtaaattggattgaattatttttctcagagccttgcatgtcagtaaacaggaaggaaggaggccatctgttcaaaaattgtgacattgggcatgaggctggacgacttgttaatgtagttgtttctatagcccctatgattagacacttcagtgtcagggcacagattatctaaaattagccagctcttcctgtcagggatcagggcagcactaacaggcgcaaaagtagagctgtcaagatgggctagttttccttgggttctgaagaaaatggatgtgcaaaggcttggctccgctacttgtaacaagctccagcccttaaaatgaaattaacttcctactcaggcaccctgcttaggtgcacagctgttcaatatacacagagaacagaaatattcctactgtctttggaaaccctggtgtacctctcagtggcagaataaacatcaacacaggttcaagaactgat

SEQ ID NO: 129189 - DNA, 465 bp, Artificial Sequence
  derived and/or modified sequence
atgggcaaggacatccggccccggagcgcccgggccgcctgcaagggcgtcggcctgtggtcaggttgcttcggcaaaatggccgggtcaggggtacgccaggccacatctactgcctcgaccttcgtaaaaccaattttcagccgagacatgaacgaggcaaaacgccgtgttcgagaactgtaccgcgcatggtacagagaagttcccaataccgtgcaccagtttcagcttgatatcaccgtgaaaatggggcgagacaaagttcgagaaatgttcatgaagaacgctcacgtcacagacccacgggtggtcgacttactggtgattaagggaaaaatcgaactggaggagactattaaagtttggaaacagagaactcatgtgatgcgttttttccacgagaccgaggctccacggcctaaggatttcttgagtaagttttacgttggccatgacccatag

SEQ ID NO: 129190 - DNA, 465 bp, Artificial Sequence
  derived and/or modified sequence
atggggaaggacattcgaccgagatcagctagggcagcgtgcaagggcgtcggcctgtggagtggctgcttcggaaagatggcgggaagcggggttcggcaagccactagcacagcctccacattcgtgaaacccattttttccagggacatgaatgaggcgaagagacgggtaagagaactttaccgtgcctggtaccgcgaggtcccaaacacggtccatcagtttcaactggacattacggtgaagatgggtcgtgacaaggtgagggagatgtttatgaagaacgcgcatgttaccgatcctcgggttgtcgatcttctcgtcattaagggaaagatcgaactcgaggaaaccatcaaagtgtggaagcagagaacccacgtgatgcggttttttcacgagaccgaagcccctagaccaaaagatttcttgtctaagttctacgtcggccatgacccgtag

SEQ ID NO: 129191 - DNA, 465 bp, Artificial Sequence
  derived and/or modified sequence
atgggcaaggacatcagacccagaagcgccagagccgcctgcaagggcgtgggcctgtggagcggctgcttcggcaagatggccggcagcggcgtgagacaggccaccagcaccgccagcaccttcgtgaagcccatcttcagcagagacatgaacgaggccaagagaagagtgagagagctgtacagagcctggtacagagaggtgcccaacaccgtgcaccagttccagctggacatcaccgtgaagatgggcagagacaaggtgagagagatgttcatgaagaacgcccacgtgaccgaccccagagtggtggacctgctggtgatcaagggcaagatcgagctggaggagaccatcaaggtgtggaagcagagaacccacgtgatgagattcttccacgagaccgaggcccccagacccaaggacttcctgagcaagttctacgtgggccacgacccctag

SEQ ID NO: 129192 - protein, 189 aa, Artificial Sequence
  derived and/or modified sequence
MAAMSLLRRVSVTAVAALSGRPLGTRLGFGGFLTRGFPKAAAPVRHSGDHGKRLFVIRPSRFYDRRFLKLLRFYIALTGIPVAIFITLVNVFIGQAELAEIPEGYVPEHWEYYKHPISRWIARNFYDSPEKIYERTMAVLQIEAEKAELRVKELEVRKLMHVRGDGPWYYYETIDKELIDHSPKATPDN

SEQ ID NO: 129193 - DNA, 570 bp, Artificial Sequence
  derived and/or modified sequence
atggccgccatgagcctgctgagaagagtgagcgtgaccgccgtggccgccctgagcggcagacccctgggcaccagactgggcttcggcggcttcctgaccagaggcttccccaaggccgccgcccccgtgagacacagcggcgaccacggcaagagactgttcgtgatcagacccagcagattctacgacagaagattcctgaagctgctgagattctacatcgccctgaccggcatccccgtggccatcttcatcaccctggtgaacgtgttcatcggccaggccgagctggccgagatccccgagggctacgtgcccgagcactgggagtactacaagcaccccatcagcagatggatcgccagaaacttctacgacagccccgagaagatctacgagagaaccatggccgtgctgcagatcgaggccgagaaggccgagctgagagtgaaggagctggaggtgagaaagctgatgcacgtgagaggcgacggcccctggtactactacgagaccatcgacaaggagctgatcgaccacagccccaaggccacccccgacaactag

SEQ ID NO: 129194 - DNA, 570 bp, Artificial Sequence
  derived and/or modified sequence
atggctgcaatgagcctgctgaggagagtaagcgtgactgccgtggcagccctgtccggccgcccgctgggtacgagactgggattcggcggatttctgaccagaggtttccctaaggccgccgcgcctgtaaggcactctggcgatcacggcaagaggttgttcgtgatcagaccaagccggttttatgatagaagattcctcaaactactgaggttttacatcgctctgaccgggattccagtcgctatttttataaccctcgtgaatgttttcataggccaggccgagctggccgaaattcccgagggctacgtccccgaacactgggaatattataaacaccccatatccagatggatagctcggaacttttacgactctcccgagaagatctatgaacggaccatggccgtgctccaaatcgaggcagagaaggccgaattgcgagtgaaggagctggaagttcgcaaactaatgcacgtccggggcgatggcccatggtattactacgagacgatagataaagaattaatcgatcatagtcccaaggccacaccagataactag

SEQ ID NO: 129195 - DNA, 570 bp, Artificial Sequence
  derived and/or modified sequence
atggccgccatgagcctgctgcggcgggtgtctgtgacagctgtggccgccctgagcggccggcccctgggcacccggctgggctttggaggcttcctgacccggggcttccccaaggctgctgcccctgtgcgccacagcggggaccacggcaagaggctgtttgtgatccggcccagccgcttctatgaccggcgcttcctgaagctgctgcgcttctacatcgccctgaccggcatccctgtggccatcttcatcaccctggtgaatgtgttcatcggccaggccgagctggccgagatccctgagggctacgtgcctgagcactgggagtactacaagcaccccatcagccgctggatcgccaggaacttctatgacagccctgagaagatctatgaaagaaccatggctgtgctgcagatcgaggccgagaaggccgagctgcgggtgaaggagctggaggtgaggaagctgatgcacgtgagaggagatggcccctggtactactatgagaccatcgacaaggagctgattgaccacagccccaaggccaccccagacaactag

SEQ ID NO: 129196 - DNA, 684 bp, Artificial Sequence
  derived and/or modified sequence
attccagtagcaattttcataactctggtgaatgtattcattggtcaagctgaactagcagaaattccagaaggctatgtcccagaacactgggaatattataagggtaaaggagctggaagtgcgaaaattgatgcatgtgagaggagatggaccctggtattactatgagacaattgacaaggaacttattgatcattctccgaaagcaactcctgacaattaagcatttttttctccaaatacaaagtatattctctttattggaaaataaattaataaatatattctgtatttttgctctccgtgaaaaacaaaagagcctctgacattactgtctctcagtgttggttcagattgaggcttttgtttgaggagtttggcttccagtccccaaagaaggtttaaaatgtactaataaaaactggagaaataggaatttgtgaactcctaaaattgtagcaactttgaaaggttagtgttttatttacctgacaaatggaagttatagaagtctaataatgttaagcaccagtaattatagtattttgtacaaatgcctgtactgtagatgtctgtattattgaggggcaactcaggattttaagttccataaagtattgaaccaactctaaaatgttaactccttaataaacagattctcagtaaacaaattttaaagtt

SEQ ID NO: 129197 - DNA, 1141 bp, Artificial Sequence
  derived and/or modified sequence
atagaaaacttgccctcacttaagatggccacatcctgcctttgtcctcattggtaaattggctctctcagcttccgtgacccgcctcccttcttcctcctgcccgtagtagccatggcggccatgagtttgttgcggcgggtttcggttactgcggtggcagctctgtctggccggccccttggcactcgcctcggatttgggggcttcctcactcgtggctttccgaaggctgctgctcctgttcgacacagtggagaccatgggaaaagactatttgtcatcagaccttctagattctatgacaggcgttttttgaagttattgagattctacattgcattgactgggattccagtagcaattttcataactctggtgaatgtattcattggtcaagctgaactagcagaaattccagaaggctatgtcccagaacactgggaatattataagcatcccatatcaagatggattgcccgtaatttctatgatagtcctgaaaagatatatgaaagaacaatggccgtccttcagattgaagctgaaaaggctgaattacgggtaaaggagctggaagtgcgaaaattgatgcatgtgagaggagatggaccctggtattactatgagacaattgacaaggaacttattgatcattctccgaaagcaactcctgacaattaagcatttttttctccaaatacaaagtatattctctttattggaaaataaattaataaatatattctgtatttttgctctccgtgaaaaacaaaagagcctctgacattactgtctctcagtgttggttcagattgaggcttttgtttgaggagtttggcttccagtccccaaagaaggtttaaaatgtactaataaaaactggagaaataggaatttgtgaactcctaaaattgtagcaactttgaaaggttagtgttttatttacctgacaaatggaagttatagaagtctaataatgttaagcaccagtaattatagtattttgtacaaatgcctgtactgtagatgtctgtattattgaggggcaactcaggattttaagttccataaagtattgaaccaactctaaaatgttaactccttaataaacagattctcagtaaacaaattttaaagt

SEQ ID NO: 129198 - DNA, 570 bp, Artificial Sequence
  derived and/or modified sequence
atggccgccatgagcctgctgcggcgggtgagcgtgaccgccgtggccgcactctccggtcggcctttgggaacccggctcggcttcgggggctttttaacaagaggctttccgaaggccgcagctcccgtgcgccacagtggggatcacggcaaacgtctgttcgtcatcagaccaagccgattttacgatcgccgttttcttaaactcctcagattttacatcgctctgactggcatccccgtggccatttttattaccttagtaaatgtgttcattgggcaagccgagctggcagagatcccagaggggtacgtgcctgaacactgggagtattataagcaccctatcagtcggtggatcgccagaaacttttacgacagtcccgagaagatctatgagagaacaatggccgtgctccagatagaagcagagaaggcagaactgcgtgtgaaggagctggaagttagaaagttaatgcacgttaggggcgacggtccttggtactactatgagactatagacaaggaactcatcgatcacagtccaaaggctacccccgataactag

SEQ ID NO: 129199 - DNA, 570 bp, Artificial Sequence
  derived and/or modified sequence
atggccgcaatgtccctgctgagacgcgtgagcgtgacagcggtggccgctctgtccggcaggcctctgggcactcggttggggtttggtggcttcctcacccggggattccccaaggctgccgcaccagtgcgccacagtggcgaccacggtaaacggttatttgtaattaggccttctaggttctacgatcgcagatttcttaaactcctgcgtttttacattgcgcttacagggattccagtggctatatttattacactggtgaacgttttcattggccaggctgagctcgccgaaataccagaaggctacgtacccgagcactgggagtactataagcatcccatctccagatggatcgcccgaaacttctatgatagccccgaaaaaatttatgagagaacaatggccgtcctgcagatcgaggctgaaaaagcagagttgcgggtaaaagagctggaagtacgcaaacttatgcatgtcaggggagacggtccatggtactactacgagaccattgataaggagctgatagaccatagccctaaggccacaccagacaattag

SEQ ID NO: 129200 - protein, 128 aa, Artificial Sequence
  derived and/or modified sequence
MTGYTPDEKLRLQQLRELRRRWLKDQELSPREPVLPPQKMGPMEKFWNKFLENKSPWRKMVHGVYKKSIFVFTHVLVPVWIIHYYMKYHVSEKPYGIVEKKSRIFPGDTILETGEVIPPMKEFPDQHH

SEQ ID NO: 129201 - DNA, 387 bp, Artificial Sequence
  derived and/or modified sequence
atgaccggctacacccccgacgagaagctgagactgcagcagctgagagagctgagaagaagatggctgaaggaccaggagctgagccccagagagcccgtgctgcccccccagaagatgggccccatggagaagttctggaacaagttcctggagaacaagagcccctggagaaagatggtgcacggcgtgtacaagaagagcatcttcgtgttcacccacgtgctggtgcccgtgtggatcatccactactacatgaagtaccacgtgagcgagaagccctacggcatcgtggagaagaagagcagaatcttccccggcgacaccatcctggagaccggcgaggtgatcccccccatgaaggagttccccgaccagcaccactag

SEQ ID NO: 129202 - DNA, 387 bp, Artificial Sequence
  derived and/or modified sequence
atgacaggctacactcccgacgaaaaacttagactgcagcagcttcgcgagctgcgaagacgctggctgaaagatcaggaactgtctccgcgggaaccagtgctgcctccacagaaaatgggtccaatggagaaattctggaacaaattcctggagaataaatcgccatggcggaaaatggttcatggcgtctacaagaaatccatcttcgtttttactcacgttttggtccccgtctggattatacactattacatgaaatatcatgtgagtgagaagccttatggaatcgtggaaaagaagagtaggatctttcccggtgacactatactggagacaggtgaagtcattccacctatgaaggagttcccagatcagcaccattag

SEQ ID NO: 129203 - DNA, 387 bp, Artificial Sequence
  derived and/or modified sequence
atgacaggctacaccccagatgagaagctgcggctgcagcagctgcgggagctgcggcggcgctggctgaaggaccaggagctgagcccccgggagcctgtgctgcccccccagaagatgggccccatggagaagttctggaacaagttcctggagaacaagagcccctggaggaagatggtgcacggcgtgtacaagaagagcatctttgtgttcacccacgtgctggtgcctgtgtggatcatccactactacatgaagtaccacgtgtctgagaagccctatggaattgtggagaagaagagccgcatcttccctggggacaccatcctggagactggagaggtgatcccccccatgaaggagttcccagaccagcaccactag

SEQ ID NO: 129204 - DNA, 387 bp, Artificial Sequence
  derived and/or modified sequence
atgaccggctacacccccgacgagaagctgcggctgcagcagctgagggagctacggcggcggtggcttaaagaccaagagctctcccctcgcgaacccgtgctgcctccccaaaaaatgggacccatggagaagttttggaataaatttctggaaaacaagtctccctggcgcaagatggtgcatggtgtctataaaaagagcatcttcgtcttcacccatgtcctggtccctgtgtggattatccactactatatgaaataccacgtgtcggagaaaccttatggtattgtcgagaaaaaatctaggatctttcctggggatactattctggaaacaggcgaagtaattcctccaatgaaagagtttccagatcagcaccattag

SEQ ID NO: 129205 - DNA, 1366 bp, Artificial Sequence
  derived and/or modified sequence
ggcgttcccgcaaggtcgctttgcagagcgggagcgcgcttaagtaactagtccgtagttcgagggtgcgccgtgtccttttgcgttggtaccagcggcgacatgacggggtacactccggatgagaaactgcggctgcagcagctgcgagagctgagaaggcgatggctgaaggaccaggagctgagccctcgggagccggtgctgcccccacagaagatggggcctatggagaaattctggaataaatttttggagaataaatccccttggaggaaaatggtccatggggtatacaaaaagagtatctttgttttcactcatgtacttgtacctgtctggattattcattattacatgaagtatcatgtttctgaaaaaccatatggcatagttgaaaagaagtccagaatattccctggtgatacaattctggagactggagaagtaattccaccaatgaaagaatttcctgatcaacatcattaaagattatgtaaaaagttaaaaggcttatgagcctaagtttgttcctatattaccatatttactgaattttctggaaaagtaactttaataaagtttaatctcagaaattgtcatatctgttttcaagcattgtacaatttgagactgagtaatttaacaataagtaaaaagtggacatgctaaacaaatatgagagactacctactttttctggtcattcttgacttggaaaacggtatggaaaagtatttagttacatgtttgtttgtttttttcttacacagtacttacactaatttggtatcagggtatgcaacagtgaaatatcacaataaacaaatgtaagaacagcaattccatgcacttttgttttaaggaaatctttccggccaggcgcagtggctcatgcctgtaatcccagcactttgggaggccgaggcgggcagatcacgaagtcaggagatcgagaccatcatggctaacacagtgaaaccccgtccctactaaaaatacaaaaaaattagccgggcgtggtggcgggctcctgtagtcccagctactgcggaggctgaggcacgagattggtgtgaacccagaaggcggagcttgcagtaagccgagatagtgccactgagcctgggcgacagagcaagactccgtctcaaaaaaaaaaaaagctttccgaatcatttttgaagaatttagaaacttgattgaaaagcttattccaactatgatctgacactcaagactgtcagatttaggttgctgttaattttgtcatgagaatgtaaaatactaaaatctctaagtgaaaaatttgcatactagtgcttgttataaaggataatgcaaaaataaacttgggaactttgca

SEQ ID NO: 129206 - DNA, 387 bp, Artificial Sequence
  derived and/or modified sequence
atgactgggtacacaccagacgagaagctccggctgcagcagcttagagaacttagacggagatggctgaaggatcaagaactctcacctcgggagccggtactgccccctcagaagatgggcccaatggaaaagttctggaacaaattcctggagaataagtctccatggcggaagatggttcacggggtgtataaaaaatctatctttgtttttacccacgtcctggtacctgtgtggattattcactactatatgaaataccacgtctctgaaaagccctatgggatcgtcgagaagaaaagcaggatatttcccggagacaccatcctggaaactggggaggtgattccccctatgaaagagttcccagatcagcatcactag

SEQ ID NO: 129207 - protein, 175 aa, Artificial Sequence
  derived and/or modified sequence
MAAVSMSVVLRQTLWRRRAVAVAALSVSRVPTRSLRTSTWRLAQDQTQDTQLITVDEKLDITTLTGVPEEHIKTRKVRIFVPARNNMQSGVNNTKKWKMEFDTRERWENPLMGWASTADPLSNMVLTFSTKEDAVSFAEKNGWSYDIEERKVPKPKSKSYGANFSWNKRTRVSTK

SEQ ID NO: 129208 - DNA, 528 bp, Artificial Sequence
  derived and/or modified sequence
atggccgcagtctccatgtccgtggtccttcggcagacactatggcggagacgggcagtggctgtcgccgccctgagcgtctcgcgtgtccccactagatcccttcgaacatcaacgtggaggcttgcacaggaccagacacaggacacgcagctgattaccgtggacgaaaaactggatatcacaaccctgacaggagtccctgaggagcacattaagacgagaaaagttcgcatttttgtcccagctagaaacaacatgcagtctggcgtcaataacacgaagaaatggaaaatggagtttgatactcgggaaaggtgggagaaccccctgatgggatgggcttctacagcagacccactgagcaatatggtgctgaccttttcaaccaaggaagacgcagtttcgttcgctgaaaagaacggctggtcttatgatatcgaggaaaggaaggtccctaaacctaagagcaagtcttacggggctaatttctcatggaataagcgcacccgagtcagtactaaatag

SEQ ID NO: 129209 - DNA, 528 bp, Artificial Sequence
  derived and/or modified sequence
atggctgctgtgtccatgtctgtggtgctgcggcagaccctgtggaggagaagagctgtggccgtggccgccctgtctgtgtcccgggtgcccaccaggagcctgcggaccagcacctggaggctggcccaggaccagacccaggacacccagctgatcaccgtggatgagaagctggacatcaccaccctgactggagtgcctgaggagcacatcaagaccaggaaggtgcgcatctttgtgcctgccaggaacaacatgcagagcggcgtgaacaacaccaagaagtggaagatggagtttgacacccgggagcgctgggagaaccccctgatgggctgggccagcacagctgaccccctgagcaacatggtgctgaccttcagcaccaaggaggatgctgtgtcctttgctgagaagaatggctggagctatgacatcgaggagaggaaggtgcccaagcccaagagcaagagctatggagccaacttctcctggaacaagaggaccagggtgtccaccaagtag

SEQ ID NO: 129210 - DNA, 673 bp, Artificial Sequence
  derived and/or modified sequence
tttcatcctggcgtttgcctgcagcaagatggcggcggtgtcaatgtcagtggtactgaggcagacgttgtggcggagaagggcagtggctgtagctgccctttccgtttccagggttccgaccaggtcgttgaggacttccacatggagattggcacaggaccagactcaagacacacaactcataacagttgatgaaaaattggatatcactactttaactggagttccagaagagcatataaaaactagaaaagtcaggatctttgttcctgctcgcaataacatgcagtctggagtaaacaacacaaagaaatggaagatggagtttgataccagagagcgatgggaaaatcctttgatgggttgggcatcaacggctgatcccttatccaacatggttctaaccttcagtactaaagaagatgcagtttcctttgcagaaaaaaatggatggagctatgacattgaagagaggaaggttccaaaacccaagtccaagtcttatggtgcaaacttttcttggaacaaaagaacaagagtatccacaaaataggttggcactgactatatctctgcttgactgtgaataaagtcagctgtgcagtatttatagtccatgtataataaatacatctcttaatctcctaataaattggacctttaaactaca

SEQ ID NO: 129211 - DNA, 528 bp, Artificial Sequence
  derived and/or modified sequence
atggccgccgtgagcatgagcgtggtgctgcggcagaccctgtggaggagacgagccgtggccgtggccgcactgtccgtcagtagggtgccaactcggtctttacggacctcgacttggagactggcacaggatcaaacccaggatacccaacttattaccgtcgacgagaaactggacatcaccacacttactggcgtgcctgaggaacacataaaaacaagaaaggtacggattttcgttcccgctagaaataacatgcagagcggggtgaataacaccaagaaatggaaaatggagtttgacacccgcgaacgctgggagaatcccctgatgggttgggccagcaccgcagaccctctttctaacatggttctcaccttttctactaaagaagatgctgttagtttcgctgaaaagaacgggtggtcatacgacatagaagagaggaaggtgccaaagcctaagtccaagtcttatggggccaacttctcttggaataagaggactcgcgtgagcacaaaatag

SEQ ID NO: 129212 - DNA, 528 bp, Artificial Sequence
  derived and/or modified sequence
atggcggctgtgtccatgtcagtggtactcaggcagaccctctggcgccgtcgagccgtcgcagtggccgcattgagcgtgtcacgcgttcccacgagatctctacgcacaagtacctggcggttggcacaagaccagacacaggatacccaacttatcacagtggacgagaaattggacattaccacactcacaggcgttcctgaggagcacatcaaaacccgcaaggtgcgaatctttgtgccggctcgtaacaatatgcagtctggcgttaacaacaccaaaaagtggaagatggaattcgataccagagaaaggtgggaaaatccactgatggggtgggccagtaccgctgatcccctctccaacatggtgcttacattctctaccaaagaagatgctgtgtccttcgcagagaagaacggatggtcttatgacattgaagaacgtaaagtgcccaagccaaaaagcaagagctatggcgctaacttttcttggaacaagcgcacccgcgtgtcaaccaaatag

SEQ ID NO: 129213 - DNA, 528 bp, Artificial Sequence
  derived and/or modified sequence
atggccgccgtgagcatgagcgtggtgctgagacagaccctgtggagaagaagagccgtggccgtggccgccctgagcgtgagcagagtgcccaccagaagcctgagaaccagcacctggagactggcccaggaccagacccaggacacccagctgatcaccgtggacgagaagctggacatcaccaccctgaccggcgtgcccgaggagcacatcaagaccagaaaggtgagaatcttcgtgcccgccagaaacaacatgcagagcggcgtgaacaacaccaagaagtggaagatggagttcgacaccagagagagatgggagaaccccctgatgggctgggccagcaccgccgaccccctgagcaacatggtgctgaccttcagcaccaaggaggacgccgtgagcttcgccgagaagaacggctggagctacgacatcgaggagagaaaggtgcccaagcccaagagcaagagctacggcgccaacttcagctggaacaagagaaccagagtgagcaccaagtag

SEQ ID NO: 129214 - protein, 210 aa, Artificial Sequence
  derived and/or modified sequence
MRCLTTPMLLRALAQAARAGPPGGRSLHSSAVAATYKYVNMQDPEMDMKSVTDRAARTLLWTELFRGLGMTLSYLFREPATINYPFEKGPLSPRFRGEHALRRYPSGEERCIACKLCEAICPAQAITIEAEPRADGSRRTTRYDIDMTKCIYCGFCQEACPVDAIVEGPNFEFSTETHEELLYNKEKLLNNGDKWEAEIAANIQADYLYR

SEQ ID NO: 129215 - protein, 124 aa, Artificial Sequence
  derived and/or modified sequence
MRCLTTPMLLRALAQAARAGPPGGRSLHSSAVAATYKYVNMQDPEMDMKSVTDRAARTLLWTELFRGLGMTLSYLFREPATINYPFEKGPLSPRFRGEHALRRYPSGEERCIACKLCEAICPAQ

SEQ ID NO: 129216 - protein, 110 aa, Artificial Sequence
  derived and/or modified sequence
MRCLTTPMLLRALAQAARAGPPGGRSLHSSAVAATYKYVNMQDPEMDMKSVTDRAARTLLWTELFRGLGMTLSYLFREPATINYPFEKGPLSPRFRGEHALRRYPSGEER

SEQ ID NO: 129217 - protein, 184 aa, Artificial Sequence
  derived and/or modified sequence
MRCLTTPMLLRALAQAARAGPPGGRSLHSSAVAATYKYVNMQDPEMDMKSVTDRAARTLLWTELFRGLGMTLSYLFREPATINYPFEKGPLSPRFRGEHALRRYPSGEERCIACKLCEAICPAQAITIEAEPRADGSRRTTRYDIDMTKCIYCGFCQEACPVDAIVEGPNFEFSTETHEELLYN

SEQ ID NO: 129218 - protein, 64 aa, Artificial Sequence
  derived and/or modified sequence
MTKCIYCGFCQEACPVDAIVEGPNFEFSTETHEELLYNKEKLLNNGDKWEAEIAANIQADYLYR

SEQ ID NO: 129219 - DNA, 633 bp, Artificial Sequence
  derived and/or modified sequence
atgagatgcttgacgacccctatgctgcttcgtgccttagctcaggccgccagagcaggcccccctggaggccggagtctgcattccagcgcggtggctgccacctacaaatacgtcaacatgcaggatcctgagatggatatgaagagtgttactgaccgcgctgcacggaccttactgtggacagaactgtttcgaggcctgggaatgactctcagctacctgttccgggaaccagctactataaactatcctttcgaaaagggacccctgagtcctcgctttaggggtgagcacgccctccggcggtatccttccggggaagagcgatgcattgcttgcaaactctgcgaggcaatttgtccagctcaggccattactatcgaggcagaaccgagggctgatggctcacggcgcaccacgaggtacgatattgatatgactaaatgcatctattgcggcttttgtcaagaagcatgcccagttgatgccattgtggaggggccaaacttcgaattctctacagagacccatgaggagctactgtacaataaagagaagctgcttaataacggggataaatgggaggctgaaatcgcagctaatattcaggccgattacctgtacagatag

SEQ ID NO: 129220 - DNA, 375 bp, Artificial Sequence
  derived and/or modified sequence
atgcgatgtctgacgacccccatgctgctgagagcccttgcccaggcggccagggccggcccccccggtggaaggtccctacactcttctgccgtcgccgccacatacaaatacgtgaatatgcaggacccggaaatggacatgaagtctgtaaccgatcgtgcggctcgtacactgttgtggactgaactgtttagagggcttggcatgacgttaagttatctctttagagaacctgccactatcaactatccgtttgaaaagggtccactttccccacgcttccggggagagcacgccctgcggcggtatcccagcggggaggagcgctgtatcgcatgtaagttatgcgaagccatatgtccagcccagtag

SEQ ID NO: 129221 - DNA, 333 bp, Artificial Sequence
  derived and/or modified sequence
atgcggtgcctgacgacccctatgctgcttcgggcactggcccaggccgctcgggctggcccaccagggggacggtcattgcactcatcagcagtagcagctacctacaaatatgtcaatatgcaggaccctgagatggacatgaaatctgttaccgaccgagcagctcgaactttgctgtggacggagttgtttagaggtttaggcatgaccctctcttatctattccgcgagccagctacaattaactatccttttgagaaaggacccttgtcacctcgatttcgcggagaacacgccctccgcagatacccctccggtgaggagcgctag

SEQ ID NO: 129222 - DNA, 555 bp, Artificial Sequence
  derived and/or modified sequence
atgagatgcttgaccactcctatgctgttaagagccctggctcaggccgcgcgagcaggccccccaggtggacggtcgttgcactcaagtgccgtagccgcaacatataagtatgttaatatgcaggatccagagatggacatgaaatctgttactgaccgggctgcacgcacccttttgtggactgagctgtttaggggcctcggcatgacactttcctacctttttcgagaacccgccacaatcaactacccgttcgagaaaggtcccctgtcgccaagattcagaggcgagcacgccttaagacgttacccctcaggggaagaacggtgtatagcttgcaaattgtgtgaggcaatatgtccggcacaggccatcactatcgaagctgagcctagggctgacggctctagacggaccactaggtacgatatcgacatgaccaaatgtatctattgtggattttgtcaggaggcttgcccggtggacgcaatagtcgaaggccccaatttcgaattctctacggagacacacgaggagctcctttacaattag

SEQ ID NO: 129223 - DNA, 633 bp, Artificial Sequence
  derived and/or modified sequence
atgcgctgcctgaccacccccatgctgctgcgggccctggcccaggccgcccgggccggccccccaggcggccgcagcctgcacagcagcgctgtggccgccacctacaagtatgtgaacatgcaggaccctgagatggacatgaagtctgtgacagacagagctgcccggaccctgctgtggacagagctgttccggggcctgggcatgaccctgagctacctgttccgggagcccgccaccatcaactacccctttgagaagggccccctgagcccccgcttccggggggagcacgccctgcggcgctaccccagcggggaggagcgctgcatcgcctgcaagctgtgtgaggccatctgcccagcccaggccatcaccatcgaggccgagcccagggcagatggcagcaggaggaccaccaggtatgacatcgacatgaccaagtgcatctactgcggcttctgccaggaggcctgccctgtggatgccatcgtggagggccccaactttgagttcagcacagagacccatgaggagctgctgtacaacaaggagaagctgctgaacaatggagacaagtgggaggccgagattgctgccaacatccaggccgactacctgtacagatag

SEQ ID NO: 129224 - DNA, 375 bp, Artificial Sequence
  derived and/or modified sequence
atgcgctgcctgaccacccccatgctgctgcgggccctggcccaggccgcccgggccggccccccaggcggccgcagcctgcacagcagcgctgtggccgccacctacaagtatgtgaacatgcaggaccctgagatggacatgaagtctgtgacagacagagctgcccggaccctgctgtggacagagctgttccggggcctgggcatgaccctgagctacctgttccgggagcccgccaccatcaactacccctttgagaagggccccctgagcccccgcttccggggggagcacgccctgcggcgctaccccagcggggaggagcgctgcatcgcctgcaagctgtgtgaggccatctgcccagcccagtag

SEQ ID NO: 129225 - DNA, 333 bp, Artificial Sequence
  derived and/or modified sequence
atgcgctgcctgaccacccccatgctgctgcgggccctggcccaggccgcccgggccggccccccaggcggccgcagcctgcacagcagcgctgtggccgccacctacaagtatgtgaacatgcaggaccctgagatggacatgaagtctgtgacagacagagctgcccggaccctgctgtggacagagctgttccggggcctgggcatgaccctgagctacctgttccgggagcccgccaccatcaactacccctttgagaagggccccctgagcccccgcttccggggggagcacgccctgcggcgctaccccagcggggaggagaggtag

SEQ ID NO: 129226 - DNA, 555 bp, Artificial Sequence
  derived and/or modified sequence
atgcgctgcctgaccacccccatgctgctgcgggccctggcccaggccgcccgggccggccccccaggcggccgcagcctgcacagcagcgctgtggccgccacctacaagtatgtgaacatgcaggaccctgagatggacatgaagtctgtgacagacagagctgcccggaccctgctgtggacagagctgttccggggcctgggcatgaccctgagctacctgttccgggagcccgccaccatcaactacccctttgagaagggccccctgagcccccgcttccggggggagcacgccctgcggcgctaccccagcggggaggagcgctgcatcgcctgcaagctgtgtgaggccatctgcccagcccaggccatcaccatcgaggccgagcccagggcagatggcagcaggaggaccaccaggtatgacatcgacatgaccaagtgcatctactgcggcttctgccaggaggcctgccctgtggatgccatcgtggagggccccaactttgagttcagcacagagacccatgaggagctgctgtacaactag

SEQ ID NO: 129227 - DNA, 791 bp, Artificial Sequence
  derived and/or modified sequence
acagaaaagggggaacccgctggcccaatggcagcgtcctacagtgtagcctccgcctcccgattgactggcctgcttggcaaggcaagtagcggcggcgcttcaagatgcgctgcctgaccacgcctatgctgctgcgggccctggcccaggctgcacgtgcaggacctcctggtggccggagcctccacagcagtgcagtggcagccacctacaagtatgtgaacatgcaggatcccgagatggacatgaagtcagtgactgaccgggcagcccgcaccctgctgtggactgagctcttccgaggcctgggcatgaccctgagctacctgttccgggaaccggccaccatcaactacccgttcgagaagggcccgctgagccctcgcttccgtggggagcatgcgctgcgccggtacccatccggggaggagcgttgcattgcctgcaagctctgcgaggccatctgccccgcccaggccatcaccatcgaggctgagccaagagctgatggcagccgccggaccacccgctatgacatcgacatgaccaagtgcatctactgcggcttctgccaggaggcctgtcccgtggatgccatcgtcgagggccccaactttgagttctccacggagacccatgaggagctgctgtacaacaaggagaagttgctcaacaacggggacaagtgggaggccgagatcgccgccaacatccaggctgactacttgtatcggtgacgccccaccggcccgcagcccctgctgcccaataaaaccactccgacccca

SEQ ID NO: 129228 - DNA, 620 bp, Artificial Sequence
  derived and/or modified sequence
ctacagtgtagcctccgcctcccgattgactggcctgcttggcaaggcaagtagcggcggcgcttcaagggacggggttccaccatgttagccaggctggtctcaaactcctgacctcaggtgatccacctgcctcagcctcccaaagtgctgggattacaggcgtgagccaccacacccagccctagcgagtcactcaacaaactgagtcccagcgccttatttgtgcctccctcgtggagtccttatgcgctgcctgaccacgcctatgctgctgcgggccctggcccaggctgcacgtgcaggacctcctggtggccggagcctccacagcagtgcagtggcagccacctacaagtatgtgaacatgcaggatcccgagatggacatgaagtcagtgactgaccgggcagcccgcaccctgctgtggactgagctcttccgaggcctgggcatgaccctgagctacctgttccgggaaccggccaccatcaactacccgttcgagaagggcccgctgagccctcgcttccgtggggagcatgcgctgcgccggtacccatccggggaggagcgttgcattgcctgcaagctctgcgaggccatctgccccgcccagg

SEQ ID NO: 129229 - DNA, 515 bp, Artificial Sequence
  derived and/or modified sequence
ggaaggtgctgggttgggtccctggaactgcagtcagtgatccaaaggagtgggcctgttagggggttcacaggtcgtgggatgagctcttatgagcgccggctaagtgccgggctctggggtgcccttggcatgtacgggctcccctaattcccaagaccaaccgcccccaacccacttcatagatgcgctgcctgaccacgcctatgctgctgcgggccctggcccaggctgcacgtgcaggacctcctggtggccggagcctccacagcagtgcagtggcagccacctacaagtatgtgaacatgcaggatcccgagatggacatgaagtcagtgactgaccgggcagcccgcaccctgctgtggactgagctcttccgaggcctgggcatgaccctgagctacctgttccgggaaccggccaccatcaactacccgttcgagaagggcccgctgagccctcgcttccgtggggagcatgcgctgcgccggtacccatccggggaggagcgt

SEQ ID NO: 129230 - DNA, 689 bp, Artificial Sequence
  derived and/or modified sequence
cacgttttggccgtgaaagtcgggcttgggcagcgtggcgtcgggggcgagtgtggtgtccccgttggcgccgccagctctgcgcctgggcttcccctcggctcactcaggatccgcggcctccgtgtccttcagatgcgctgcctgaccacgcctatgctgctgcgggccctggcccaggctgcacgtgcaggacctcctggtggccggagcctccacagcagtgcagtggcagccacctacaagtatgtgaacatgcaggatcccgagatggacatgaagtcagtgactgaccgggcagcccgcaccctgctgtggactgagctcttccgaggcctgggcatgaccctgagctacctgttccgggaaccggccaccatcaactacccgttcgagaagggcccgctgagccctcgcttccgtggggagcatgcgctgcgccggtacccatccggggaggagcgttgcattgcctgcaagctctgcgaggccatctgccccgcccaggccatcaccatcgaggctgagccaagagctgatggcagccgccggaccacccgctatgacatcgacatgaccaagtgcatctactgcggcttctgccaggaggcctgtcccgtggatgccatcgtcgagggccccaactttgagttctccacggagacccatgaggagctgctgtacaacaa

SEQ ID NO: 129231 - DNA, 633 bp, Artificial Sequence
  derived and/or modified sequence
atgcggtgcctgaccacccccatgctgctgcgggccctggcccaggctgcacgggctgggcctcccggcggtaggtccctgcacagctccgctgttgctgccacatataaatacgtcaacatgcaggatccagagatggacatgaaaagcgtcaccgatagggccgcgcgaaccctcctatggactgagctgtttcgtggtctggggatgactctctcatatctgtttcgagagcccgccaccatcaattaccccttcgaaaaagggccactgagtcctcggttcagaggggagcatgcattacgaagatacccctccggagaggaacgctgcatcgcgtgcaagctttgtgaggccatctgccctgcccaggctatcacaatcgaggctgagcctagggccgatgggtctagacgcacaactaggtacgacattgatatgacaaagtgtatttactgcggattctgtcaggaagcttgtccagttgatgccatcgtggagggtccgaacttcgagttctccactgaaacacacgaagagctcctgtacaacaaggagaaattgctaaacaatggcgataaatgggaggctgagatagccgcgaatattcaggccgactacttatataggtag

SEQ ID NO: 129232 - DNA, 375 bp, Artificial Sequence
  derived and/or modified sequence
atgcggtgcctgaccacccccatgctgctgcgggccctggcccaggccgcccgggcaggacctccgggcgggcgctccctccattcttccgctgtggcggcaacttataagtacgttaacatgcaagatccggagatggacatgaagagcgtgaccgaccgagcggccagaactttgctgtggactgagctgtttaggggattgggcatgactctgtcctatttatttagagagcctgccacaatcaattaccctttcgagaaaggccccctttcacctagattcaggggagagcacgctctgcgaaggtatccaagcggggaggagaggtgcatagcctgtaagttatgtgaagccatttgcccggctcagtag

SEQ ID NO: 129233 - DNA, 333 bp, Artificial Sequence
  derived and/or modified sequence
atgcggtgcctgaccacccccatgctgctgcgggccctggcccaggccgccagagccggaccccctgggggaaggagtctgcacagttctgccgtggccgccacttacaaatacgtgaatatgcaggaccccgagatggacatgaagagtgtgactgatcgcgcagctcgcactctattgtggactgaactattcagaggactgggaatgactctgtcctacctatttagggagcctgctactattaactatccgttcgaaaagggccccctgtcccccagatttcggggagaacacgctctgaggcgatatcccagcggggaggaaagatag

SEQ ID NO: 129234 - DNA, 555 bp, Artificial Sequence
  derived and/or modified sequence
atgcggtgcctgaccacccccatgctgctgcgggccctggcccaggctgcaagagctgggccgcctgggggccggtcattgcatagtagtgctgtcgccgccacatacaagtatgttaatatgcaggatcccgagatggatatgaagtctgtcacagaccgtgcagcgaggacattgctgtggacggagctcttccgcgggctgggcatgacattaagttatttattcagggagcctgccactattaactatcctttcgagaagggtccactttcacctaggttcaggggcgaacacgccctgcgccgatatccatcaggggaggagaggtgcattgcttgtaaactgtgtgaggcgatttgtcctgcacaggctatcactatcgaggcagagccccgggccgacggttccagacgaaccacgagatacgatattgacatgaccaagtgcatctattgcgggttctgccaggaagcctgtcccgtcgatgcaatcgtggagggcccaaatttcgagtttagcacagagacgcacgaggaactgctgtacaattag

SEQ ID NO: 129235 - DNA, 633 bp, Artificial Sequence
  derived and/or modified sequence
atgagatgcttgaccacccccatgttactgcgggctctggctcaggccgctcgcgcagggcctcccggaggacgaagcctgcactcgtctgccgtggccgctacatacaaatacgtcaacatgcaggatcctgaaatggacatgaagagtgtcacagaccgggctgcaagaacactgctgtggaccgagctgtttagggggctcggaatgactttgagttacctctttagggaacctgcaaccatcaattatccctttgagaaggggccactgtctcccagattccgaggggagcatgcactgaggagatatccatctggggaagagagatgcatcgcctgcaagttatgcgaggcaatctgccccgctcaagcaatcacgatcgaagccgaaccccgagccgatggttccaggagaactactagatacgacattgacatgaccaagtgcatctattgtggcttttgtcaggaagcatgtcccgtggatgctatcgtggagggaccgaactttgagtttagcacagaaacccacgaggagttactgtacaacaaggagaagctgctcaataacggcgataagtgggaggcggagattgcagcgaatattcaggcggattacctgtaccgctag

SEQ ID NO: 129236 - DNA, 375 bp, Artificial Sequence
  derived and/or modified sequence
atgcggtgtcttactaccccaatgctgcttcgagctttggctcaagcagctagagccggtcctcctggtggccgaagcctgcacagcagcgccgtagcagctacgtacaagtatgttaacatgcaggatcctgaaatggacatgaagtctgtgactgaccgcgcagcacgaaccctgctgtggacagagctgtttcgtggcctaggcatgacgctgtcatacttgttcagagaacccgctactattaattatcctttcgaaaagggaccactctctcctcgatttcggggagagcatgcccttagaagataccctagcggggaagaacgctgcatcgcctgcaaactctgtgaggctatctgccccgcacagtag

SEQ ID NO: 129237 - DNA, 333 bp, Artificial Sequence
  derived and/or modified sequence
atgcggtgtctgacaacccccatgcttcttcgagcactggctcaggccgcacgtgcaggccctcctgggggacggtctctgcacagtagcgcggtggctgcaacgtataagtacgttaacatgcaggatcccgagatggacatgaaaagcgtgactgatcgcgctgccagaactttgctgtggaccgaattgttcaggggcttaggcatgacactgagttacttgttccgcgagcccgcaactatcaactaccccttcgaaaaagggcctctttccccccgtttccgcggtgaacatgccctgcggagatacccttcaggcgaggagagatag

SEQ ID NO: 129238 - DNA, 555 bp, Artificial Sequence
  derived and/or modified sequence
atgagatgcctaaccacccccatgctgctgagagcacttgcccaggctgccagagctggccctcctggaggaagatctctccatagctccgccgttgccgctacatacaagtacgtaaacatgcaggaccctgagatggacatgaagagcgtaaccgaccgggcagctcggacactcctctggaccgagctgtttcgcggactgggcatgacgctaagttacctgtttcgtgaacctgccactatcaattacccttttgagaaggggccactcagccccagatttagaggcgaacacgcactacgccgatatcccagcggcgaagaaaggtgtattgcttgtaagctctgtgaggcaatttgcccagctcaggcgatcacaatcgaagccgagcctcgcgctgacggttccagacggactacaaggtacgatattgatatgaccaaatgtatctactgtgggttctgccaggaagcatgtcccgtcgatgccattgtggaggggcctaacttcgagtttagtactgaaacacacgaggaacttttgtataattag

SEQ ID NO: 129239 - DNA, 633 bp, Artificial Sequence
  derived and/or modified sequence
atgagatgcctgaccacccccatgctgctgagagccctggcccaggccgccagagccggcccccccggcggcagaagcctgcacagcagcgccgtggccgccacctacaagtacgtgaacatgcaggaccccgagatggacatgaagagcgtgaccgacagagccgccagaaccctgctgtggaccgagctgttcagaggcctgggcatgaccctgagctacctgttcagagagcccgccaccatcaactaccccttcgagaagggccccctgagccccagattcagaggcgagcacgccctgagaagataccccagcggcgaggagagatgcatcgcctgcaagctgtgcgaggccatctgccccgcccaggccatcaccatcgaggccgagcccagagccgacggcagcagaagaaccaccagatacgacatcgacatgaccaagtgcatctactgcggcttctgccaggaggcctgccccgtggacgccatcgtggagggccccaacttcgagttcagcaccgagacccacgaggagctgctgtacaacaaggagaagctgctgaacaacggcgacaagtgggaggccgagatcgccgccaacatccaggccgactacctgtacagatag

SEQ ID NO: 129240 - DNA, 375 bp, Artificial Sequence
  derived and/or modified sequence
atgagatgcctgaccacccccatgctgctgagagccctggcccaggccgccagagccggcccccccggcggcagaagcctgcacagcagcgccgtggccgccacctacaagtacgtgaacatgcaggaccccgagatggacatgaagagcgtgaccgacagagccgccagaaccctgctgtggaccgagctgttcagaggcctgggcatgaccctgagctacctgttcagagagcccgccaccatcaactaccccttcgagaagggccccctgagccccagattcagaggcgagcacgccctgagaagataccccagcggcgaggagagatgcatcgcctgcaagctgtgcgaggccatctgccccgcccagtag

SEQ ID NO: 129241 - DNA, 333 bp, Artificial Sequence
  derived and/or modified sequence
atgagatgcctgaccacccccatgctgctgagagccctggcccaggccgccagagccggcccccccggcggcagaagcctgcacagcagcgccgtggccgccacctacaagtacgtgaacatgcaggaccccgagatggacatgaagagcgtgaccgacagagccgccagaaccctgctgtggaccgagctgttcagaggcctgggcatgaccctgagctacctgttcagagagcccgccaccatcaactaccccttcgagaagggccccctgagccccagattcagaggcgagcacgccctgagaagataccccagcggcgaggagagatag

SEQ ID NO: 129242 - DNA, 555 bp, Artificial Sequence
  derived and/or modified sequence
atgagatgcctgaccacccccatgctgctgagagccctggcccaggccgccagagccggcccccccggcggcagaagcctgcacagcagcgccgtggccgccacctacaagtacgtgaacatgcaggaccccgagatggacatgaagagcgtgaccgacagagccgccagaaccctgctgtggaccgagctgttcagaggcctgggcatgaccctgagctacctgttcagagagcccgccaccatcaactaccccttcgagaagggccccctgagccccagattcagaggcgagcacgccctgagaagataccccagcggcgaggagagatgcatcgcctgcaagctgtgcgaggccatctgccccgcccaggccatcaccatcgaggccgagcccagagccgacggcagcagaagaaccaccagatacgacatcgacatgaccaagtgcatctactgcggcttctgccaggaggcctgccccgtggacgccatcgtggagggccccaacttcgagttcagcaccgagacccacgaggagctgctgtacaactag

SEQ ID NO: 129243 - protein, 445 aa, Artificial Sequence
  derived and/or modified sequence
MPSRAEDYEVLYTIGTGSYGRCQKIRRKSDGKILVWKELDYGSMTEAEKQMLVSEVNLLRELKHPNIVRYYDRIIDRTNTTLYIVMEYCEGGDLASVITKGTKERQYLDEEFVLRVMTQLTLALKECHRRSDGGHTVLHRDLKPANVFLDGKQNVKLGDFGLARILNHDTSFAKTFVGTPYYMSPEQMNRMSYNEKSDIWSLGCLLYELCALMPPFTAFSQKELAGKIREGKFRRIPYRYSDELNEIITRMLNLKDYHRPSVEEILENPLIADLVADEQRRNLERRGRQLGEPEKSQDSSPVLSELKLKEIQLQERERALKAREERLEQKEQELCVRERLAEDKLARAENLLKNYSLLKERKFLSLASNPELLNLPSSVIKKKVHFSGESKENIMRSENSESQLTSKSKCKDLKKRLHAAQLRAQALSDIEKNYQLKSRQILGMR

SEQ ID NO: 129244 - protein, 402 aa, Artificial Sequence
  derived and/or modified sequence
MTEAEKQMLVSEVNLLRELKHPNIVRYYDRIIDRTNTTLYIVMEYCEGGDLASVITKGTKERQYLDEEFVLRVMTQLTLALKECHRRSDGGHTVLHRDLKPANVFLDGKQNVKLGDFGLARILNHDTSFAKTFVGTPYYMSPEQMNRMSYNEKSDIWSLGCLLYELCALMPPFTAFSQKELAGKIREGKFRRIPYRYSDELNEIITRMLNLKDYHRPSVEEILENPLIADLVADEQRRNLERRGRQLGEPEKSQDSSPVLSELKLKEIQLQERERALKAREERLEQKEQELCVRERLAEDKLARAENLLKNYSLLKERKFLSLASNPELLNLPSSVIKKKVHFSGESKENIMRSENSESQLTSKSKCKDLKKRLHAAQLRAQALSDIEKNYQLKSRQILGMR

SEQ ID NO: 129245 - DNA, 1338 bp, Artificial Sequence
  derived and/or modified sequence
atgccctctagggctgaggattacgaagtcttgtatacaattggcacggggagctatggcagatgtcaaaagattaggcgcaaaagtgacggcaaaatcctggtatggaaggagttggactacgggagcatgacagaggcggagaagcagatgctggtgtctgaagtaaatttgctgcgcgagctcaagcaccctaacattgtgagatattacgatcggattattgataggaccaatacaactctgtacattgttatggaatactgcgagggtggcgacttagccagcgtgattaccaagggaacgaaggaacgacagtacctggatgaggagtttgttctacgcgtaatgacccagctgaccctagcactgaaggagtgccacagacgtagcgacggcggccacaccgtcttgcatcgcgacctgaaacccgcgaatgtctttctcgatgggaagcagaatgtcaaactgggagattttgggctcgcccgcatcctgaatcacgatacatcttttgcaaaaacttttgtgggaaccccatactacatgagtcccgagcaaatgaataggatgtcatataacgagaaatctgacatatggtccctggggtgtttgctctacgaattatgtgcactgatgcctccatttaccgcattctcccagaaggaacttgccggcaagattagggaagggaaatttcgccgaatcccctaccgctattctgacgaactgaatgaaatcattactcggatgctgaacctcaaagattatcaccgcccctccgtggaagagatattggagaatccactgattgcagatttggtggcagatgagcagcgcaggaatctggagagacgcggtcggcagctgggcgagcctgagaaaagtcaggattcttcccccgttctaagcgagctgaaactgaaggaaattcagcttcaggagcgtgagagagctctgaaggccagggaagagaggctagagcagaaagaacaagagttgtgtgtgagagaacggcttgcagaagataagctggcaagagcggagaacctgttgaaaaactatagcctgctgaaagaaagaaagtttctctctctagcatccaacccagaactgctgaacctgccctcatctgtgatcaagaagaaagtacatttttccggtgagagcaaagagaacatcatgcggagtgagaattccgaatcacaactcacgagtaaaagcaagtgcaaggatctgaaaaagcgactgcacgcagctcagctgagggcacaagccctgagcgacattgaaaaaaattatcagctcaaatctcggcagattctgggcatgcgatag

SEQ ID NO: 129246 - DNA, 1209 bp, Artificial Sequence
  derived and/or modified sequence
atgactgaagccgaaaagcagatgctggtgagcgaggtcaacctcctgcgtgagcttaaacacccgaatatcgtgagatattacgatcggatcattgacaggacaaacactaccctctatatcgtcatggagtactgcgaaggtggtgatttggcaagcgtcattaccaaaggtaccaaggaacggcagtatctggatgaagagttcgtgctcagagtgatgactcagctaactctggcactcaaggagtgccaccgtaggtctgatggcggccacaccgtgttgcaccgtgaccttaaaccagccaacgtattcctcgacgggaaacagaatgtgaagctgggcgattttggtctcgccaggatccttaaccacgatactagtttcgcgaagaccttcgttggcactccctactacatgtctcctgaacagatgaaccggatgagttataatgagaagtccgacatatggagcctgggttgtctgctttacgagctgtgtgcattaatgccgccattcaccgcattctcgcagaaagaactcgctgggaaaattcgggaagggaaatttaggcgaatcccttaccggtacagcgacgagctgaacgagatcattacacggatgctcaatctgaaagattatcacagaccttccgtggaagagattcttgagaacccattaattgcagacctagtggccgacgagcagcgccgaaatctggaaaggagaggccgacaactgggggagcctgaaaaatcccaggacagctcacctgttctatccgaactcaaattgaaggagattcagttgcaggagcgggagagagccctgaaagccagggaagagagactggagcaaaaggagcaggagctgtgcgttagagagcgcctcgccgaagataaactcgcacgggctgaaaatctcctcaaaaattactcccttctgaaggagcggaagtttttatctctcgcctctaatcccgagttactcaacctgcctagctccgtcattaagaagaaggtccacttcagtggcgaatctaaagagaacattatgagatccgaaaacagcgagagccaactgaccagcaagtcaaagtgtaaggacttgaagaagaggctgcatgccgcacaactgcgtgctcaggccctcagtgatattgaaaaaaactaccaacttaagagccgccagatcctcggtatgaggtag

SEQ ID NO: 129247 - DNA, 1338 bp, Artificial Sequence
  derived and/or modified sequence
atgcccagcagagctgaggactatgaggtgctgtacaccatcggcaccggcagctatggccgctgccagaagatccggaggaagagtgatggcaagatcctggtgtggaaggagctggactatggctccatgacagaagctgagaagcagatgctggtgtctgaggtgaacctgctgcgggagctgaagcaccccaacatcgtgcgctactatgaccgcatcatcgacaggaccaacaccaccctgtacatcgtgatggagtactgtgagggcggggacctggccagcgtcatcaccaagggcaccaaggagcggcagtacctggatgaggagtttgtgctgcgggtgatgacccagctgaccctggccctgaaggagtgccacagaagaagtgatggcggccacacagtgctgcaccgggacctgaagccagccaacgtgttcctggatggcaagcagaatgtgaagctgggggactttggcctggcccgcatcctgaaccacgacaccagctttgccaagacctttgtgggcaccccctactacatgagccctgagcagatgaacaggatgagctacaatgagaagagtgacatctggagcctgggctgcctgctgtatgagctgtgtgccctgatgccacccttcaccgccttcagccagaaggagctggccggcaagatccgggagggcaagttccgccgcatcccctaccgctacagtgatgagctgaatgagatcatcaccaggatgctgaacctgaaggactaccaccggcccagcgtggaggagatcctggagaaccccctgattgctgacctggtggctgatgagcagaggaggaacctggagcggcggggccggcagctgggggagcctgagaagagccaggacagcagccctgtgctgtctgagctgaagctgaaggagatccagctgcaggagcgggagcgggccctgaaggcccgggaggagcggctggagcagaaggagcaggagctgtgtgtgcgggagcggctggccgaggacaagctggcccgggcagagaacctgctgaagaactacagcctgctgaaggagaggaagttcctgagcctggccagcaaccctgagctgctgaacctgcccagcagcgtcatcaagaagaaggtgcacttctctggagagagcaaggagaacatcatgaggtctgagaacagcgagagccagctgaccagcaagagcaagtgcaaggacctgaagaagaggctgcatgctgcccagctgcgggcccaggccctgagtgacatcgagaagaactaccagctgaagagccggcagatcctgggcatgaggtag

SEQ ID NO: 129248 - DNA, 1209 bp, Artificial Sequence
  derived and/or modified sequence
atgacagaggccgagaagcagatgctggtgtctgaggtgaacctgctgcgggagctgaagcaccccaacatcgtgcgctactatgaccgcatcatcgacaggaccaacaccaccctgtacatcgtgatggagtactgtgagggcggggacctggccagcgtcatcaccaagggcaccaaggagcggcagtacctggatgaggagtttgtgctgcgggtgatgacccagctgaccctggccctgaaggagtgccaccggcggagtgatggcggccacacagtgctgcaccgggacctgaagccagccaacgtgttcctggatggcaagcagaatgtgaagctgggggactttggcctggcccgcatcctgaaccacgacaccagctttgccaagacctttgtgggcaccccctactacatgagccctgagcagatgaacaggatgagctacaatgagaagagtgacatctggagcctgggctgcctgctgtatgagctgtgtgccctgatgccacccttcaccgccttcagccagaaggagctggccggcaagatccgggagggcaagttccgccgcatcccctaccgctacagtgatgagctgaatgagatcatcaccaggatgctgaacctgaaggactaccaccggcccagcgtggaggagatcctggagaaccccctgattgctgacctggtggctgatgagcagaggaggaacctggagcggcggggccggcagctgggggagcctgagaagagccaggacagcagccctgtgctgtctgagctgaagctgaaggagatccagctgcaggagcgggagcgggccctgaaggcccgggaggagcggctggagcagaaggagcaggagctgtgtgtgcgggagcggctggccgaggacaagctggcccgggcagagaacctgctgaagaactacagcctgctgaaggagaggaagttcctgagcctggccagcaaccctgagctgctgaacctgcccagcagcgtcatcaagaagaaggtgcacttcagcggggagagcaaagaaaacatcatgagaagtgaaaattctgagagccagctgaccagcaagagcaagtgcaaggacctgaagaagaggctgcacgccgcccagctgcgggcccaggccctgagtgacatcgagaagaactaccagctgaagagccggcagatcctgggcatgaggtag

SEQ ID NO: 129249 - DNA, 1338 bp, Artificial Sequence
  derived and/or modified sequence
atgcccagccgggccgaggactacgaggtgctgtacaccatcggcaccggcagctatgggaggtgtcagaagatccggagaaagtctgatggaaagatcctcgtgtggaaggagctagactacggatctatgaccgaggctgagaaacaaatgctcgtgtccgaggttaatctactaagagaactaaaacatccgaatattgtgcggtactacgatcggattatcgatcgaacaaacaccacactgtatatcgtgatggagtactgtgagggtggtgacctggcctctgtaattacgaagggcaccaaagagaggcagtacctggacgaggaatttgtactccgcgtcatgacccagttaaccctcgcactaaaggagtgtcaccggagatctgacggcgggcatacggttctacatcgtgacctaaaaccagcaaatgtattccttgatggcaagcaaaacgttaaactgggcgattttggcctggcaagaatactgaatcatgacacatcatttgccaaaaccttcgttggcaccccatactacatgtcacccgaacagatgaacagaatgagttacaatgagaaatccgacatctggtccttaggatgtcttctctacgagttatgcgcattgatgcccccattcacagccttctctcaaaaggaactcgcaggcaaaattagagaaggaaagttccgaagaatcccatatcggtattcggatgaactgaatgagattattacccggatgctcaacttaaaagattatcacaggccatctgttgaagaaattctggaaaacccactgattgcagacttggtggctgacgagcaaagacgaaatcttgaaagacgaggaaggcaattaggcgaacccgaaaagtcacaagactcctcccccgtgctctcggagctgaagctaaaagaaattcagttacaggagagagaaagggcattgaaagcgcgcgaggagcgactggagcagaaagaacaggagctctgtgtgagggagagactagcagaagacaagctcgctagggctgaaaacctcttgaagaattactcactgctgaaggaacgcaaatttttgagcctggcatctaaccctgaacttctcaacctacccagcagtgtcataaaaaaaaaagtgcacttttccggcgagtctaaggagaacattatgcggagcgaaaatagcgagtctcagctgacctcaaagtccaaatgtaaggatctgaagaagcgactccacgcagcccaactccgggctcaggccctttctgacattgagaaaaactaccagcttaagagccgacagatcttgggcatgagatag

SEQ ID NO: 129250 - DNA, 1209 bp, Artificial Sequence
  derived and/or modified sequence
atgaccgaggccgagaagcagatgctggtgagcgaggtgaacctgcttcgggaactgaaacaccctaacatcgtgcgctattacgataggattatcgaccgaacaaacacgaccctgtacattgtcatggagtattgtgagggtggagacctggcatcagtcatcactaaggggactaaagagcgacaatatctagacgaggagttcgttttgagagtcatgacacagctgacactcgctctcaaggagtgtcaccgtagatcggacggaggccacacggtgctccacagggatctcaagcctgctaatgtgttcctagacggcaaacaaaacgtaaagctgggcgacttcggcctggcccgtatactgaaccacgacaccagtttcgccaaaacttttgtcggaactccctattacatgtctcctgagcagatgaatcgcatgtcttacaatgagaaatccgacatctggagcttaggctgtttattgtacgagctatgcgcattaatgcccccctttaccgctttcagtcagaaggagcttgctggtaagataagagaggggaaattccggcggattccatatcgatacagtgatgagttgaacgagattattacccggatgctgaacttaaaggattatcatcgaccttccgttgaggagattctggagaaccctttgatagccgacctcgtagccgatgaacagcgaaggaacttagaaaggcggggacgccagctgggtgagccagagaaaagtcaggatagttctcccgtgctaagtgaactgaagttaaaagagatccaactccaggagcgggagagggcattaaaggcacgggaagagcgcctcgagcagaaagagcaagaactgtgcgtgagggaacggttggccgaggacaagctggctagagccgagaacctcctgaaaaattacagcttgctcaaagaacggaagtttttgtccctagcatccaatcctgaacttctcaaccttccaagctctgtgataaagaagaaagtccactttagtggggaatcgaaagaaaacatcatgcgctccgagaattccgaatctcagctcacaagcaagtcaaagtgcaaggacctgaaaaaacgcctgcacgctgcccagctccgcgcgcaagctctgtccgacattgaaaaaaactaccagcttaaaagccgccaaattctggggatgaggtag

SEQ ID NO: 129251 - DNA, 2131 bp, Artificial Sequence
  derived and/or modified sequence
cggggcccaaggcaggggtggcgggtcagtgctgctcgggggcttctccatccaggtccctggagttcctggtccctggagctccgcacttggcggcgcaacctgcgtgaggcagcgcgactctggcgactggccggccatgccttcccgggctgaggactatgaagtgttgtacaccattggcacaggctcctacggccgctgccagaagatccggaggaagagtgatggcaagatattagtttggaaagaacttgactatggctccatgacagaagctgagaaacagatgcttgtttctgaagtgaatttgcttcgtgaactgaaacatccaaacatcgttcgttactatgatcggattattgaccggaccaatacaacactgtacattgtaatggaatattgtgaaggaggggatctggctagtgtaattacaaagggaaccaaggaaaggcaatacttagatgaagagtttgttcttcgagtgatgactcagttgactctggccctgaaggaatgccacagacgaagtgatggtggtcataccgtattgcatcgggatctgaaaccagccaatgttttcctggatggcaagcaaaacgtcaagcttggagactttgggctagctagaatattaaaccatgacacgagttttgcaaaaacatttgttggcacaccttattacatgtctcctgaacaaatgaatcgcatgtcctacaatgagaaatcagatatctggtcattgggctgcttgctgtatgagttatgtgcattaatgcctccatttacagcttttagccagaaagaactcgctgggaaaatcagagaaggcaaattcaggcgaattccataccgttactctgatgaattgaatgaaattattacgaggatgttaaacttaaaggattaccatcgaccttctgttgaagaaattcttgagaaccctttaatagcagatttggttgcagacgagcaaagaagaaatcttgagagaagagggcgacaattaggagagccagaaaaatcgcaggattccagccctgtattgagtgagctgaaactgaaggaaattcagttacaggagcgagagcgagctctcaaagcaagagaagaaagattggagcagaaagaacaggagctttgtgttcgtgagagactagcagaggacaaactggctagagcagaaaatctgttgaagaactacagcttgctaaaggaacggaagttcctgtctctggcaagtaatccagaacttcttaatcttccatcctcagtaattaagaagaaagttcatttcagtggggaaagtaaagagaacatcatgaggagtgagaattctgagagtcagctcacatctaagtccaagtgcaaggacctgaagaaaaggcttcacgctgcccagctgcgggctcaagccctgtcagatattgagaaaaattaccaactgaaaagcagacagatcctgggcatgcgctagccaggtagagagacacagagctgtgtacaggatgtaatattaccaacctttaaagactgatattcaaatgctgtagtgttgaatacttggttccatgagccatgcctttctgtatagtacacatgatatttcggaattggttttactgttcttcagcaactattgtacaaaatgttcacatttaatttttctttcttcttttaagaacatattataaaaagaatactttcttggttgggcttttaatcctgtgtgtgattactagtaggaacatgagatgtgacattctaaatcttgggagaaaaaataatgttaggaaaaaaatatttatgcaggaagagtagcactcactgaatagttttaaatgactgagtggtatgcttacaattgtcatgtctagatttaaattttaagtctgagattttaaatgtttttgagcttagaaaacccagttagatgcaatttggtcattaataccatgacatcttgcttataaatattccattgctctgtagttcaaatctgttagctttgtgaaaattcatcactgtgatgtttgtattctttttttttttctgtttaacagaatatgagctgtctgtcatttacctacttctttcccactaaataaaagaattcttcagtttccctgta

SEQ ID NO: 129252 - DNA, 1641 bp, Artificial Sequence
  derived and/or modified sequence
agtgctgctcgggggcttctccatccaggtccctggagttcctggtccctggagctccgcacttggctcctacggccgctgccagaagatccggaggaagagtgatggcaagatattagtttggaaagaacttgactatggctccatgacagaagctgagaaacagatgcttgtttctgaagtgaatttgcttcgtgaactgaaacatccaaacatcgttcgttactatgatcggattattgaccggaccaatacaacactgtacattgtaatggaatattgtgaaggaggggatctggctagtgtaattacaaagggaaccaaggaaaggcaatacttagatgaagagtttgttcttcgagtgatgactcagttgactctggccctgaaggaatgccacagacgaagtgatggtggtcataccgtattgcatcgggatctgaaaccagccaatgttttcctggatggcaagcaaaacgtcaagcttggagactttgggctagctagaatattaaaccatgacacgagttttgcaaaaacatttgttggcacaccttattacatgtctcctgaacaaatgaatcgcatgtcctacaatgagaaatcagatatctggtcattgggctgcttgctgtatgagttatgtgcattaatgcctccatttacagcttttagccagaaagaactcgctgggaaaatcagagaaggcaaattcaggcgaattccataccgttactctgatgaattgaatgaaattattacgaggatgttaaacttaaaggattaccatcgaccttctgttgaagaaattcttgagaaccctttaatagcagatttggttgcagacgagcaaagaagaaatcttgagagaagagggcgacaattaggagagccagaaaaatcgcaggattccagccctgtattgagtgagctgaaactgaaggaaattcagttacaggagcgagagcgagctctcaaagcaagagaagaaagattggagcagaaagaacaggagctttgtgttcgtgagagactagcagaggacaaactggctagagcagaaaatctgttgaagaactacagcttgctaaaggaacggaagttcctgtctctggcaagtaatccagaacttcttaatcttccatcctcagtaattaagaagaaagttcatttcagtggggaaagtaaagagaacatcatgaggagtgagaattctgagagtcagctcacatctaagtccaagtgcaaggacctgaagaaaaggcttcacgctgcccagctgcgggctcaagccctgtcagatattgagaaaaattaccaactgaaaagcagacagatcctgggcatgcgctagccaggtagagagacacagagctgtgtacaggatgtaatattaccaacctttaaagactgatattcaaatgctgtagtgttgaatacttggttccatgagccatgcctttctgtatagtacacatgatatttcggaattggttttactgttcttcagcaactattgtacaaaatgttcacatttaatttttctttcttcttttaagaacatattataaaaagaatactttcttggttgggcttttaatcctgtgtgtgattactagtaggaacatgagatgtgacatt

SEQ ID NO: 129253 - DNA, 1338 bp, Artificial Sequence
  derived and/or modified sequence
atgccaagtagggcagaagactacgaggtgctttacacaatcggaacgggtagctacggaagatgccagaaaattcggaggaaatcagacggaaagattctggtgtggaaagaactcgactacggctcgatgacggaggctgagaaacaaatgctcgtgtcagaggtaaatctactgagagagttaaaacaccccaatatcgttcgttactacgaccggatcatcgatcgcaccaacactaccctctacatcgtgatggagtactgcgaaggcggtgatctggcaagtgtgattacgaaaggcacaaaggagcggcaatatctcgacgaggagttcgtgctgcgtgtcatgactcagctaacgctggccctgaaggaatgccatagaagaagcgacgggggacataccgtcctccaccgggaccttaagccagcaaacgtgtttttggacggcaagcaaaatgtcaaacttggtgatttcggactggctaggattctgaaccacgacacaagctttgctaaaaccttcgtgggtacaccttactatatgtctcctgaacagatgaacagaatgagctacaatgagaaatccgatatctggtccctcgggtgtttgctctatgaattgtgcgcgctcatgccacccttcacagcattcagccagaaagagttagcgggtaagatacgggaaggaaaattcagacgcataccgtacagatatagcgatgagctcaacgaaattatcacccgaatgctgaatctcaaggattaccacaggccctctgttgaggagatacttgagaaccctttgatcgcagatttggttgccgacgagcagcgcaggaatctggaacgtagaggtaggcaacttggcgagccagagaaaagtcaagatagctccccagtgctgtctgaattgaagctcaaggagattcagctgcaggaacgcgaaagagctttgaaagccagggaggagcgtttggaacaaaaggaacaggagctttgtgtgagggagagattggcggaggacaagttagccagggctgaaaacttgctgaaaaactatagcctactgaaggagaggaaatttctctccttggcctccaatcctgagctgctgaacctgcctagttccgtgatcaagaagaaggtgcacttttcaggcgagtcaaaagagaatattatgagatccgagaacagcgaatctcagcttacaagcaaatccaagtgtaaagaccttaaaaaacggcttcacgctgcacagctcagggcacaagcactgtcggatatcgaaaagaactaccagttgaaaagcaggcaaatcttaggaatgcgctag

SEQ ID NO: 129254 - DNA, 1209 bp, Artificial Sequence
  derived and/or modified sequence
atgacagaggctgagaaacaaatgctggttagcgaagtcaacctcttgcgggaactgaaacacccaaatatcgtccgctactacgatcggataattgataggactaacactaccttgtacatcgttatggaatattgcgaaggaggcgatcttgcatcagtgatcaccaagggaactaaggaacgacagtatctggatgaggagttcgtgttacgcgtcatgactcaactaacactggcactgaaggagtgtcaccgcaggtctgacggcggacacactgtcctccacagagacctgaaacctgccaatgttttcctggatggaaagcagaacgtcaagctgggtgactttggactggcccgaattctcaatcacgacacaagtttcgccaagactttcgttggcaccccctattacatgtctcctgagcagatgaataggatgagctacaatgaaaagagcgatatctggtccctgggctgtctgctatatgagctctgcgccttaatgccacctttcacggcgttttcacagaaggagctggccggaaagatcagggagggaaagttcagacgaatcccgtacagatattccgatgaacttaacgaaatcatcactcgaatgctgaatttaaaagactatcatcggccttctgtagaggagatcctggaaaacccgctcattgccgatctggtcgctgatgagcagcggagaaacctggagaggaggggccgtcagcttggcgagccagaaaagagccaggactcgtctccagtcctgtccgagctgaagttgaaggagattcagctgcaagagcgggaaagggccctaaaagcaagggaggagagactggagcagaaggaacaggaactctgcgtaagagagcgcctggctgaggacaaactagctcgagccgagaacctgttgaaaaattacagcctgctaaaggagcggaagtttttgtccctagcttccaaccccgaacttttgaatcttccatcgtcggtgattaagaagaaagtgcacttttcgggcgagtccaaggaaaacatcatgaggagcgaaaactcagaatctcagctgacatccaagagtaagtgcaaagatctcaaaaagcgcctccatgccgcacagctaagagctcaggctctttcagatatcgagaaaaactatcagctcaagagcagacagatcttgggaatgaggtag

SEQ ID NO: 129255 - DNA, 1338 bp, Artificial Sequence
  derived and/or modified sequence
atgcccagcagagccgaggactacgaggtgctgtacaccatcggcaccggcagctacggcagatgccagaagatcagaagaaagagcgacggcaagatcctggtgtggaaggagctggactacggcagcatgaccgaggccgagaagcagatgctggtgagcgaggtgaacctgctgagagagctgaagcaccccaacatcgtgagatactacgacagaatcatcgacagaaccaacaccaccctgtacatcgtgatggagtactgcgagggcggcgacctggccagcgtgatcaccaagggcaccaaggagagacagtacctggacgaggagttcgtgctgagagtgatgacccagctgaccctggccctgaaggagtgccacagaagaagcgacggcggccacaccgtgctgcacagagacctgaagcccgccaacgtgttcctggacggcaagcagaacgtgaagctgggcgacttcggcctggccagaatcctgaaccacgacaccagcttcgccaagaccttcgtgggcaccccctactacatgagccccgagcagatgaacagaatgagctacaacgagaagagcgacatctggagcctgggctgcctgctgtacgagctgtgcgccctgatgccccccttcaccgccttcagccagaaggagctggccggcaagatcagagagggcaagttcagaagaatcccctacagatacagcgacgagctgaacgagatcatcaccagaatgctgaacctgaaggactaccacagacccagcgtggaggagatcctggagaaccccctgatcgccgacctggtggccgacgagcagagaagaaacctggagagaagaggcagacagctgggcgagcccgagaagagccaggacagcagccccgtgctgagcgagctgaagctgaaggagatccagctgcaggagagagagagagccctgaaggccagagaggagagactggagcagaaggagcaggagctgtgcgtgagagagagactggccgaggacaagctggccagagccgagaacctgctgaagaactacagcctgctgaaggagagaaagttcctgagcctggccagcaaccccgagctgctgaacctgcccagcagcgtgatcaagaagaaggtgcacttcagcggcgagagcaaggagaacatcatgagaagcgagaacagcgagagccagctgaccagcaagagcaagtgcaaggacctgaagaagagactgcacgccgcccagctgagagcccaggccctgagcgacatcgagaagaactaccagctgaagagcagacagatcctgggcatgagatag

SEQ ID NO: 129256 - DNA, 1209 bp, Artificial Sequence
  derived and/or modified sequence
atgaccgaggccgagaagcagatgctggtgagcgaggtgaacctgctgagagagctgaagcaccccaacatcgtgagatactacgacagaatcatcgacagaaccaacaccaccctgtacatcgtgatggagtactgcgagggcggcgacctggccagcgtgatcaccaagggcaccaaggagagacagtacctggacgaggagttcgtgctgagagtgatgacccagctgaccctggccctgaaggagtgccacagaagaagcgacggcggccacaccgtgctgcacagagacctgaagcccgccaacgtgttcctggacggcaagcagaacgtgaagctgggcgacttcggcctggccagaatcctgaaccacgacaccagcttcgccaagaccttcgtgggcaccccctactacatgagccccgagcagatgaacagaatgagctacaacgagaagagcgacatctggagcctgggctgcctgctgtacgagctgtgcgccctgatgccccccttcaccgccttcagccagaaggagctggccggcaagatcagagagggcaagttcagaagaatcccctacagatacagcgacgagctgaacgagatcatcaccagaatgctgaacctgaaggactaccacagacccagcgtggaggagatcctggagaaccccctgatcgccgacctggtggccgacgagcagagaagaaacctggagagaagaggcagacagctgggcgagcccgagaagagccaggacagcagccccgtgctgagcgagctgaagctgaaggagatccagctgcaggagagagagagagccctgaaggccagagaggagagactggagcagaaggagcaggagctgtgcgtgagagagagactggccgaggacaagctggccagagccgagaacctgctgaagaactacagcctgctgaaggagagaaagttcctgagcctggccagcaaccccgagctgctgaacctgcccagcagcgtgatcaagaagaaggtgcacttcagcggcgagagcaaggagaacatcatgagaagcgagaacagcgagagccagctgaccagcaagagcaagtgcaaggacctgaagaagagactgcacgccgcccagctgagagcccaggccctgagcgacatcgagaagaactaccagctgaagagcagacagatcctgggcatgagatag

SEQ ID NO: 129257 - protein, 506 aa, Artificial Sequence
  derived and/or modified sequence
MDDYMVLRMIGEGSFGRALLVQHESSNQMFAMKEIRLPKSFSNTQNSRKEAVLLAKMKHPNIVAFKESFEAEGHLYIVMEYCDGGDLMQKIKQQKGKLFPEDMILNWFTQMCLGVNHIHKKRVLHRDIKSKNIFLTQNGKVKLGDFGSARLLSNPMAFACTYVGTPYYVPPEIWENLPYNNKSDIWSLGCILYELCTLKHPFQANSWKNLILKVCQGCISPLPSHYSYELQFLVKQMFKRNPSHRPSATTLLSRGIVARLVQKCLPPEIIMEYGEEVLEEIKNSKHNTPRKKANPSRIRIALGNEASTVQEEEQDRKGSHTDLESINENLVESALRRVNREEKGNKSVHLRKASSPNLHRRQWEKNVPNTALTALENASILTSSLTAEDDRGGSVIKYSKNTTRKQWLKETPDTLLNILKNADLSLAFQTYTIYRPGSEGFLKGPLSEETEASDSVDGGHDSVILDPERLEPGLDEEDTDFEEEDDNPDWVSELKKRAGWQGLCDR

SEQ ID NO: 129258 - protein, 58 aa, Artificial Sequence
  derived and/or modified sequence
MDDYMVLRMIGEGSFGRALLVQHESSNQMFAMKEIRLPKSFSNTQNSRKEAVLLAKMK

SEQ ID NO: 129259 - DNA, 1521 bp, Artificial Sequence
  derived and/or modified sequence
atggatgattacatggttctccgcatgatcggggaagggtcatttgggcgtgcattgctggttcagcacgagtcttccaatcagatgttcgcgatgaaggagatcaggctcccaaagtcattctcaaacacccagaatagccgtaaagaagccgtgctattggcgaagatgaaacaccccaacattgtggccttcaaagagtcctttgaagctgaggggcacctgtatatagtgatggagtattgcgacgggggggatctcatgcaaaagatcaaacagcaaaaagggaaacttttccctgaggacatgattctgaactggtttacacaaatgtgtctgggtgttaatcacatacataaaaaaagggtgttacatcgcgatattaaatccaaaaacattttcctgacacaaaacggcaaggtcaaactcggtgactttgggtccgctcgcctgttgagcaaccctatggcgttcgcatgcacctacgtcggcaccccatactatgtcccacctgagatctgggaaaacctaccatacaacaacaaaagtgatatttggagcctcggatgcattctgtatgagttatgcacgttgaaacacccattccaggccaacagttggaagaacttgatcctgaaagtatgtcagggttgtattagtcctcttccaagtcattatagctatgagctccaatttctggtgaaacagatgttcaagcgcaaccctagtcacaggccgagcgctaccacactcctttcaagaggaatcgtcgctcggctcgtgcagaagtgtctgccacccgaaatcataatggagtacggtgaggaggtgttagaggaaattaagaacagcaaacataacaccccccgcaaaaaggccaatcctagtcgaataaggattgccttggggaacgaagcctctaccgttcaggaggaggagcaggaccggaagggaagccacaccgaccttgaatctataaacgagaatctagtggaatcagcactccgccgtgtgaatagagaggagaaaggtaataagtctgttcacttacggaaggcctcctcaccaaacctccacagaaggcagtgggagaaaaacgtgcctaacacagctctgacagctcttgagaatgcttccatcttgacatcttcactcactgcggaggatgacaggggaggctccgttataaagtactctaagaacaccactcgaaaacaatggctcaaggagaccccagacaccttactaaatattctgaaaaatgcggacttgtctctggcctttcagacatacacaatctataggccaggcagcgaaggtttccttaagggacctctgtctgaagagaccgaggctagtgacagcgtggatgggggacatgattccgtaatcctcgatccagagaggctcgaacccggtttggatgaggaagacaccgattttgaagaggaggatgataaccctgactgggtgtcggagctcaagaaacgggccggatggcaagggctttgtgatcgctag

SEQ ID NO: 129260 - DNA, 1521 bp, Artificial Sequence
  derived and/or modified sequence
atggacgattacatggttttgcgaatgattggagagggcagctttggccgagccttgctggtgcagcacgaatcatccaaccagatgtttgccatgaaggaaatacggctgccgaaatctttttcaaatactcagaattccaggaaggaagcagttctgctggccaagatgaagcatccaaacatcgttgcattcaaagagagttttgaggcagagggccacctctacattgtgatggagtactgcgatggaggcgacctcatgcagaagataaaacagcaaaaaggcaaacttttccccgaagatatgattctgaactggtttacacagatgtgcctcggtgtgaaccacatccacaaaaagcgggtgctccatcgcgacattaaaagtaaaaacattttcctaacacagaacgggaaggtgaagctgggagactttggttctgcccggctgctctcaaatccaatggctttcgcctgtacctacgtcggaactccctattacgtcccccccgagatctgggagaacctcccctacaacaataagtctgatatctggagtctcggctgtatcctctatgaactctgcacactcaagcatccgtttcaggcgaactcctggaaaaatttaatcttaaaggtctgtcaggggtgcatctctcctttaccaagccactactcatatgaactgcaatttctggttaagcagatgttcaagcgcaacccctctcatcgcccatctgcgacaactttattaagtcgggggattgtcgctcgtttggtacaaaagtgcctacccccagaaataattatggaatacggggaagaagtcctggaagagattaagaattccaaacacaataccccccgtaaaaaagctaatccatcccgaatcagaatcgccttgggaaatgaagcctccaccgtgcaagaggaagagcaggatagaaaaggcagccataccgacctcgaatctattaatgagaatcttgtcgaatctgctctgcgtcgagttaatagggaggaaaaaggcaataagtccgtacaccttcgtaaagccagctccccgaatttacaccggagacagtgggagaagaatgtccctaataccgctttgactgccctggaaaacgcgtctatactgactagttcgctcacagcagaggatgataggggaggatccgtgatcaagtattccaaaaatactaccagaaaacagtggctgaaggagacacccgataccctgttgaatatcctgaagaacgcagacttgagcctagcctttcagacttatacaatctatcggccaggatcggaaggcttccttaagggaccattatcagaagaaaccgaagcatccgacagcgtggacggcggacacgactctgttattctggaccccgagcggctggaaccaggacttgacgaagaggacaccgatttcgaggaagaggacgataacccagattgggtgtcagaattaaaaaagcgtgctggttggcaggggctctgcgatcgctag

SEQ ID NO: 129261 - DNA, 1521 bp, Artificial Sequence
  derived and/or modified sequence
atggatgactacatggtgctgaggatgattggagagggcagctttggccgggccctgctggtgcagcacgagagcagcaaccagatgtttgccatgaaggagatccggctgcccaagagcttcagcaacacccagaacagcaggaaggaggccgtgctgctggccaagatgaagcaccccaacatcgtggccttcaaggagagctttgaagctgagggccacctgtacatcgtgatggagtactgtgatggaggagacctgatgcagaagatcaagcagcagaagggcaagctgtttcctgaggacatgatcctgaactggttcacccagatgtgcctgggcgtgaaccacatccacaagaagagggtgctgcaccgggacatcaagagcaagaacatcttcctgacccagaatggcaaggtgaagctgggggactttggcagcgcccggctgctgagcaaccccatggcctttgcctgcacctacgtgggcaccccctactacgtgcccccagagatctgggagaacctgccctacaacaacaagagtgacatctggagcctgggctgcatcctgtatgagctgtgcaccctgaagcaccccttccaggccaacagctggaagaacctgatcctgaaggtgtgccagggctgcatcagccccctgcccagccactacagctatgagctgcagttcctggtgaagcagatgttcaagaggaaccccagccaccggcccagcgccaccaccctgctgagccggggcatcgtggcccggctggtgcagaagtgcctgcccccagagatcatcatggagtatggagaggaggtgctggaggagatcaagaacagcaagcacaacacccccaggaagaaggccaaccccagccgcatccgcatcgccctgggcaatgaggccagcacagtgcaggaggaggagcaggacaggaagggcagccacacagacctggagagcatcaatgaaaacctggtggagagcgccctgcggcgggtgaaccgggaggagaagggcaacaagtctgtgcacctgaggaaggccagcagccccaacctgcaccggcggcagtgggagaagaatgtgcccaacacagccctgacagccctggagaatgccagcatcctgaccagcagcctgacagcagaagatgaccggggcggcagcgtcatcaagtacagcaagaacaccaccaggaagcagtggctgaaggagaccccagacaccctgctgaacatcctgaagaatgctgacctgagcctggccttccagacctacaccatctaccggcccggcagcgagggcttcctgaagggccccctgtctgaggagacagaggccagtgacagcgtggatggcggccatgacagcgtcatcctggaccctgagcggctggagcccggcctggatgaggaggacacagactttgaggaggaggatgacaacccagactgggtgtctgagctgaagaagagagctggctggcagggcctgtgtgacagatag

SEQ ID NO: 129262 - DNA, 1521 bp, Artificial Sequence
  derived and/or modified sequence
atggacgactacatggtgctgcggatgatcggcgagggcagcttcggcagagctctccttgtgcagcacgagtcaagtaatcagatgtttgctatgaaggagattcgcctgccaaaaagtttttctaacacccagaattcgcggaaagaggccgtgctgctcgctaagatgaagcatccaaacattgtggctttcaaggaaagcttcgaagcagagggacacctttatattgtcatggaatattgcgatggaggggatcttatgcagaagatcaagcagcaaaaaggtaagttgttccccgaggacatgattttaaactggtttacacagatgtgcttaggtgtgaaccacatacataaaaagagggttctgcatagggatattaaatcaaagaatatcttcctgactcaaaacgggaaagtaaaattgggcgattttggctcagctcgcctcctctccaatcctatggcctttgcatgcacctacgtcggtacaccatattacgtgccgcccgaaatttgggagaacctgccctacaacaacaaaagcgacatttggagcttgggttgtatactttacgagctttgcactctcaagcatccctttcaggcgaacagctggaagaatctaattttaaaggtgtgccaaggatgtatctccccccttccaagccattatagctacgaactgcaattcttggtgaagcagatgtttaaaaggaatcccagccatcgaccttcagccaccaccctcttgtcacggggcatagtggcccgcctggttcaaaaatgccttcccccagagataatcatggagtatggggaggaggtactggaagagatcaagaactctaagcacaatacccctcgaaagaaggctaaccctagccgcatccgcatcgcactgggcaatgaggcttctacagttcaagaggaggagcaggatagaaagggttcgcatacggaccttgagtcaattaatgagaatctggttgagtctgcactgcggcgcgtgaacagggaggaaaaggggaacaaaagcgtgcacctgagaaaggctagttccccgaatctacacagacgccaatgggagaagaacgtgcccaatacagcccttacagccctggaaaacgcaagtatcctgacttctagcctaaccgccgaggacgatcggggaggctcagtgatcaagtattccaaaaatactactcggaagcaatggctcaaggagacaccagatacactgttaaatattctgaaaaatgccgacctcagcttagcttttcagacgtacaccatctatcgcccgggttccgagggcttcctgaagggccctctgtcagaagagacggaggcttcagactccgtggatggcggacacgatagtgtcattctggatccagagaggctggaacctggcctggatgaagaggacacagacttcgaagaggaagacgacaatccagactgggtgtcagaattgaagaaacgagccggttggcagggcctgtgcgacagatag

SEQ ID NO: 129263 - DNA, 1521 bp, Artificial Sequence
  derived and/or modified sequence
atggacgactacatggtgctgcggatgatcggcgagggcagcttcggtcgagccctactggtacagcacgaaagtagcaatcaaatgttcgctatgaaggagatcagactgcctaaatctttcagtaatacacagaactcacggaaggaggcagtcttattggccaaaatgaagcaccctaatattgttgccttcaaggagtcatttgaggcagagggacatttatatatcgtgatggaatattgcgatggaggcgatctaatgcagaagatcaagcaacagaagggcaaattatttcccgaagatatgattttaaattggttcacacagatgtgtttgggtgttaatcacatccacaaaaaaagggtgttacatagagacataaagagcaagaacattttcctgacgcagaacggaaaggtcaaactgggagatttcgggtcggcgcggttacttagtaacccgatggcttttgcttgcacctatgtgggaacaccatactatgtgccacctgagatttgggagaaccttccttataacaacaaatctgatatttggtccctgggctgcatcctgtacgagttatgcaccctcaagcaccccttccaggccaatagctggaagaatcttatactcaaggtgtgccaaggatgcattagccctctcccctctcactactcctacgagttgcagttcttggtcaagcaaatgttcaaacgaaacccctcccaccgaccatccgccaccacactgttgagccgcggcattgttgcacgcttggtccagaagtgccttcccccggagataataatggagtacggagaagaggtcctggaggaaattaaaaactccaagcataataccccacggaagaaggccaacccatctaggattcggatcgcactagggaacgaagcatctaccgtgcaggaggaggaacaggatagaaaaggctcccacacagatttggagagcatcaatgaaaatctagtagaaagtgcccttcgaagggttaatcgggaggaaaaaggtaataagtcggtgcacctccgcaaagcgtcttcaccaaatctgcaccgcaggcaatgggaaaagaatgtgcctaacacagcccttaccgccctcgaaaacgccagtatccttacctcatctctgacagcagaagatgaccgagggggctccgttatcaaatacagcaaaaatacaacccgcaaacaatggttgaaggagactcctgacacccttctgaatattctaaagaatgcagacttgagcctcgcgtttcaaacatacacaatctacagacctggcagtgaagggtttctgaagggccccctctccgaggaaacggaagcgtcggactctgtggacgggggacacgactctgtcatcctggatcctgagagattagaacctggtcttgacgaggaggacaccgatttcgaggaagaggatgacaaccctgattgggtatcagagctgaaaaagcgagcagggtggcaaggtttgtgtgatagatag

SEQ ID NO: 129264 - DNA, 2396 bp, Artificial Sequence
  derived and/or modified sequence
cacatagctagtaagttctagctagcactgagtgctgtgcccgtgaaatttatctacataggctttcacttaacctgcagacagaactcagttagtcggggacaatttccctcaatgttaacagcactgttccaccgcaacgtggaacaacagctttaaaacgtgctcttcgtaggcccggctactccaagaacagtgcctcccgccagacccaggcggcttccttcacccgcaacccgagagacgacccgccgggcccgccccgcggaagccgccggttgccaggccaaggagtggactagggtcgccggggaagcggtttgggagagcccatggtgactgcgtgagtggagcccagctgtgtggatgccccagcatggatgactacatggtcctgagaatgattggggagggctccttcggcagagctcttttggttcagcatgaaagcagtaatcagatgtttgccatgaaagaaataaggcttcccaagtctttctctaatacacagaattctaggaaggaggctgttcttttagccaaaatgaaacaccctaatattgttgccttcaaagaatcatttgaagctgaaggacacttgtatattgtgatggaatactgtgatggaggggatctaatgcaaaagattaaacagcagaaaggaaagttatttcctgaagacatgatacttaattggtttacccaaatgtgccttggagtaaatcacattcacaagaaacgtgtgctacacagagatatcaagtccaagaatatcttcctcactcagaatggaaaagtgaaattgggagactttggatctgcccgtcttctctccaatccgatggcatttgcttgtacctatgtgggaactccttattatgtgcctccagaaatttgggaaaacctgccttataacaataaaagtgacatctggtccttgggttgcatcctgtatgaactctgtacccttaagcatccatttcaggcaaatagttggaaaaatcttatcctcaaagtatgtcaagggtgcatcagtccactgccgtctcattactcctatgaacttcagttcctagtcaagcagatgtttaaaaggaatccctcacatcgcccctcggctacaacgcttctctctcgaggcatcgtagctcggcttgtccagaagtgcttaccccccgagatcatcatggaatatggtgaggaagtattagaagaaataaaaaattcgaagcataacacaccaagaaaaaaagcaaaccccagcagaatcaggatagctttgggaaatgaagcaagcacagtgcaagaggaagaacaagatagaaagggtagccatactgatttggaaagcattaatgaaaatttagttgaaagtgcattgagaagagtaaacagagaagaaaaaggtaataagtcagtccatctgaggaaagccagttcaccaaatcttcatagacgacagtgggagaaaaatgtacccaatacagctcttacagctttggaaaatgcatccatactcacctccagtttaacagcagaggacgatagaggtggttctgtaataaagtacagcaaaaatactactcgtaagcagtggctcaaagagacccctgacactttgttgaacatccttaagaatgctgatctcagcttggcttttcaaacatacacaatatatagaccaggttcagaagggttcttgaaaggccccctgtctgaagaaacagaagcatcggacagtgttgatggaggtcacgattctgtcattttggatccagagcgacttgagcctgggctagatgaggaggacacggactttgaggaggaagatgacaaccccgactgggtgtcagagctgaagaagcgagctggatggcaaggcctgtgcgacagataatgcctgaggaaatgttcctgagtcacgctgaggagaggcttcactcaggagttcatgctgagatgatcatgagttcatgcgacgtatattttcctttggaaacagaatgaagcagaggaaactcttaatacttaaaatcgttcttgattagtatcgtgagtttgaaaagtctagaactcctgtaagtttttgaactcaagggagaaggtatagtggaatgagtgtgagcatcgggctttgcagtcccatagaacagaaatgggatgctagcgtgccactacctacttgtgtgattgtgggaaattacttaacctcttcaagccccaatttcctcaaccataaaatgaagataataatgcctacctcagagggatgctgaccacagacctttatagcagcccgtatgatattattcacattatgatatgtgtttattattatgtgactctttttacatttcctaaaggtttgagaattaaatatatttaattatgattta

SEQ ID NO: 129265 - DNA, 2255 bp, Artificial Sequence
  derived and/or modified sequence
cgccgccttggggtctgggcgcgcggtgccgtgggggtcagcagggcggagcggcttttccaggagaaagggccctcacgggtgagcggggcgactgggctcccccgcggtgcagttgccccgcgggcgccggccccggctcaacggattcttctcgctcgctgcccggaaagaaccatttgggagagcccatggtgactgcgtgagtggagcccagctgtgtggatgccccagcatggatgactacatggtcctgagaatgattggggagggctccttcggcagagctcttttggttcagcatgaaagcagtaatcagatgtttgccatgaaagaaataaggcttcccaagtctttctctaatacacagaattctaggaaggaggctgttcttttagccaaaatgaaacaccctaatattgttgccttcaaagaatcatttgaagctgaaggacacttgtatattgtgatggaatactgtgatggaggggatctaatgcaaaagattaaacagcagaaaggaaagttatttcctgaagacatgatacttaattggtttacccaaatgtgccttggagtaaatcacattcacaagaaacgtgtgctacacagagatatcaagtccaagaatatcttcctcactcagaatggaaaagtgaaattgggagactttggatctgcccgtcttctctccaatccgatggcatttgcttgtacctatgtgggaactccttattatgtgcctccagaaatttgggaaaacctgccttataacaataaaagtgacatctggtccttgggttgcatcctgtatgaactctgtacccttaagcatccatttcaggcaaatagttggaaaaatcttatcctcaaagtatgtcaagggtgcatcagtccactgccgtctcattactcctatgaacttcagttcctagtcaagcagatgtttaaaaggaatccctcacatcgcccctcggctacaacgcttctctctcgaggcatcgtagctcggcttgtccagaagtgcttaccccccgagatcatcatggaatatggtgaggaagtattagaagaaataaaaaattcgaagcataacacaccaagaaaaaaagcaaaccccagcagaatcaggatagctttgggaaatgaagcaagcacagtgcaagaggaagaacaagatagaaagggtagccatactgatttggaaagcattaatgaaaatttagttgaaagtgcattgagaagagtaaacagagaagaaaaaggtaataagtcagtccatctgaggaaagccagttcaccaaatcttcatagacgacagtgggagaaaaatgtacccaatacagctcttacagctttggaaaatgcatccatactcacctccagtttaacagcagaggacgatagaggtggttctgtaataaagtacagcaaaaatactactcgtaagcagtggctcaaagagacccctgacactttgttgaacatccttaagaatgctgatctcagcttggcttttcaaacatacacaatatatagaccaggttcagaagggttcttgaaaggccccctgtctgaagaaacagaagcatcggacagtgttgatggaggtcacgattctgtcattttggatccagagcgacttgagcctgggctagatgaggaggacacggactttgaggaggaagatgacaaccccgactgggtgtcagagctgaagaagcgagctggatggcaaggcctgtgcgacagataatgcctgaggaaatgttcctgagtcacgctgaggagaggcttcactcaggagttcatgctgagatgatcatgagttcatgcgacgtatattttcctttggaaacagaatgaagcagaggaaactcttaatacttaaaatcgttcttgattagtatcgtgagtttgaaaagtctagaactcctgtaagtttttgaactcaagggagaaggtatagtggaatgagtgtgagcatcgggctttgcagtcccatagaacagaaatgggatgctagcgtgccactacctacttgtgtgattgtgggaaattacttaacctcttcaagccccaatttcctcaaccataaaatgaagataataatgcctacctcagagggatgctgaccacagacctttatagcagcccgtatgatattattcacattatgatatgtgtttattattatgtgactctttttacatttcctaaaggtttgagaattaaatatatttaattatgattta

SEQ ID NO: 129266 - DNA, 1521 bp, Artificial Sequence
  derived and/or modified sequence
atggacgactatatggtcctgcgcatgattggcgagggctccttcgggcgagccctgttggtgcagcacgaaagcagcaatcaaatgtttgccatgaaggaaatcagattacctaagtcattttctaatacccaaaacagtcgcaaggaggctgtgctgttggccaagatgaagcaccccaacatcgtcgcctttaaggaatcctttgaagccgaaggccatctgtacatcgtgatggagtattgcgacggcggagacttgatgcagaagattaaacagcaaaagggcaaactgttcccagaggatatgatcctcaattggtttacacagatgtgtttgggggtcaaccatattcataaaaagcgcgtgcttcacagagacattaagtccaagaacattttccttactcagaatgggaaagtaaaactcggtgacttcggttcggccaggctgctcagcaatccaatggcgtttgcctgcacgtatgtggggactccgtactacgtcccgcctgaaatttgggaaaacctcccctataataataaatccgatatttggtctttagggtgtattctgtacgagctttgcaccctaaaacaccctttccaggcaaatagttggaagaatctcatcctgaaggtgtgtcagggatgtatcagtccactgccctcccattacagttatgaattacagttccttgttaagcaaatgtttaagaggaatcctagccacaggcctagtgccaccaccctgctcagtcggggtatagtggccagactcgtgcagaagtgccttcctcctgaaattatcatggaatacggcgaagaagtgttagaagagattaaaaacagcaaacacaatactcctaggaaaaaggcaaacccatctaggatccgaattgctttaggcaacgaagcatctaccgtgcaggaggaggaacaggatcggaaagggtcccatactgacctggaaagcatcaatgaaaacctggtggagtcagctttacgtagagtgaaccgggaggagaaaggcaacaagtccgtgcacttgcggaaagcaagttcacccaatctgcaccgacgacagtgggaaaagaatgtcccaaataccgcgttaacggccctggaaaatgcttctatccttacatcttccctaaccgccgaagacgatcgcggaggcagcgtaatcaaatactctaaaaatactactcggaagcagtggctcaaagaaaccccagatacccttttaaacattttgaagaatgccgacctttcccttgcattccaaacatatacaatttacagaccaggttctgaggggtttctcaaggggcctctgagcgaggagacggaagcgagtgacagcgtggatgggggtcacgatagtgtgattttagaccctgagaggctggaacctggcctagatgaagaggatactgattttgaggaggaggacgataatcctgactgggtttctgaactgaagaagcgagcaggctggcaaggactatgtgatcgatag

SEQ ID NO: 129267 - DNA, 1521 bp, Artificial Sequence
  derived and/or modified sequence
atggacgactacatggtgctacggatgatcggcgaaggctcctttggcagagctttacttgtacagcacgagtcatcgaaccagatgttcgcaatgaaagaaatccgactacctaagagctttagtaatactcaaaactcccggaaggaggccgtgctgttggcaaaaatgaagcacccaaacatcgtggcattcaaagagtccttcgaagcagaaggccatttgtacatcgtgatggagtactgtgatggaggagacctcatgcagaagattaagcaacagaaggggaaattattccccgaagatatgatcctgaactggttcacacaaatgtgcttgggagttaaccacatccacaaaaaacgcgtgcttcaccgcgatatcaagtccaagaacatcttcctcactcaaaatggcaaggtaaagctgggagactttggcagcgccagactgctgtccaacccaatggcgttcgcatgtacttatgtgggtaccccttattatgtgcctccagaaatttgggagaatttgccttataataacaagtcagatatttggtcactgggttgtattttatacgagttatgtacactgaagcacccattccaggccaatagctggaagaatctgattttgaaggtgtgtcagggatgtatcagccccttgcctagtcactacagttatgagctgcagttcctggtgaagcaaatgtttaaacgaaatcccagccatcggccttcagcgaccaccctgctgagtagaggtattgtggccaggctcgtgcagaaatgtctgcctccagagatcatcatggaatatggagaggaggtgctggaggagataaagaacagcaagcataacactccccgtaagaaagccaacccttcccgaatcaggatagcactcggcaacgaggcatctacagtgcaagaggaagaacaggaccgtaaaggatctcacaccgacttggagtccattaatgagaacctggtcgagtcggccctcagaagggttaatagagaggagaagggcaacaagtccgtgcatttaagaaaagctagctctcccaacttacaccgtaggcagtgggagaaaaatgttccaaataccgcattaacagccctggagaacgccagcattctgaccagttctctaactgctgaggatgatcgcggagggagcgtgattaagtatagtaagaatacgacacggaaacagtggctgaaagaaacccccgacaccctattgaacattttgaaaaacgcggatctgtctctagcatttcagacatacacaatctatagacctggcagcgaagggtttctcaagggcccattatccgaagaaacggaagcaagtgactccgtcgatggcggacacgattccgtgatcctggatcctgagagacttgaaccgggactggatgaggaagatacagattttgaagaagaagatgataatcccgactgggtttccgaattgaaaaagagggcaggatggcaaggtctttgtgatcgctag

SEQ ID NO: 129268 - DNA, 1521 bp, Artificial Sequence
  derived and/or modified sequence
atggacgactacatggtgctgagaatgatcggcgagggcagcttcggcagagccctgctggtgcagcacgagagcagcaaccagatgttcgccatgaaggagatcagactgcccaagagcttcagcaacacccagaacagcagaaaggaggccgtgctgctggccaagatgaagcaccccaacatcgtggccttcaaggagagcttcgaggccgagggccacctgtacatcgtgatggagtactgcgacggcggcgacctgatgcagaagatcaagcagcagaagggcaagctgttccccgaggacatgatcctgaactggttcacccagatgtgcctgggcgtgaaccacatccacaagaagagagtgctgcacagagacatcaagagcaagaacatcttcctgacccagaacggcaaggtgaagctgggcgacttcggcagcgccagactgctgagcaaccccatggccttcgcctgcacctacgtgggcaccccctactacgtgccccccgagatctgggagaacctgccctacaacaacaagagcgacatctggagcctgggctgcatcctgtacgagctgtgcaccctgaagcaccccttccaggccaacagctggaagaacctgatcctgaaggtgtgccagggctgcatcagccccctgcccagccactacagctacgagctgcagttcctggtgaagcagatgttcaagagaaaccccagccacagacccagcgccaccaccctgctgagcagaggcatcgtggccagactggtgcagaagtgcctgccccccgagatcatcatggagtacggcgaggaggtgctggaggagatcaagaacagcaagcacaacacccccagaaagaaggccaaccccagcagaatcagaatcgccctgggcaacgaggccagcaccgtgcaggaggaggagcaggacagaaagggcagccacaccgacctggagagcatcaacgagaacctggtggagagcgccctgagaagagtgaacagagaggagaagggcaacaagagcgtgcacctgagaaaggccagcagccccaacctgcacagaagacagtgggagaagaacgtgcccaacaccgccctgaccgccctggagaacgccagcatcctgaccagcagcctgaccgccgaggacgacagaggcggcagcgtgatcaagtacagcaagaacaccaccagaaagcagtggctgaaggagacccccgacaccctgctgaacatcctgaagaacgccgacctgagcctggccttccagacctacaccatctacagacccggcagcgagggcttcctgaagggccccctgagcgaggagaccgaggccagcgacagcgtggacggcggccacgacagcgtgatcctggaccccgagagactggagcccggcctggacgaggaggacaccgacttcgaggaggaggacgacaaccccgactgggtgagcgagctgaagaagagagccggctggcagggcctgtgcgacagatag

SEQ ID NO: 129269 - protein, 1461 aa, Artificial Sequence
  derived and/or modified sequence
MAAERGARRLLSTPSFWLYCLLLLGRRAPGAAAARSGSAPQSPGASIRTFTPFYFLVEPVDTLSVRGSSVILNCSAYSEPSPKIEWKKDGTFLNLVSDDRRQLLPDGSLFISNVVHSKHNKPDEGYYQCVATVESLGTIISRTAKLIVAGLPRFTSQPEPSSVYAGNNAILNCEVNADLVPFVRWEQNRQPLLLDDRVIKLPSGMLVISNATEGDGGLYRCVVESGGPPKYSDEVELKVLPDPEVISDLVFLKQPSPLVRVIGQDVVLPCVASGLPTPTIKWMKNEEALDTESSERLVLLAGGSLEISDVTEDDAGTYFCIADNGNETIEAQAELTVQAQPEFLKQPTNIYAHESMDIVFECEVTGKPTPTVKWVKNGDMVIPSDYFKIVKEHNLQVLGLVKSDEGFYQCIAENDVGNAQAGAQLIILEHAPATTGPLPSAPRDVVASLVSTRFIKLTWRTPASDPHGDNLTYSVFYTKEGIARERVENTSHPGEMQVTIQNLMPATVYIFRVMAQNKHGSGESSAPLRVETQPEVQLPGPAPNLRAYAASPTSITVTWETPVSGNGEIQNYKLYYMEKGTDKEQDVDVSSHSYTINGLKKYTEYSFRVVAYNKHGPGVSTPDVAVRTLSDVPSAAPQNLSLEVRNSKSIMIHWQPPAPATQNGQITGYKIRYRKASRKSDVTETLVSGTQLSQLIEGLDRGTEYNFRVAALTINGTGPATDWLSAETFESDLDETRVPEVPSSLHVRPLVTSIVVSWTPPENQNIVVRGYAIGYGIGSPHAQTIKVDYKQRYYTIENLDPSSHYVITLKAFNNVGEGIPLYESAVTRPHTDTSEVDLFVINAPYTPVPDPTPMMPPVGVQASILSHDTIRITWADNSLPKHQKITDSRYYTVRWKTNIPANTKYKNANATTLSYLVTGLKPNTLYEFSVMVTKGRRSSTWSMTAHGTTFELVPTSPPKDVTVVSKEGKPKTIIVNWQPPSEANGKITGYIIYYSTDVNAEIHDWVIEPVVGNRLTHQIQELTLDTPYYFKIQARNSKGMGPMSEAVQFRTPKADSSDKMPNDQASGSGGKGSRLPDLGSDYKPPMSGSNSPHGSPTSPLDSNMLLVIIVSVGVITIVVVVIIAVFCTRRTTSHQKKKRAACKSVNGSHKYKGNSKDVKPPDLWIHHERLELKPIDKSPDPNPIMTDTPIPRNSQDITPVDNSMDSNIHQRRNSYRGHESEDSMSTLAGRRGMRPKMMMPFDSQPPQPVISAHPIHSLDNPHHHFHSSSLASPARSHLYHPGSPWPIGTSMSLSDRANSTESVRNTPSTDTMPASSSQTCCTDHQDPEGATSSSYLASSQEEDSGQSLPTAHVRPSHPLKSFAVPAIPPPGPPTYDPALPSTPLLSQQALNHHIHSVKTASIGTLGRSRPPMPVVVPSAPEVQETTRMLEDSESSYEPDELTKEMAHLEGLMKDLNAITTA

SEQ ID NO: 129270 - DNA, 4386 bp, Artificial Sequence
  derived and/or modified sequence
atggccgccgagaggggtgcaagacgattactcagtaccccatcgttctggttgtactgcctcttgctgctcggccggagggcccccggagcagcggcagccaggagcggctcagccccccagtcgccaggtgcctcaatcagaacgtttacacccttctattttttagtggaacccgtagacactctctcagtgaggggaagctcagtgatcctcaactgctctgcctacagcgaaccaagcccaaaaatcgagtggaagaaagacgggaccttcctgaatttagtgtccgatgatagacggcagctgctgcctgatggatcactttttatttcaaatgtggtccattctaagcataacaagcctgacgaaggatactatcagtgtgttgcaaccgtcgaaagcctcgggaccataataagccgaacggccaaacttatagtggccggcttaccacggtttacgtctcagccagaaccctcttctgtatatgccggcaataatgcaatcctgaattgcgaagtcaacgctgatctcgtaccttttgttcggtgggagcagaaccggcagccattgctgctggatgatagggtgataaagctcccaagtggcatgttagtgatttcaaatgctaccgagggcgatggggggctgtaccgttgtgtggtggagtctggaggtcctcccaaatactcagacgaggtcgagctgaaggtgcttccagacccagaggtgattagcgatctggtctttctgaagcaaccttcacccctagtaagggtaatcgggcaggacgtagtcctgccatgcgtggcctctgggttaccaacacctacgatcaagtggatgaagaatgaagaggcactggacaccgaatccagtgaaaggctggtgctcttggcgggcgggtccctggagatttctgatgtgaccgaagatgacgccgggacatacttctgtatagcagacaatgggaacgagaccattgaagctcaggcagaattgactgtgcaggcacagcctgagtttcttaaacagcccactaatatttatgcccacgaatctatggacattgttttcgagtgtgaggtgacaggtaaacccacacctacagtcaaatgggtcaagaatggcgatatggtgatacccagcgactacttcaaaatcgtcaaggagcataatcttcaggtgctggggttagtaaagagtgacgaaggcttttaccagtgtatcgccgagaacgacgtcgggaacgctcaggccggagcacagcttatcatcctcgagcacgcacccgcaaccactgggcccctgccatctgcccctagggacgtggtggcttcacttgtgtcaacgcgcttcatcaaactaacctggcgcacccccgcgagcgatccacacggcgacaacttgacctatagcgtgttttacaccaaggagggcatcgcccgcgaaagggtcgagaacaccagccaccctggtgaaatgcaagtcactatccagaacctcatgccagctaccgtgtacatttttcgggtgatggcgcagaataaacacggcagcggcgagtcaagcgccccccttagggtcgaaacacaaccagaagtccaactgcctggtcctgctcctaacctgcgtgcgtacgccgcttctccgacctccatcactgtgacctgggagacccccgtctctggaaacggagaaattcaaaactataagctgtactacatggaaaagggtacagacaaggaacaggatgtggacgttagtagtcattcctacaccattaatggtttgaagaagtacaccgaatacagctttcgcgtcgttgcctataataaacatggaccaggagtatccacccctgacgttgcagtgagaaccctctctgacgtccccagcgctgctccacagaacctttcactcgaggtgagaaactcaaaatcaattatgatccactggcagccccctgctcctgccacgcagaacggacaaatcacaggttataagatcaggtataggaaagctagtaggaagtccgatgtgacagaaacgttagtatcggggacacagttgtctcagctcattgaaggcctggaccgtggcactgagtataatttccgtgtcgccgctctgaccattaatgggacaggaccggctactgattggttgtctgcagagacctttgaatcagacctcgatgaaacacgcgtgccagaagtgcccagctccctccacgtgagacccttggtcacgtccatcgtggtatcttggacaccaccagagaatcagaacatcgtcgtgcggggttacgcaattggctatggaatcggatccccccatgctcaaacaataaaggtggactacaaacaacggtactacactatcgaaaatctcgatccctctagccattacgtgatcacccttaaggcatttaacaacgtgggggagggaatacctttgtacgaaagcgccgtaactagacctcacacagacacctctgaggtggatctcttcgttatcaacgcgccctacacaccagtgccagacccgactccaatgatgccgcctgtcggagtccaggcaagtatcctgtcccacgataccatccgcatcacttgggcagacaactctctgcccaaacatcagaagatcaccgattcccgctattatactgtgcgctggaaaacaaatattcccgctaacaccaagtataaaaacgcaaatgcaaccacactgagttaccttgtcaccgggttgaagcccaacacgttgtacgagttttccgtgatggttacaaaggggagacgcagctccacttggagcatgactgcccatggtacaacattcgagttagtgcccacttcccccccaaaagatgtcactgttgtgtccaaagaaggcaaacctaaaaccatcatagtgaactggcaaccacccagtgaagcaaacggcaagatcacaggctacataatatactattctactgacgttaacgctgaaatccacgactgggtgattgagccagtggtcggaaatcgcctgactcaccagattcaggagctaacattagataccccctattatttcaagattcaggcacggaacagtaaaggcatgggaccgatgtctgaggccgttcagtttcggaccccgaaggctgattcctccgacaaaatgcccaacgaccaggcatccggcagcggcggaaaagggagccggttaccagatctgggctcggattataagccacctatgagtgggtccaacagtcctcacggatcccccaccagcccgctcgattcaaatatgctgcttgtcatcatagtgtccgtcggcgtgataaccattgtggttgtagtgattatcgccgtgttctgtaccaggagaaccacctcccatcagaagaaaaagagagccgcatgcaagtccgtcaacgggtcccataaatataagggcaattccaaggacgttaaacccccagacttgtggattcaccatgaaaggttggagttgaaacctattgacaaatcgccggatccaaatccaatcatgacagacacaccgatcccacgcaatagccaggacatcacccctgtggacaactccatggatagcaacatccatcaacgtcgaaactcttatcggggccacgagtctgaagattcaatgtcaaccctggctggcaggcggggaatgcgaccgaaaatgatgatgccatttgactctcaaccgccgcagcccgttatctctgcccaccccatccatagcctggataacccccatcatcacttccactccagctccttggcctcccccgctagatctcatttgtaccaccccggctcaccttggccaatcgggacaagcatgtctctcagcgaccgggcaaactcgactgaatccgtgagaaatacaccaagcacagacacaatgccagcctcttcgtcgcagacctgctgtacagaccatcaagaccccgagggtgcaacaagctcttcttacttagcgagctcccaggaggaggatagcggtcagtccctgccgaccgctcatgtgaggccaagccatccgctaaaatcgtttgctgtccccgcaattccccccccagggcctccgacatatgatcctgccctaccatcaacaccacttctctcccagcaggcactgaaccaccacatacactccgtaaaaaccgcttctatagggaccctcggcagatcccggccccctatgccggttgtggtcccttctgctcctgaggtccaggagacaaccagaatgctcgaagactccgagagctcctacgagcctgacgagctgaccaaagaaatggcccacttggagggtctgatgaaggatctgaacgcaattactacggcatag

SEQ ID NO: 129271 - DNA, 4386 bp, Artificial Sequence
  derived and/or modified sequence
atggcagccgagaggggtgcccgccgtttgttgagtactccttccttctggttgtactgtctgcttttgttaggcaggagggcacctggggccgccgccgcaaggtccggcagcgctccacagagtcctggggctagcatcaggacctttacacccttttactttctggtggagcctgtcgatacactgtctgtgagaggtagtagtgtgattctaaactgcagtgcttactccgaaccatcccccaaaatcgaatggaagaaggatggaactttccttaacctcgtgtccgacgacaggcggcagctgctccccgacgggtctttgttcatcagcaatgtggtacatagtaaacataataaaccagatgaaggctattaccagtgtgtggcgaccgtcgaatccctcggaacaattatttccaggaccgctaaactcatcgtcgctggcctgcccaggtttaccagccagccagaaccttcctccgtgtacgcaggaaacaacgccatccttaattgcgaggtgaatgccgatcttgtccctttcgtgagatgggaacaaaatcgacaacctcttctgctggacgaccgcgttattaagctgccttcgggaatgctggtgatttccaatgccacagagggagacggcgggttgtataggtgtgtcgtggagtcgggcggtcccccaaagtattctgatgaggtggaactgaaggtgctgcctgacccggaggtgatatccgacttggtttttttgaagcagccttctccccttgtgcgtgtgataggccaagacgtggtacttccttgcgttgcatcggggctaccaaccccgacaatcaaatggatgaaaaacgaggaggccctcgatactgagagtagcgaaaggcttgtgcttctggccggtggttcacttgagatctctgacgtgactgaggacgacgccgggacttacttttgcatcgccgacaatggtaacgaaaccattgaggcacaggctgagcttactgtgcaggctcagcccgaattcttaaagcaacctacgaacatttatgcacacgagtccatggatatcgtgttcgaatgtgaagtcacgggtaagccaacaccgaccgttaaatgggttaagaatggagacatggtgatcccatccgattactttaaaattgtcaaggaacataacttacaggtcctggggctggtcaagtctgacgagggcttttatcagtgcatcgctgagaacgatgtcggaaatgctcaagccggcgcgcaactgataatcctggagcacgctccagcaacaacaggaccgctgccttccgctccgcgtgacgtagtggcctccctcgtgtcgacccgatttatcaagcttacttggcggactccagctagcgacccacacggggataatctgacatatagcgtcttttataccaaggaaggaatcgctcgcgaaagggtggagaatacctctcaccccggcgagatgcaggtgaccatccaaaatttaatgccggcaaccgtgtatattttccgcgtgatggctcaaaacaagcacggatccggcgagtcatcagcgccactgcgggtggaaactcagccagaggtgcagttacctggccccgctcccaacctgagagcctacgcggcatctcccaccagtatcacagtcacatgggagacgccagtatctggcaatggagaaatccagaactataagctgtattacatggagaaaggcaccgataaggagcaggatgtggatgtctcctcacatagttatacaatcaacggcttgaagaagtataccgaatacagtttccgggtagtggcctataacaaacatggccctggagtgtctactcccgacgttgctgtccgtaccctcagtgatgtaccctcagccgctccccagaacctttctctggaggtccgcaactctaagtccataatgatccactggcagccaccagcgcctgccacacagaatggccaaataactggctataaaattcgttaccgcaaagcttcaaggaaatccgatgtaaccgagacactcgtgtcagggactcagctgtctcagctgattgagggactagaccggggtactgaatataacttccgagtcgcagcgctcacaatcaatggcactgggccggctaccgattggttgtcagccgaaacgttcgaatccgatttggatgagactcgagtccccgaggtgcctagcagcctgcacgtgcgtcctctcgttacctcaattgtagtgtcttggactccacccgaaaaccagaacatcgtggtccgcgggtatgcaattggctatggaataggatccccccacgctcagaccataaaggttgactacaaacagcggtattatactatcgaaaacttggacccctcatcccactacgttatcactctgaaggccttcaacaacgtgggggagggcattcccctctacgagagcgcagtaacacggccgcacaccgacacatctgaagtggatctcttcgtaattaatgcaccatacacacctgtacctgaccccacccccatgatgcctcctgttggcgtgcaagcctcaatcctttctcatgacaccatcagaatcacatgggcggacaacagcctccccaagcatcaaaagatcactgactctaggtactataccgtgagatggaagactaatatccctgcaaacactaaatataaaaatgccaatgcgacaactctctcatatctggtgacaggtctcaagccaaataccctctacgaattctctgtgatggtgaccaaaggtagaaggtcgtccacgtggtctatgacagcccatggcacaacattcgagctggtgcccactagccctcctaaagacgttacagtggtctccaaggagggtaagcccaagactatcattgtgaattggcagcctcccagtgaagcaaacgggaaaattacgggctacataatctattattcaactgacgtgaatgccgagatccatgattgggttatcgagcccgtggtgggaaaccgcctgactcaccagatccaggagttaaccctggataccccgtactatttcaaaatccaggcaaggaacagcaaaggcatggggccaatgagcgaggccgtccagttcaggactcctaaagccgattccagcgacaagatgcctaacgaccaggcctctggtagtggaggcaaggggtcacggcttccagacctcggctccgattataaaccccctatgtccggcagtaacagtccccatggaagtccgacctccccgcttgatagcaacatgctgttagtgattatcgtgtctgtgggtgtaataaccatcgttgtggttgtgatcatagcggtattttgcactcggagaaccacaagtcatcagaaaaaaaaaagagcagcttgtaagagtgtcaacggctctcacaaatacaaggggaactctaaagacgtcaaaccccctgacttatggatacaccacgagaggctggagctgaaaccgatcgataagtccccagaccctaacccaattatgactgacacacccatccctcgcaattcacaagatatcacacccgttgacaactctatggatagcaacatccatcagcggcggaacagctatcgtgggcatgagagcgaggactctatgagtacactagcaggcagacgtgggatgcgccccaagatgatgatgccgtttgattcccagcccccacaaccagtcatctcggcccacccaatccacagcctagacaatccacatcatcacttccacagcagcagtttagcatcgcctgcccggagccatctgtatcaccctgggtccccctggccaatcggcacttcgatgagcttaagcgatcgcgccaacagcaccgagtccgtcaggaataccccctccacagataccatgcccgctagcagcagtcagacttgctgtacagaccaccaggaccctgaaggggcaacttcgtctagctaccttgccagctcccaagaggaggacagcgggcagtccctgccaaccgcacatgtgcgcccctctcatccactcaaatcatttgctgtccctgccattccccctccgggaccccctacctatgacccagcgctacccagcacccctctgttgtcccagcaggcccttaaccatcacattcactctgtgaagaccgcctccatcggcacactcgggcgatctcgacctccaatgcctgtcgtggttccctcagccccagaagtccaggagactaccagaatgctagaggactctgagtccagttatgagccagatgagctgactaaagagatggcacaccttgaaggactgatgaaagacctgaatgctattactaccgcttag

SEQ ID NO: 129272 - DNA, 4386 bp, Artificial Sequence
  derived and/or modified sequence
atggctgctgagcggggggcccggcggctgctgagcacccccagcttctggctgtactgcctgctgctgctgggccggcgggcccctggagctgctgctgcccggagcggcagcgccccccagagccctggggccagcatccgcaccttcacccccttctacttcctggtggagcctgtggacaccctgtctgtgcggggcagcagcgtcatcctgaactgcagcgcctacagcgagcccagccccaagattgagtggaagaaggatggcaccttcctgaacctggtgtctgatgaccggcggcagctgctgcctgatggcagcctcttcatcagcaatgtggtgcacagcaagcacaacaagccagatgagggctactaccagtgtgtggccaccgtggagagcctgggcaccatcatcagcaggacagccaagctgattgtggccggcctgccccgcttcaccagccagcctgagcccagctctgtgtatgccggcaacaatgccatcctgaactgtgaggtgaatgctgacctggtgccctttgtgcgctgggagcagaaccggcagcccctgctgctggatgacagagtcatcaagctgcccagcggcatgctggtgatcagcaatgccacagaaggagatggcggcctgtaccgctgtgtggtggagagcggcggcccccccaagtacagtgatgaggtggagctgaaggtgctgcctgaccctgaggtgatcagtgacctggtgttcctgaagcagcccagccccctggtgcgggtcatcggccaggatgtggtgctgccctgtgtggccagcggcctgcccacccccaccatcaagtggatgaagaatgaggaggccctggacacagagagcagcgagcggctggtgctgctggccggcggcagcctggagatcagtgatgtgacagaagatgatgctggcacctacttctgcatcgctgacaatggaaatgagaccatcgaggcccaggccgagctgactgtgcaggcccagcctgagttcctgaagcagcccaccaacatctatgcccacgagagcatggacatcgtgtttgaatgtgaggtgacaggcaagcccacccccaccgtgaagtgggtgaagaatggagacatggtgatccccagcgactacttcaagatcgtgaaggagcacaacctgcaggtgctgggcctggtgaagagtgatgagggcttctaccagtgcatcgcagaaaatgatgtgggcaatgcccaggccggggcccagctgatcatcctggagcacgccccagccaccaccggccccctgcccagcgcccccagagatgtggtggccagcctggtgtccacccgcttcatcaagctgacctggaggaccccagccagtgacccccatggagacaacctgacctacagcgtcttctacaccaaggagggcatcgcccgggagcgggtggagaacaccagccaccctggagagatgcaggtgaccatccagaacctgatgcctgccaccgtgtacatcttccgggtgatggcccagaacaagcacggcagcggggagagcagcgcccccctgcgggtggagacccagcctgaggtgcagctgcccggccctgcccccaacctgcgggcctatgctgccagccccaccagcatcaccgtgacctgggagacccctgtgtctggaaatggagagatccagaactacaagctgtactacatggagaagggcacagacaaggagcaggatgtggatgtgagcagccacagctacaccatcaatggcctgaagaagtacacagagtacagcttccgggtggtggcctacaacaagcacggccctggggtgtccaccccagatgtggccgtgaggaccctgagtgatgtgcccagcgctgccccccagaacctgagcctggaggtgaggaacagcaagagcatcatgatccactggcagcccccagccccagccacccagaatggccagatcaccggctacaagatccgctacaggaaggccagcaggaagagtgatgtgacagagaccctggtgtctggcacccagctgagccagctgattgagggcctggaccggggcacagagtacaacttccgggtggccgccctgaccatcaatggaactggacctgccacagactggctgtctgctgagacctttgaaagtgacctggatgagaccagggtgcctgaggtgcccagcagcctgcacgtgcggcccctggtgaccagcatcgtggtgtcctggaccccacctgagaaccagaacatcgtggtgcggggctacgccatcggctatggaattggcagcccccacgcccagaccatcaaggtggactacaagcagcgctactacaccatcgagaacctggaccccagcagccactacgtgatcaccctgaaggccttcaacaacgtgggggagggcatccccctgtatgagagcgctgtgacccggccccacacagacaccagcgaggtggacctgtttgtgatcaatgccccctacacccctgtgcctgaccccacccccatgatgcctcctgtgggcgtgcaggccagcatcctgagccatgacaccatccgcatcacctgggccgacaacagcctgcccaagcaccagaagatcacagacagccgctactacacagtgcgctggaagaccaacatcccagccaacaccaagtacaagaatgccaatgccaccaccctgagctacctggtgacaggcctgaagcccaacaccctgtatgagttctctgtgatggtgaccaagggccgccgcagcagcacctggagcatgacagcccacggcaccacctttgagctggtgcccaccagcccccccaaggatgtgacagtggtgtccaaggagggcaagcccaagaccatcatcgtgaactggcagcccccatctgaggccaacgggaagatcaccggctacatcatctactacagcacagatgtgaatgctgagatccatgactgggtgattgagcctgtggtgggcaaccggctgacccaccagatccaggagctgaccctggacaccccctactacttcaagatccaggccaggaacagcaagggcatgggccccatgtctgaggccgtgcagttccgcacccccaaggctgacagcagtgacaagatgcccaatgaccaggccagcggcagcggcggcaagggcagccggctgcctgacctgggcagtgactacaagccacccatgagcggcagcaacagcccccacggcagccccaccagccccctggacagcaacatgctgctggtgatcatcgtgtctgtgggcgtcatcaccatcgtggtggtggtgatcatcgctgtgttctgcaccaggaggaccaccagccaccagaagaagaagagagctgcctgcaagtctgtgaatggcagccacaagtacaagggcaacagcaaggatgtgaagcccccagacctgtggatccaccacgagcggctggagctgaagcccatcgacaagagcccagaccccaaccccatcatgacagacacccccatccccaggaacagccaggacatcacccctgtggacaacagcatggacagcaacatccaccagaggaggaacagctaccggggccacgagagtgaagattccatgagcaccctggccggccggcggggcatgaggcccaagatgatgatgccctttgacagccagcccccccagcccgtcatcagcgcccaccccatccacagcctggacaacccccaccaccacttccacagcagcagcctggccagccctgcccggagccacctgtaccaccctggcagcccctggcccatcggcacctccatgagcctgagtgaccgggccaacagcacagagagcgtgaggaacacccccagcacagacaccatgcctgccagcagcagccagacctgctgcacagaccaccaggaccctgagggcgccaccagcagcagctacctggccagcagccaggaggaggacagcggccagagcctgcccacagcccacgtgcggcccagccaccccctgaagagctttgctgtgcctgccatccccccacctggcccccccacctatgaccctgccctgcccagcacccccctgctgagccagcaggccctgaaccaccacatccacagcgtgaagacagccagcatcggcaccctgggccgcagccggccccccatgcctgtggtggtgcccagcgcccctgaggtgcaggagaccaccaggatgctggaggacagcgagagcagctatgagccagatgagctgaccaaggagatggcccacctggagggcctgatgaaggacctgaatgccatcaccacagcctag

SEQ ID NO: 129273 - DNA, 4386 bp, Artificial Sequence
  derived and/or modified sequence
atggccgccgagcggggcgcccggcggctgctgagcacccccagcttctggctgtactgtctcctgctgcttggtcggagagcccccggcgcagccgctgccagatccggtagcgcaccccagagccccggagccagcattagaacattcactccattctacttcctggtggagccagtcgacaccctgtctgtgcggggttcctcggtgattctgaattgttccgcgtactccgagccatctcctaaaattgagtggaaaaaagacggcacctttctaaacctggtgagtgacgataggcgacagctgctgccagacggtagtctgttcatttctaacgtagtacactctaagcacaataagcccgacgaaggctactatcagtgtgttgcaaccgtggagtctctgggcacgatcatcagcaggaccgccaaactgattgtggccggccttcccaggttcacttcccaacccgaaccctccagtgtgtatgcgggcaataatgcaattctaaattgcgaggttaatgcagatttagtccctttcgtccgatgggagcagaacagacagccgctgttgctggacgatcgcgtgattaaactgcccagtgggatgctagtaatttctaacgcgaccgaaggcgatggcggcctgtaccggtgtgtggtggagtctggaggacccccgaagtattctgatgaagtggaattaaaggtgctgcctgatccggaggtgatttccgaccttgtgttcctgaagcaaccatcacctctcgtgagagtgatcgggcaggacgtagtcttaccctgcgtagcatccggtctgccgacccccactattaagtggatgaaaaatgaggaggcactggacacagagagttcggagagactcgtattgctggcaggaggaagcctggagatttcagatgtcactgaggacgacgcgggcacttacttctgcatcgcggataatggcaacgaaacaatcgaggcacaagctgagctcacggtacaagcgcaacctgagttcctgaaacaaccgacaaatatctatgcacatgaatctatggatatagtgttcgagtgtgaggttacaggaaaacctacgccgaccgtcaagtgggtaaagaacggcgatatggtcataccatcggattattttaagattgttaaggagcacaacctgcaagtactgggtctggtcaaatccgatgagggattctaccagtgcatcgctgagaacgacgttggaaacgctcaagccggggcccagctgatcatactggaacacgcccccgccactacggggcctctgccatcagcgccacgcgatgtggtggccagcctcgtgagcaccagatttatcaaactgacgtggcggacccccgcttcagatcctcacggtgacaaccttacttacagcgtgttctacaccaaagaagggattgccagggagagagttgagaacacatcccatccaggagagatgcaggtcacaatccagaatctcatgccagcaaccgtgtatatttttagagtgatggctcagaataaacacgggagcggcgagagttcagccccattgagggttgagacacagcctgaggtgcagcttcccggcccggcccccaatctcagagcctacgctgcctctcccacgagcataacagtgacgtgggagactcctgtttcgggcaacggggaaatacagaattataagctttactacatggagaagggaaccgataaggaacaagacgtggatgttagtagccactcttacacaatcaatgggctgaaaaaatatacagaatacagttttcgagtggtggcatacaataagcatggacccggcgtgagcactcctgatgtggctgtgaggacccttagcgacgttccaagcgctgctcctcagaatttgtccttggaggttaggaatagtaaaagtattatgatccattggcaacctcctgctccagctactcagaatggtcaaattaccggttacaaaatccggtaccgaaaagcgagcagaaaaagtgacgtgacagagaccctcgtttccggaactcaactgtctcagctcatcgagggactggatcggggtaccgaatacaacttccgagtggcagcactcacaatcaatggcacaggtccagcgacagattggttgagcgctgagaccttcgagagcgacctggatgagacccgggtgcccgaggtccctagcagccttcacgtgcggccccttgtgactagtatagtagttagttggacaccgcccgagaaccagaatattgtggtcaggggctacgcaatcggttacggtataggtagcccacatgcacaaaccattaaagtcgattataagcagcggtattacactattgagaacctggacccttcctcccattacgtgatcacgctcaaggctttcaataacgtaggagaaggaattccgctgtacgaatcagccgtgacgagaccccacaccgacactagtgaggtagatctgttcgtgatcaatgctccatacacacctgttccagatcccacccccatgatgccacctgtcggtgtgcaggcctccatcctcagtcatgatacaattcggatcacttgggccgataactcactccctaagcaccagaaaatcacagactcaagatattacaccgtgaggtggaaaactaatataccagccaatacaaaatacaaaaatgccaacgcgaccactttgagctatctcgtaacgggattaaagcccaataccctgtacgagtttagcgtgatggtcaccaagggcaggagaagcagtacctggtccatgaccgcccacggaaccaccttcgaactcgtgcctacgtcaccccctaaagacgttacagtcgtcagcaaggaaggaaagccaaagactattatagtgaactggcagcctcccagcgaggccaatggtaagataactggatatatcatatactactccacagacgttaatgccgaaatacacgactgggtaatcgagccagtggtgggtaaccggttgacccaccagatccaggagctgactttggacaccccttactattttaagattcaagcgcggaattccaaaggaatgggccccatgtccgaagccgtgcagtttagaactccaaaggctgatagcagcgacaagatgccaaatgatcaagcctccgggtctggcggaaaaggaagccgcctgcctgatctcggttccgactacaagccacccatgtctggatccaattcgcctcatggatctcccacctctcctctcgattctaacatgctgcttgtcattattgtatccgtgggggtgattaccatcgtcgtagttgtgatcatcgccgtgttctgcaccagaaggactacttcccaccagaaaaagaaacgggctgcatgtaagtccgtgaatggctcacataaatataaaggcaactcaaaagacgttaaaccaccagatctgtggatccaccacgagcgtttagagctgaaacctattgacaaatcaccggaccccaacccaataatgactgatactccaatccctagaaattctcaggacattacccctgtagacaacagtatggattcgaacatccaccaacgacggaactcctataggggacatgagtcagaagactccatgagcactctcgcagggcggagaggtatgcgaccaaagatgatgatgcctttcgactcccaacctccacagcccgtgattagcgcccatcctattcactctctggataatccacaccaccacttccacagctcctctctcgcatcccctgctcgttctcacctttatcatcccggctcaccgtggccaataggaaccagcatgtctctgtctgatcgcgcaaattctaccgagagcgtgcgcaatactccttcaacggacactatgcccgcatcttcttctcagacttgttgtacagatcatcaggatcccgagggcgctacgagctcaagctatctggcctcctcccaggaagaggatagcgggcaaagtctgccgacggcacacgtcagaccctctcacccccttaaaagctttgccgtccccgccatccctccccctggtccccctacgtacgatcccgctctgccctccacacccctcctatcccagcaggccttaaaccatcatatccatagcgtgaagacggctagcatcggaacactgggacggagcaggcctcccatgcctgtggtggtcccgagcgcccctgaagtgcaggagacaaccagaatgctcgaggactccgagtcatcttacgagccagacgagcttaccaaggagatggctcatctggaaggcctcatgaaagacctgaacgctataactaccgcgtag

SEQ ID NO: 129274 - DNA, 4386 bp, Artificial Sequence
  derived and/or modified sequence
atggccgccgagcggggcgcccggcggctgctgagcacccccagcttttggttgtattgtttgctgctactcggacggagagcgcctggagctgctgccgcacgttcaggaagtgcacctcagtctccaggtgcttccatcagaaccttcactccattttatttcctcgtcgaacccgtggacaccctgtccgtaagaggttctagcgtgatactcaattgtagcgcgtacagcgaaccctctcccaagatcgagtggaaaaaagacggtacctttctcaatctcgtgtctgatgaccgccggcagcttctaccagatggatcgctgttcatttctaacgtagtgcactcaaagcataataagcccgacgagggatactatcagtgcgtagcgacagtcgagagtctggggacaattatttcccggacagctaagctcatagtcgccgggttgcccagatttacgtcccagcccgagcccagctccgtctatgccggcaataatgccattctaaattgcgaggttaacgccgatctggtgccatttgtgcgctgggaacaaaacaggcagccactccttctggacgatcgcgtcattaaacttccatctggcatgctggtgatttccaacgctacagaaggcgatgggggattgtatagatgcgttgtggagagtggaggtccccccaagtacagtgatgaagtggagctcaaagtgctccccgacccagaggttattagtgaccttgtgtttctgaagcagccttcacctctggtgcgggtgatcggccaggacgtggttctgccatgtgtggcttccggtctcccaactccgaccattaaatggatgaagaatgaagaagccctcgataccgaatctagtgagcggctcgtgctgcttgccggaggatctttggagatttcggatgtgactgaggatgacgctggaacctatttttgcatcgccgacaacgggaatgagaccatagaggctcaagcggagctgaccgtgcaggctcagcctgagttcctgaagcagccaacaaatatctatgcccatgagtccatggatatagttttcgagtgcgaggtgactggaaaaccgacaccaaccgtgaaatgggttaaaaacggcgacatggtcatcccttcagactactttaaaatcgttaaagagcacaatcttcaagtgttagggctggtgaagtccgatgaagggttttatcagtgtattgcggaaaacgatgtaggtaacgcccaggctggggcacagcttatcatcctagagcatgcccccgccactactggtccccttccctcggctccaagggatgtggtcgcctcactggtttctacccgatttatcaaactgacctggcgcactccagcttcagacccccatggcgacaatttgacctacagcgtgttctacaccaaggagggaatagcacgtgagcgagtggagaacaccagtcacccgggagagatgcaggtcacgattcagaacctgatgcctgcaaccgtttacatcttccgcgtgatggcgcagaacaagcatggcagtggagagagttctgccccactacgcgttgagacacagccggaggtacagctgcctggcccggccccgaatctacgagcatatgcggccagcccgaccagcattacggtgacctgggaaacaccggtctctggcaacggcgaaattcagaattacaaactgtactacatggagaaaggcacggataaagaacaggacgtcgacgtgtcatcccacagctatactatcaatggcttgaaaaaatacacagagtacagcttcagggtggtggcatacaataaacatggtcctggcgtgagtacacctgacgtggcagtgcggactctgagcgacgtccctagtgcagctcctcagaacctttccctcgaggtgcggaatagtaaatcgatcatgattcactggcaaccacccgccccagcaacacagaacggacagattaccggctacaaaatccggtaccggaaggctagccggaagagcgacgtcactgagacgctggtgagcggcacccaactctcgcagctgatcgagggtttagataggggtacagagtacaactttcgggtagccgcgctgacaatcaacgggactggtccggccacggattggctgtcagctgagacatttgaaagtgatctggacgaaaccagggtacctgaggttcctagttctctgcacgtccgccccctggtgacctcaattgtggtgagctggactcctccggagaaccagaacattgtggtaagaggctacgctatcgggtacggaatcgggtcacctcacgcgcaaaccattaaggttgactataagcagcgctactatacgatagaaaacctggacccctcctcccactatgtcattaccctcaaggcgttcaacaatgtgggtgaaggaattccgctttatgagagcgcagtcaccagaccccatacagatactagcgaggtggacctgtttgttatcaacgctccgtatacacctgttcccgatccgacccccatgatgccccctgtaggagtgcaagcctctatcctgagtcatgatacaatccgcattacatgggccgataattcgttaccaaagcatcagaagataactgattcccgctattacactgtccgatggaagactaacattcccgcaaataccaaatataagaatgccaatgcgaccactttgtcctacttagtgaccggcctaaaaccaaataccctatatgaattctcggtcatggtcactaagggcaggcggtcctctacctggtccatgaccgcacacggaacaaccttcgagttagtgcctacgtctccccctaaagatgtcaccgtggtgagtaaagaaggcaaacccaagacaatcattgtcaattggcagccacccagtgaggctaacgggaaaataacgggatacatcatctattattccacagacgtgaatgccgagatacatgattgggtaatagaacccgtggtgggaaatagactgacacatcagatacaggagctcaccttggacaccccatactactttaaaattcaggcccggaactcaaaggggatggggccaatgtccgaagcagtgcagttccgaacaccaaaagccgactcctctgacaaaatgcccaacgatcaagcatcgggctccgggggcaagggaagccggctgcctgacctgggatctgattacaagccccccatgtcaggctcaaatagccctcatggttcccccacctctcctctggactctaatatgctcctcgtaatcatagtgtctgtgggggttattactatagttgtcgtggtaattattgctgttttttgtactcgcaggaccacctctcatcaaaaaaaaaagcgggcggcgtgcaagtccgtcaacggttcccacaaatataagggcaactcaaaggatgtgaaaccaccggacctctggatacatcacgaacgtctggagctcaaaccaattgacaaaagtccggatccaaaccccatcatgacagatacacccatcccccgaaactctcaggacattacacctgtcgacaattcgatggactcaaatatacatcagcgtaggaacagttacaggggccacgagtctgaggacagcatgtccactctcgcaggcagaagaggaatgcggccaaagatgatgatgccctttgattcccagccgcctcagccagtgatctctgctcatcctattcatagtttagataaccctcatcaccacttccactcaagttccttggccagtcccgcacgctcacacctataccaccccggtagcccctggccaatcggaacatctatgtctctgagtgatagggcgaactccacggagtctgtaagaaataccccaagcactgacaccatgcctgcctcttcatcccagacatgttgtactgaccatcaggacccggagggagccaccagctctagctacctggccagttcacaagaagaggattccgggcagtcactgcctactgcccatgtccgcccaagccaccccttgaaaagctttgcagtgcccgccatccccccacccggccctcccacatacgatcccgcacttcctagtacaccgctactctcacaacaggcgcttaatcaccacatccactccgtaaaaactgcaagcatcggcacgcttggtcggagtcggccgccaatgcctgttgtggtaccaagtgcccctgaggtgcaggagacaactagaatgcttgaggattccgaatcgtcttacgaaccagatgaattgacgaaggagatggctcatctggagggtctgatgaaagacttaaacgccattactaccgcatag

SEQ ID NO: 129275 - DNA, 7088 bp, Artificial Sequence
  derived and/or modified sequence
gagggaggcgccctggagtctcccctccagcgagaggggctgcgcgggccgggccgggccgggctgggctggagcagcggcggccgcgggagccgagcttgcagcgagggaccggctgaggcgcgcgggagggaaggaggcaagggctccgcggcgctgtcgccgccgctgccgctcactctcggggaagagatggcggcggagcggggagcccggcgactcctcagcaccccctccttctggctctactgcctgctgctgctcgggcgccgggcgccgggcgccgcggccgccaggagcggctccgcgccgcagtccccaggagccagcattcgaacgttcactccattttattttctggtggagccggtggatacactctcagttagaggctcttctgttatattaaactgttcagcatattctgagccttctccaaaaattgaatggaaaaaagatggaacttttttaaacttagtatcagatgatcgacgccagcttctcccggatggatctttatttatcagcaatgtggtgcattccaaacacaataaacctgatgaaggttattatcagtgtgtggccactgttgagagtcttggaactattatcagtagaacagcgaagctcatagtagcaggtcttccaagatttaccagccaaccagaaccttcctcagtttatgctgggaacaatgcaattctgaattgtgaagttaatgcagatttggtcccatttgtgaggtgggaacagaacagacaaccccttcttctggatgatagagttatcaaacttccaagtggaatgctggttatcagcaatgcaactgaaggagatggcgggctttatcgctgcgtagtggaaagtggtgggccaccaaagtatagtgatgaagttgaattgaaggttcttccagatcctgaggtgatatcagacttggtatttttgaaacagccttctcccttagtcagagtcattggtcaggatgtagtgttgccatgtgttgcttcaggacttcctactccaaccattaaatggatgaaaaatgaggaggcacttgacacagaaagctctgaaagattggtattgctggcaggtggtagcctggagatcagtgatgttactgaggatgatgctgggacttatttttgtatagctgataatggaaatgagacaattgaagctcaagcagagcttacagtgcaagctcaacctgaattcctgaagcagcctactaatatatatgctcacgaatctatggatattgtatttgaatgtgaagtgactggaaaaccaactccaactgtgaagtgggtcaaaaatggggatatggttatcccaagtgattattttaagattgtaaaggaacataatcttcaagttttgggtctggtgaaatcagatgaagggttctatcagtgcattgctgaaaatgatgttggaaatgcacaagctggagcccaactgataatccttgaacatgcaccagccacaacgggaccactgccttcagctcctcgggatgtcgtggcctccctggtctctacccgcttcatcaaattgacgtggcggacacctgcatcagatcctcacggagacaaccttacctactctgtgttctacaccaaggaagggattgctagggaacgtgttgagaataccagtcacccaggagagatgcaagtaaccattcaaaacctaatgccagcgaccgtgtacatctttagagttatggctcaaaataagcatggctcaggagagagttcagctccactgcgagtagaaacacaacctgaggttcagctccctggcccagcacctaaccttcgtgcatatgcagcttcgcctacctccatcactgttacgtgggaaacaccagtgtctggcaatggggaaattcagaattataaattgtactacatggaaaaggggactgataaagaacaggatgttgatgtttcaagtcactcttacaccattaatgggttgaaaaaatatacagagtatagtttccgagtggtggcctacaataaacatggtcctggagtttccacaccagatgttgctgttcgaacattgtcagatgttcccagtgctgctcctcagaatctgtccttggaagtgagaaattcaaagagtattatgattcactggcagccacctgctccagccacacaaaatgggcagattactggctacaagattcgctaccgaaaggcctcccgaaagagtgatgtcactgagaccttggtaagcgggacacagctgtctcagctgattgaaggtcttgatcgggggactgagtataatttccgagtggctgctctaacaatcaatggtacaggcccggcaactgactggctgtctgctgaaacttttgaaagtgacctagatgaaactcgtgttcctgaagtgcctagctctcttcacgtacgcccgctcgttactagcatcgtagtgagctggactcctccagagaatcagaacattgtggtcagaggttacgccattggttatggcattggcagccctcatgcccagaccatcaaagtggactataaacagcgctattacaccattgaaaatctggatcccagctctcactatgtgattaccctgaaagcatttaataacgtgggtgaaggcatccccctgtatgagagtgctgtgaccaggcctcacacagacacttctgaagttgatttatttgttattaatgctccatacactccagtgccagatcccactcccatgatgccaccagtgggagttcaggcttccattctgagtcatgacaccatcaggattacgtgggcagacaactcgctgcccaagcaccagaagattacagactcccgatactacaccgtccgatggaaaaccaacatcccagcaaacaccaagtacaagaatgcaaatgcaaccactttgagttatttggtgactggtttaaagccgaatacactctatgaattctctgtgatggtgaccaaaggtcgaagatcaagtacatggagtatgacagcccatgggaccacctttgaattagttccgacttctccacccaaggatgtgactgttgtgagtaaagaggggaaacctaagaccataattgtgaattggcagcctccctccgaagccaatggcaaaattacaggttacatcatatattacagtacagatgtgaatgcagagatacatgactgggttattgagcctgttgtgggaaacagactgactcaccagatacaagagttaactcttgacacaccatactacttcaaaatccaggcacggaactcaaagggcatgggacccatgtctgaagctgtccaattcagaacacctaaagcggactcctctgataaaatgcctaatgatcaagcctcagggtctggagggaaaggaagccggctgccagacctaggatccgactacaaacctccaatgagcggcagtaacagccctcatgggagccccacctctcctctggacagtaatatgctgctggtcataattgtttctgttggcgtcatcaccatcgtggtggttgtgattatcgctgtcttttgtacccgtcgtaccacctctcaccagaaaaagaaacgagctgcctgcaaatcagtgaatggctctcataagtacaaagggaattccaaagatgtgaaacctccagatctctggatccatcatgagagactggagctgaaacccattgataagtctccagacccaaaccccatcatgactgatactccaattcctcgcaactctcaagatatcacaccagttgacaactccatggacagcaatatccatcaaaggcgaaattcatacagagggcatgagtcagaggacagcatgtctacactggctggaaggcgaggaatgagaccaaaaatgatgatgccctttgactcccagccaccccagcctgtgattagtgcccatcccatccattccctcgataaccctcaccatcatttccactccagcagcctcgcttctccagctcgcagtcatctctaccacccgggcagcccatggcccattggcacatccatgtccctttcagacagggccaattccacagaatccgttcgaaatacccccagcactgacaccatgccagcctcttcgtctcaaacatgctgcactgatcaccaggaccctgaaggtgctaccagctcctcttacttggccagctcccaagaggaagattcaggccagagtcttcccactgcccatgttcgcccttcccacccattgaagagcttcgccgtgccagcaatcccgcctccaggacctcccacctatgatcctgcattgccaagcacaccattactgtcccagcaagctctgaaccatcacattcactcagtgaagacagcctccatcgggactctaggaaggagccggcctcctatgccagtggttgttcccagtgcccctgaagtgcaggagaccacaaggatgttggaagactccgagagtagctatgaaccagatgagctgaccaaagagatggcccacctggaaggactaatgaaggacctaaacgctatcacaacagcatgacgaccttcaccaggacctgacttcaaacctgagtctggaagtcttggaacttacccttgaaaacaaggaattgtacagagtacgagaggacagcacttgagaacacagaatgagccagcagactggccagcgcctctgtgtagggctggctccaggcatggccacctgccttcccctggtcagcctggaagaagcctgtgtcgaggcagcttccctttgcctgctgatattctgcaggactgggcaccatgggccaaaattttgtgtccagggaagaggcgagaagtgcaacctgcatttcactttgtggtcaggccgtgtctttgtgctgtgactgcatcacctttatggagtgtagacattggcatttatgtacaattttatttgtgtcttattttattttaccttcaaaaacaaaaacgccatccaaaaccaaggaagtccttggtgttctccacaagtggttgacatttgactgcttgttccaattatgtatggaaagtctttgacagtgtgggtcgttcctggggttggcttgttttttggtttcatttttattttttaattctgagtcattgcatcctctaccagctgttaatccatcactctgagggggaggaaatgttgcattgctgtttgtaagctttttttattatttttttattataattattaaaggcctgactctttcctctcatcactgtgagattacagatctatttgaattgaatgaaatgtaacattgaaaagacttgtttgttgctttctgtgcagtttcagtattggggcgggtggggggctgggggttggtaataggaaatggaggggctgctgaggtcctgtgaatgtttctgtcattgtactttcttccagaagcctgcagagaatggaagcatcttctttattgtcctttcctggcatgtccatccttattgtcactacgttgcaactggagtttgatttggatctggttttaaaattcttctgtgcaatagatgggtttgaggatttagcggccctgatgtcttggtcatagcctggtaagaatgtccatgctgaggagccagatgttgtatttctaactgcctgagtcacacagaatagggtaagagcctgaccccattctgtaaatcagaaagcaaggatggagaccctttcctgctgctattattggctctctttgaggaagttggaggttaaggaaggaacttgtttgtttccgtatacgactccttcttctctctagttcagtcttcagccagtccagcgctctcttccacacttcagagccccttcagagaaagcattagcaggaatgagacaaggcagagctgcagtgccccctgaggcttccacacatctttctgaatattatttttcaagtaacaagggcagggacagcggaaacagctgcccaccccccccatcccagcagctcagctaagccctgatgagaatgaagccacaggagttgtctgaggtgaacccagccgctcagccacacatggaagccattgcctttgcacatagttcttgggttctttttcctaaaaaggtaaggagctgaggtgtgtggttttttaatattaagaatatataatggaaaacacacgactgacgctcaggcatcttcccctactccccaacagatccccagaagacagcgtggaaggcagtgtagacagtaaatcgggcttcagttctatagccaagaagagatcagctgctgaaaccaccagtgggtaccccaggccacctgcctttgaacttggggatttgccatgtttgatcttgtcacatacttgcttttttacaagatgaactctttgtatttatgatttggggggcaatgaaaggtgcaatgcaggaactgctgctgccgagctcgctggtcacatgggggtgccaggcgggattctggaaaaccagtgcacttaaactgatcctgaagagagctgtcccagcactctggccaccaggagggccagattccccagaaactaccttttgcccaaagaacatgctcagtatttggggcatttcctcccacaaaccctgactgcttctgttacctcagggccttggtacctggatactgccacagaattggggcgggtgggggaggggcctatttttaaataaaataactgttcaaagttgggggttttttaaaaaattaagaaaaaggaaagctattctgtattgcaccttttcacaatttaatacattttcttacattttcctgtgattttcgaaactaaaccattgtgtgtcctgtagtgtcctggttgagctgccgctcagcagcttcctcggggggatttggaacacctgtgtctgtcgccgcactgcctgtgggaggggcccagagggctgctgggactggcgtctgtacacacttgtttggccttttctgtagttgatgctgtaaactctatggctttttaaaaacgatttcatgtttttatttagtattggaaatccaatacacttttttaatccaatcaaac

SEQ ID NO: 129276 - DNA, 7342 bp, Artificial Sequence
  derived and/or modified sequence
ggtcagcggctgcgcggccggccccctcccacgggagccgcgccagggcccagcaagagtcgggcgggatcgctattgtttttggcgagcacataaatccccgggccgacccactgcgcacccaggtttcctcccggaggcctttcggtttcctctgaggccctatatagaggctccaggcccggactgtgcagaggtgcgcgcccacgccggcctcccggaccagcctgagctcggagcgcctctcgccctcaggagggaggcgccctggagtctcccctccagcgagaggggctgcgcgggccgggccgggccgggctgggctggagcagcggcggccgcgggagccgagcttgcagcgagggaccggctgaggcgcgcgggagggaaggaggcaagggctccgcggcgctgtcgccgccgctgccgctcactctcggggaagagatggcggcggagcggggagcccggcgactcctcagcaccccctccttctggctctactgcctgctgctgctcgggcgccgggcgccgggcgccgcggccgccaggagcggctccgcgccgcagtccccaggagccagcattcgaacgttcactccattttattttctggtggagccggtggatacactctcagttagaggctcttctgttatattaaactgttcagcatattctgagccttctccaaaaattgaatggaaaaaagatggaacttttttaaacttagtatcagatgatcgacgccagcttctcccggatggatctttatttatcagcaatgtggtgcattccaaacacaataaacctgatgaaggttattatcagtgtgtggccactgttgagagtcttggaactattatcagtagaacagcgaagctcatagtagcaggtcttccaagatttaccagccaaccagaaccttcctcagtttatgctgggaacaatgcaattctgaattgtgaagttaatgcagatttggtcccatttgtgaggtgggaacagaacagacaaccccttcttctggatgatagagttatcaaacttccaagtggaatgctggttatcagcaatgcaactgaaggagatggcgggctttatcgctgcgtagtggaaagtggtgggccaccaaagtatagtgatgaagttgaattgaaggttcttccagatcctgaggtgatatcagacttggtatttttgaaacagccttctcccttagtcagagtcattggtcaggatgtagtgttgccatgtgttgcttcaggacttcctactccaaccattaaatggatgaaaaatgaggaggcacttgacacagaaagctctgaaagattggtattgctggcaggtggtagcctggagatcagtgatgttactgaggatgatgctgggacttatttttgtatagctgataatggaaatgagacaattgaagctcaagcagagcttacagtgcaagctcaacctgaattcctgaagcagcctactaatatatatgctcacgaatctatggatattgtatttgaatgtgaagtgactggaaaaccaactccaactgtgaagtgggtcaaaaatggggatatggttatcccaagtgattattttaagattgtaaaggaacataatcttcaagttttgggtctggtgaaatcagatgaagggttctatcagtgcattgctgaaaatgatgttggaaatgcacaagctggagcccaactgataatccttgaacatgcaccagccacaacgggaccactgccttcagctcctcgggatgtcgtggcctccctggtctctacccgcttcatcaaattgacgtggcggacacctgcatcagatcctcacggagacaaccttacctactctgtgttctacaccaaggaagggattgctagggaacgtgttgagaataccagtcacccaggagagatgcaagtaaccattcaaaacctaatgccagcgaccgtgtacatctttagagttatggctcaaaataagcatggctcaggagagagttcagctccactgcgagtagaaacacaacctgaggttcagctccctggcccagcacctaaccttcgtgcatatgcagcttcgcctacctccatcactgttacgtgggaaacaccagtgtctggcaatggggaaattcagaattataaattgtactacatggaaaaggggactgataaagaacaggatgttgatgtttcaagtcactcttacaccattaatgggttgaaaaaatatacagagtatagtttccgagtggtggcctacaataaacatggtcctggagtttccacaccagatgttgctgttcgaacattgtcagatgttcccagtgctgctcctcagaatctgtccttggaagtgagaaattcaaagagtattatgattcactggcagccacctgctccagccacacaaaatgggcagattactggctacaagattcgctaccgaaaggcctcccgaaagagtgatgtcactgagaccttggtaagcgggacacagctgtctcagctgattgaaggtcttgatcgggggactgagtataatttccgagtggctgctctaacaatcaatggtacaggcccggcaactgactggctgtctgctgaaacttttgaaagtgacctagatgaaactcgtgttcctgaagtgcctagctctcttcacgtacgcccgctcgttactagcatcgtagtgagctggactcctccagagaatcagaacattgtggtcagaggttacgccattggttatggcattggcagccctcatgcccagaccatcaaagtggactataaacagcgctattacaccattgaaaatctggatcccagctctcactatgtgattaccctgaaagcatttaataacgtgggtgaaggcatccccctgtatgagagtgctgtgaccaggcctcacacagacacttctgaagttgatttatttgttattaatgctccatacactccagtgccagatcccactcccatgatgccaccagtgggagttcaggcttccattctgagtcatgacaccatcaggattacgtgggcagacaactcgctgcccaagcaccagaagattacagactcccgatactacaccgtccgatggaaaaccaacatcccagcaaacaccaagtacaagaatgcaaatgcaaccactttgagttatttggtgactggtttaaagccgaatacactctatgaattctctgtgatggtgaccaaaggtcgaagatcaagtacatggagtatgacagcccatgggaccacctttgaattagttccgacttctccacccaaggatgtgactgttgtgagtaaagaggggaaacctaagaccataattgtgaattggcagcctccctccgaagccaatggcaaaattacaggttacatcatatattacagtacagatgtgaatgcagagatacatgactgggttattgagcctgttgtgggaaacagactgactcaccagatacaagagttaactcttgacacaccatactacttcaaaatccaggcacggaactcaaagggcatgggacccatgtctgaagctgtccaattcagaacacctaaagcggactcctctgataaaatgcctaatgatcaagcctcagggtctggagggaaaggaagccggctgccagacctaggatccgactacaaacctccaatgagcggcagtaacagccctcatgggagccccacctctcctctggacagtaatatgctgctggtcataattgtttctgttggcgtcatcaccatcgtggtggttgtgattatcgctgtcttttgtacccgtcgtaccacctctcaccagaaaaagaaacgagctgcctgcaaatcagtgaatggctctcataagtacaaagggaattccaaagatgtgaaacctccagatctctggatccatcatgagagactggagctgaaacccattgataagtctccagacccaaaccccatcatgactgatactccaattcctcgcaactctcaagatatcacaccagttgacaactccatggacagcaatatccatcaaaggcgaaattcatacagagggcatgagtcagaggacagcatgtctacactggctggaaggcgaggaatgagaccaaaaatgatgatgccctttgactcccagccaccccagcctgtgattagtgcccatcccatccattccctcgataaccctcaccatcatttccactccagcagcctcgcttctccagctcgcagtcatctctaccacccgggcagcccatggcccattggcacatccatgtccctttcagacagggccaattccacagaatccgttcgaaatacccccagcactgacaccatgccagcctcttcgtctcaaacatgctgcactgatcaccaggaccctgaaggtgctaccagctcctcttacttggccagctcccaagaggaagattcaggccagagtcttcccactgcccatgttcgcccttcccacccattgaagagcttcgccgtgccagcaatcccgcctccaggacctcccacctatgatcctgcattgccaagcacaccattactgtcccagcaagctctgaaccatcacattcactcagtgaagacagcctccatcgggactctaggaaggagccggcctcctatgccagtggttgttcccagtgcccctgaagtgcaggagaccacaaggatgttggaagactccgagagtagctatgaaccagatgagctgaccaaagagatggcccacctggaaggactaatgaaggacctaaacgctatcacaacagcatgacgaccttcaccaggacctgacttcaaacctgagtctggaagtcttggaacttacccttgaaaacaaggaattgtacagagtacgagaggacagcacttgagaacacagaatgagccagcagactggccagcgcctctgtgtagggctggctccaggcatggccacctgccttcccctggtcagcctggaagaagcctgtgtcgaggcagcttccctttgcctgctgatattctgcaggactgggcaccatgggccaaaattttgtgtccagggaagaggcgagaagtgcaacctgcatttcactttgtggtcaggccgtgtctttgtgctgtgactgcatcacctttatggagtgtagacattggcatttatgtacaattttatttgtgtcttattttattttaccttcaaaaacaaaaacgccatccaaaaccaaggaagtccttggtgttctccacaagtggttgacatttgactgcttgttccaattatgtatggaaagtctttgacagtgtgggtcgttcctggggttggcttgttttttggtttcatttttattttttaattctgagtcattgcatcctctaccagctgttaatccatcactctgagggggaggaaatgttgcattgctgtttgtaagctttttttattatttttttattataattattaaaggcctgactctttcctctcatcactgtgagattacagatctatttgaattgaatgaaatgtaacattgaaaagacttgtttgttgctttctgtgcagtttcagtattggggcgggtggggggctgggggttggtaataggaaatggaggggctgctgaggtcctgtgaatgtttctgtcattgtactttcttccagaagcctgcagagaatggaagcatcttctttattgtcctttcctggcatgtccatccttattgtcactacgttgcaactggagtttgatttggatctggttttaaaattcttctgtgcaatagatgggtttgaggatttagcggccctgatgtcttggtcatagcctggtaagaatgtccatgctgaggagccagatgttgtatttctaactgcctgagtcacacagaatagggtaagagcctgaccccattctgtaaatcagaaagcaaggatggagaccctttcctgctgctattattggctctctttgaggaagttggaggttaaggaaggaacttgtttgtttccgtatacgactccttcttctctctagttcagtcttcagccagtccagcgctctcttccacacttcagagccccttcagagaaagcattagcaggaatgagacaaggcagagctgcagtgccccctgaggcttccacacatctttctgaatattatttttcaagtaacaagggcagggacagcggaaacagctgcccaccccccccatcccagcagctcagctaagccctgatgagaatgaagccacaggagttgtctgaggtgaacccagccgctcagccacacatggaagccattgcctttgcacatagttcttgggttctttttcctaaaaaggtaaggagctgaggtgtgtggttttttaatattaagaatatataatggaaaacacacgactgacgctcaggcatcttcccctactccccaacagatccccagaagacagcgtggaaggcagtgtagacagtaaatcgggcttcagttctatagccaagaagagatcagctgctgaaaccaccagtgggtaccccaggccacctgcctttgaacttggggatttgccatgtttgatcttgtcacatacttgcttttttacaagatgaactctttgtatttatgatttggggggcaatgaaaggtgcaatgcaggaactgctgctgccgagctcgctggtcacatgggggtgccaggcgggattctggaaaaccagtgcacttaaactgatcctgaagagagctgtcccagcactctggccaccaggagggccagattccccagaaactaccttttgcccaaagaacatgctcagtatttggggcatttcctcccacaaaccctgactgcttctgttacctcagggccttggtacctggatactgccacagaattggggcgggtgggggaggggcctatttttaaataaaataactgttcaaagttgggggttttttaaaaaattaagaaaaaggaaagctattctgtattgcaccttttcacaatttaatacattttcttacattttcctgtgattttcgaaactaaaccattgtgtgtcctgtagtgtcctggttgagctgccgctcagcagcttcctcggggggatttggaacacctgtgtctgtcgccgcactgcctgtgggaggggcccagagggctgctgggactggcgtctgtacacacttgtttggccttttctgtagttgatgctgtaaactctatggctttttaaaaacgatttcatgtttttatttagtattggaaatccaatacacttttttaatccaatcaaa

SEQ ID NO: 129277 - DNA, 4386 bp, Artificial Sequence
  derived and/or modified sequence
atggctgctgagaggggcgctcgaagactgctgagcaccccgtccttctggctctattgcctcttgctgctaggtaggcgggcaccaggagccgctgctgcccgttctggaagtgcaccgcagtcgcccggagccagtatcagaacatttacccctttttacttcttggtggaacccgtcgataccttgtcagtccggggatcttcagtcatccttaattgtagcgcatattcagagccttcgcccaagatcgaatggaaaaaggatgggacctttctcaacctggtctctgatgataggcgccagctgctgcctgatggctctttgttcattagtaacgttgtgcactccaaacataacaagcctgacgagggatactatcaatgcgtcgccacggtggagtccctcggaacaatcatctcgaggaccgccaagcttatcgtggctggtctcccccgtttcacaagtcaaccagaaccatctagcgtatatgccggtaacaatgccattctgaactgcgaagttaatgcagacctggtccccttcgtccgatgggaacagaaccggcagccattgttgttagatgatcgcgtaatcaagctgccctccggtatgttagtaatctccaacgctaccgaaggagacggtggtctttaccgctgcgtggtcgagtccggcggtcccccaaaatatagtgacgaggtggagctcaaagtgctgcctgaccctgaagtgatttccgatctcgttttcctcaaacaaccttcccccctggtacgcgtcattgggcaggatgtggttctgccatgcgtggcctccgggctgcctaccccgacaatcaagtggatgaagaacgaagaggctcttgacaccgaaagttctgagcggctggtccttctagctgggggaagcttggagatctcggacgtcacagaggatgatgctggcacatatttctgcatagcagataacggcaatgagactattgaagcgcaggcagagctcacagttcaggctcagcccgagttccttaaacagccgaccaacatttacgctcatgaatccatggatattgtgttcgagtgcgaagtgactggcaagcctacccccacagtgaagtgggtcaagaatggcgacatggtgatcccttccgattattttaagattgtgaaggaacataacctgcaagtactgggtttggtgaagtctgatgagggcttctatcagtgtatcgctgaaaacgacgtcggaaatgcacaagctggggcacaattgatcatcctggagcacgctcctgcaacaacagggccactgccttctgcgcctagagacgtggtggcttccctagtctccacccgctttattaagctcacctggcgcacaccagcgagtgatccgcacggggacaacctgacatacagcgtcttttatacgaaagagggtatagctcgagaacgagtggagaacacatctcatcctggcgagatgcaggttaccatccaaaacctgatgccagcaaccgtctacatcttcagggtaatggcgcaaaataagcatggtagtggcgagtcatcagccccattgcgagtggagactcagcctgaagtccagctgcccggacctgccccaaatttgcgggcttatgcagcctctcccaccagtatcaccgttacatgggagactccggttagcgggaatggtgaaatacagaactataagctgtactatatggaaaaaggaaccgataaagaacaagatgtggacgtttcgagccattcatatacaattaatgggcttaagaagtacaccgagtattcattcagagtggttgcctacaataaacacggacccggagtgagtactcctgacgtggccgtgcggacactgtcagatgtgccatcagccgctccccaaaaccttagtctcgaagtgcgtaatagcaagtccataatgatacactggcagccgccagccccagctacccagaatggacagatcacagggtacaagatcagataccgaaaggcctcacgcaaatccgacgtcacagagacacttgtgagtggcacacaactgtcacaattaattgaagggctggaccgaggaacagaatacaatttcagggtggccgctctcactataaacggaaccgggccagccacagactggttgagcgctgaaactttcgagtcggatctggacgagactagagtgcccgaagtccccagctctttgcatgttagacctttagtcacctctattgtagtgtcgtggacaccccctgagaatcagaatattgttgttagggggtacgccattggttatggtattggaagccctcacgcgcaaaccattaaggtggactataagcagaggtactacactattgagaatctggatccttccagtcactatgtcatcaccctgaaggcttttaacaatgttggcgaggggatccctctttacgaatcggcagtcactaggccacataccgacacatcagaggtggatctgttcgtcatcaacgccccttatactcccgtgcccgatccaacaccaatgatgcctcctgtgggggtccaggcttctatcctatcacatgacacaatcagaataacatgggctgacaatagcctgccaaaacaccagaagataacagactcccgctactatacggtacgctggaagacgaatatacccgctaatacaaaatacaagaacgccaacgccaccactttgtcttatctggtaactgggctaaaaccaaacaccctatacgaattttccgtcatggtgaccaagggacgtagatcgtcaacctggagcatgactgctcacggcaccacatttgaactcgttccaaccagcccccctaaggacgtgaccgtagttagcaaggaggggaaaccgaagacaatcatcgttaattggcaaccaccttccgaggccaacgggaagattaccggatacataatttactatagtacagacgtcaatgcagagatacatgattgggtgatcgaaccggtggtcggaaaccgcttaacacatcagattcaggaactaaccctcgataccccctactatttcaaaatacaggccagaaactcaaagggaatgggtccaatgtctgaggctgtgcagttcagaacccccaaagccgattcttccgataagatgcccaacgaccaggcgagtgggtcaggtggcaaaggatctaggttaccggatctgggtagcgattataagcctccaatgagtggttctaactcccctcacggcagccctactagtcccctggacagcaacatgctgctcgtgatcatcgttagtgtgggcgtaattaccattgttgttgtcgtcattattgccgtgttttgcacaagacgcactacttctcaccagaagaaaaaacgcgcagcatgcaagtctgtaaacggctcacacaagtacaaagggaattcgaaagacgtcaaacccccagacctgtggattcaccacgagcggttggagctgaaacccatcgataaatctcctgacccaaaccctattatgacagacacacctattcccaggaattcacaggacatcactcccgtggacaatagcatggattctaacattcaccagaggcgaaacagctaccgagggcatgagtctgaagattccatgtccaccctggccggaagacgaggcatgcgacctaagatgatgatgccatttgactcccagccacctcagccagtgataagtgcccatccaattcatagcctagacaaccctcatcaccatttccactccagctccctagccagccctgcccgaagccatctttatcaccccggatctccttggccaataggtacttctatgtccctgtcagacagagctaatagcaccgagagcgtccggaacacaccttctacagacactatgcctgcaagtagcagccagacttgttgtacggaccaccaggacccggaaggcgctacaagtagttcttatctggccagctcccaggaagaggactcaggacagagtctcccaactgctcatgtacgccctagccaccccttgaaaagtttcgctgtgcctgcaattcccccacctggcccaccaacttacgaccccgcactaccttctacccctctcctgtctcagcaagctttgaaccatcatatccactcagtcaagactgcttcaatcgggacattagggagaagcaggcccccaatgccagttgtggtgccgtccgcgccagaagtgcaagagacaaccaggatgctcgaggactcagaatcttcttacgaacccgacgagcttaccaaggaaatggctcacttagaagggctgatgaaagatctcaatgctattactactgcctag

SEQ ID NO: 129278 - DNA, 4386 bp, Artificial Sequence
  derived and/or modified sequence
atggctgcggagaggggagccagaaggcttttgtctaccccttccttctggctctattgtctactccttctggggagacgcgcaccaggggcagccgctgcacgaagtggcagcgcgcctcaatcacccggagcgtctatacgcacatttacacccttctatttcctcgtagagccagtcgacacgctatcagtccgaggctcctctgtaatattgaattgtagtgcctattcagagccttcgccaaagattgagtggaaaaaggacggtacgttcttgaacctcgtctcagatgatagacgccagctgttgcccgacggatccctgttcatcagcaatgtggtgcattctaagcacaataagcctgatgagggctactatcagtgcgtcgccacagttgagtccctggggactataatttctcggaccgccaagctgattgtggccggtctcccgaggtttacgtcccagccagagccatcttcagtgtacgccggtaataatgcaattctgaattgcgaagtgaacgcagacctggtaccgttcgtacggtgggagcagaacagacagcccctgcttctggacgaccgcgtgattaaacttccctctggcatgctcgtgatttctaatgccacagagggcgatgggggactgtaccggtgcgtcgtggagtccgggggtcctccaaagtactccgacgaggtggagctaaaggtcttaccggatccagaagttatctccgaccttgtgtttctgaagcaaccctcgcccctagtgagagtgatcggacaagacgttgttctcccatgtgtcgccagcggcctgcccaccccaaccattaaatggatgaaaaatgaggaggcccttgatactgagtcaagtgagcggctggtactgctcgctggaggtagcctggaaattagcgatgttacagaggacgacgccggaacatacttttgcatcgccgacaacgggaacgaaacaatagaagcccaggcagagctcaccgttcaggcgcagcctgaattccttaagcagccaactaacatatacgcccacgagtcaatggacattgtgttcgaatgcgaagtcaccgggaagcccacgccaacagtcaaatgggtgaagaacggagacatggtgattccatctgattatttcaagatcgttaaggagcacaacctccaggtcctcgggctagttaagtcagacgaaggcttttatcagtgcatcgcagaaaatgatgttggcaacgcccaagcaggtgcccagctcatcattctagaacatgcccctgctacaactggtccactcccttccgcaccccgtgatgtcgtcgcctctctggttagtactcgattcatcaagctcacgtggcgcacaccggcttcagatccgcatggtgataacctgacctattccgtattttacaccaaagaaggcatcgcaagagaacgggtcgagaatacctcccatccaggcgagatgcaggtcactatacagaatctaatgccggctacagtttacatcttcagagttatggcccagaataagcacggtagtggcgaatcgtcagccccattgcgggtggaaacccagcccgaggtccagctacctggtccagccccaaacttacgggcttatgctgccagccctacatctatcaccgtgacatgggaaactcctgtgagcggaaacggtgagatccaaaattataagttgtactatatggagaagggaaccgacaaggaacaggatgtcgatgtgagttcacatagttacaccatcaacgggctaaaaaagtacacggagtacagctttcgcgttgttgcgtacaataagcatgggccaggcgtctctactcctgatgtcgctgtgaggacattatctgatgtgccatcggcggctccgcagaacttatcacttgaagtgagaaactctaagtctatcatgatacactggcagcctcctgcccctgccacacagaacggccagatcactggatacaaaatcaggtacaggaaagcttcgcggaagtccgacgtcactgaaacacttgtgagcggtactcagctctcacagctgatcgaagggctggaccggggtacagaatataacttccgggtcgccgctttaacaatcaatgggacaggacctgccacagattggctctccgccgaaacctttgagtcagacttggacgaaacacgggtcccagaagtcccctccagcctgcatgtgcggccactggtcacgagcatagtcgttagttggactcctccggagaaccagaatattgtggtgagaggatatgccattgggtacggaatcggatcccctcacgcccaaactattaaggtcgattacaagcagagatattacactattgaaaacctcgacccctcctcccactatgtgattaccctcaaggcttttaacaacgtcggggaggggattcctctctacgaaagcgcggttactcgcccacataccgacacctcggaggtcgacctgtttgtgattaatgcaccgtacacccctgtgcccgaccctacacctatgatgccccctgttggggtccaggcttccatactgagtcacgataccattagaataacttgggccgataactcacttcctaagcaccaaaaaatcacagacagccggtactataccgtgcgctggaagaccaatattccggcaaacaccaaatacaaaaatgccaacgctaccacgttatcttatttagtgactggactgaagcctaacacactttacgaatttagcgttatggttaccaaggggaggcggtcatccacctggtcaatgaccgcccatggcacaaccttcgaactcgtgcctacctctcctccaaaggacgttaccgtcgtgtcgaaagaaggaaagcccaaaactataatcgtcaattggcagcctccatctgaggccaacggtaaaattaccgggtacattatttactattcaaccgacgttaacgcggagatccatgactgggtgatcgagccagtggtggggaacaggctgactcatcaaattcaagaactcacactcgataccccctattactttaaaatccaggccaggaactctaaggggatgggacccatgtctgaagctgtacagttcaggactcccaaggccgattcctctgataagatgcctaatgatcaggcatctggcagtggaggaaagggctcaaggttgcccgaccttgggagcgattataaacccccaatgtccggctccaattctccacatggctcacctacgtcccccctggattccaatatgctcctggtgattatcgttagcgtgggggttataaccatcgtcgttgtagttattatcgccgtgttctgcacaagaagaacaacctcccatcagaagaagaaacgggcagcatgcaaatccgtgaatggatcccataagtacaaaggcaattccaaggacgttaaaccccctgacctctggatccatcatgagagactggagctaaagcctatcgacaaaagccctgaccctaacccaatcatgaccgatacacctatcccacgcaatagtcaggacataacccctgtggacaacagtatggacagcaacatccatcagcggagaaattcctatagaggacacgagagcgaggactctatgtcaacactggccggtaggcggggaatgagaccaaagatgatgatgcccttcgactctcagccaccccagccggtcatcagcgcacatcctattcatagcttggacaatccccaccaccactttcactccagttcgttggccagcccggcacgctcacatctctaccatccaggttccccgtggccaattggcacttccatgagtctgagtgatcgagctaatagcaccgaatcagtgcgtaatacgccatctacggacacaatgcccgcttcctcctctcaaacatgctgtacagatcaccaggaccccgagggagccaccagctcgagctatctggcaagctcccaggaggaagacagcgggcagtccctcccaacagcgcatgttaggccgagccacccacttaagtccttcgccgtcccagccatccctccccctgggcctcccacatatgacccggcactcccttcaacgcccctcctgtcacagcaagctctgaatcatcacatccatagtgtcaaaacggcaagtatcggaacgctgggtaggagccgacccccaatgcctgttgtggtgccatccgcgccagaagtccaggaaactaccaggatgctggaggatagcgagagctcctatgaaccagatgagctgacaaaagaaatggcgcacctggaaggactgatgaaagaccttaatgccatcaccactgcctag

SEQ ID NO: 129279 - DNA, 4386 bp, Artificial Sequence
  derived and/or modified sequence
atggccgccgagagaggcgccagaagactgctgagcacccccagcttctggctgtactgcctgctgctgctgggcagaagagcccccggcgccgccgccgccagaagcggcagcgccccccagagccccggcgccagcatcagaaccttcacccccttctacttcctggtggagcccgtggacaccctgagcgtgagaggcagcagcgtgatcctgaactgcagcgcctacagcgagcccagccccaagatcgagtggaagaaggacggcaccttcctgaacctggtgagcgacgacagaagacagctgctgcccgacggcagcctgttcatcagcaacgtggtgcacagcaagcacaacaagcccgacgagggctactaccagtgcgtggccaccgtggagagcctgggcaccatcatcagcagaaccgccaagctgatcgtggccggcctgcccagattcaccagccagcccgagcccagcagcgtgtacgccggcaacaacgccatcctgaactgcgaggtgaacgccgacctggtgcccttcgtgagatgggagcagaacagacagcccctgctgctggacgacagagtgatcaagctgcccagcggcatgctggtgatcagcaacgccaccgagggcgacggcggcctgtacagatgcgtggtggagagcggcggcccccccaagtacagcgacgaggtggagctgaaggtgctgcccgaccccgaggtgatcagcgacctggtgttcctgaagcagcccagccccctggtgagagtgatcggccaggacgtggtgctgccctgcgtggccagcggcctgcccacccccaccatcaagtggatgaagaacgaggaggccctggacaccgagagcagcgagagactggtgctgctggccggcggcagcctggagatcagcgacgtgaccgaggacgacgccggcacctacttctgcatcgccgacaacggcaacgagaccatcgaggcccaggccgagctgaccgtgcaggcccagcccgagttcctgaagcagcccaccaacatctacgcccacgagagcatggacatcgtgttcgagtgcgaggtgaccggcaagcccacccccaccgtgaagtgggtgaagaacggcgacatggtgatccccagcgactacttcaagatcgtgaaggagcacaacctgcaggtgctgggcctggtgaagagcgacgagggcttctaccagtgcatcgccgagaacgacgtgggcaacgcccaggccggcgcccagctgatcatcctggagcacgcccccgccaccaccggccccctgcccagcgcccccagagacgtggtggccagcctggtgagcaccagattcatcaagctgacctggagaacccccgccagcgacccccacggcgacaacctgacctacagcgtgttctacaccaaggagggcatcgccagagagagagtggagaacaccagccaccccggcgagatgcaggtgaccatccagaacctgatgcccgccaccgtgtacatcttcagagtgatggcccagaacaagcacggcagcggcgagagcagcgcccccctgagagtggagacccagcccgaggtgcagctgcccggccccgcccccaacctgagagcctacgccgccagccccaccagcatcaccgtgacctgggagacccccgtgagcggcaacggcgagatccagaactacaagctgtactacatggagaagggcaccgacaaggagcaggacgtggacgtgagcagccacagctacaccatcaacggcctgaagaagtacaccgagtacagcttcagagtggtggcctacaacaagcacggccccggcgtgagcacccccgacgtggccgtgagaaccctgagcgacgtgcccagcgccgccccccagaacctgagcctggaggtgagaaacagcaagagcatcatgatccactggcagccccccgcccccgccacccagaacggccagatcaccggctacaagatcagatacagaaaggccagcagaaagagcgacgtgaccgagaccctggtgagcggcacccagctgagccagctgatcgagggcctggacagaggcaccgagtacaacttcagagtggccgccctgaccatcaacggcaccggccccgccaccgactggctgagcgccgagaccttcgagagcgacctggacgagaccagagtgcccgaggtgcccagcagcctgcacgtgagacccctggtgaccagcatcgtggtgagctggaccccccccgagaaccagaacatcgtggtgagaggctacgccatcggctacggcatcggcagcccccacgcccagaccatcaaggtggactacaagcagagatactacaccatcgagaacctggaccccagcagccactacgtgatcaccctgaaggccttcaacaacgtgggcgagggcatccccctgtacgagagcgccgtgaccagaccccacaccgacaccagcgaggtggacctgttcgtgatcaacgccccctacacccccgtgcccgaccccacccccatgatgccccccgtgggcgtgcaggccagcatcctgagccacgacaccatcagaatcacctgggccgacaacagcctgcccaagcaccagaagatcaccgacagcagatactacaccgtgagatggaagaccaacatccccgccaacaccaagtacaagaacgccaacgccaccaccctgagctacctggtgaccggcctgaagcccaacaccctgtacgagttcagcgtgatggtgaccaagggcagaagaagcagcacctggagcatgaccgcccacggcaccaccttcgagctggtgcccaccagcccccccaaggacgtgaccgtggtgagcaaggagggcaagcccaagaccatcatcgtgaactggcagccccccagcgaggccaacggcaagatcaccggctacatcatctactacagcaccgacgtgaacgccgagatccacgactgggtgatcgagcccgtggtgggcaacagactgacccaccagatccaggagctgaccctggacaccccctactacttcaagatccaggccagaaacagcaagggcatgggccccatgagcgaggccgtgcagttcagaacccccaaggccgacagcagcgacaagatgcccaacgaccaggccagcggcagcggcggcaagggcagcagactgcccgacctgggcagcgactacaagccccccatgagcggcagcaacagcccccacggcagccccaccagccccctggacagcaacatgctgctggtgatcatcgtgagcgtgggcgtgatcaccatcgtggtggtggtgatcatcgccgtgttctgcaccagaagaaccaccagccaccagaagaagaagagagccgcctgcaagagcgtgaacggcagccacaagtacaagggcaacagcaaggacgtgaagccccccgacctgtggatccaccacgagagactggagctgaagcccatcgacaagagccccgaccccaaccccatcatgaccgacacccccatccccagaaacagccaggacatcacccccgtggacaacagcatggacagcaacatccaccagagaagaaacagctacagaggccacgagagcgaggacagcatgagcaccctggccggcagaagaggcatgagacccaagatgatgatgcccttcgacagccagcccccccagcccgtgatcagcgcccaccccatccacagcctggacaacccccaccaccacttccacagcagcagcctggccagccccgccagaagccacctgtaccaccccggcagcccctggcccatcggcaccagcatgagcctgagcgacagagccaacagcaccgagagcgtgagaaacacccccagcaccgacaccatgcccgccagcagcagccagacctgctgcaccgaccaccaggaccccgagggcgccaccagcagcagctacctggccagcagccaggaggaggacagcggccagagcctgcccaccgcccacgtgagacccagccaccccctgaagagcttcgccgtgcccgccatccccccccccggcccccccacctacgaccccgccctgcccagcacccccctgctgagccagcaggccctgaaccaccacatccacagcgtgaagaccgccagcatcggcaccctgggcagaagcagaccccccatgcccgtggtggtgcccagcgcccccgaggtgcaggagaccaccagaatgctggaggacagcgagagcagctacgagcccgacgagctgaccaaggagatggcccacctggagggcctgatgaaggacctgaacgccatcaccaccgcctag

SEQ ID NO: 129280 - protein, 356 aa, Artificial Sequence
  derived and/or modified sequence
MTKSYSESGLMGEPQPQGPPSWTDECLSSQDEEHEADKKEDDLETMNAEEDSLRNGGEEEDEDEDLEEEEEEEEEDDDQKPKRRGPKKKKMTKARLERFKLRRMKANARERNRMHGLNAALDNLRKVVPCYSKTQKLSKIETLRLAKNYIWALSEILRSGKSPDLVSFVQTLCKGLSQPTTNLVAGCLQLNPRTFLPEQNQDMPPHLPTASASFPVHPYSYQSPGLPSPPYGTMDSSHVFHVKPPPHAYSAALEPFFESPLTDCTSPSFDGPLSPPLSINGNFSFKHEPSAEFEKNYAFTMHYPAATLAGAQSHGSIFSGTAAPRCEIPIDNIMSFDSHSHHERVMSAQLNAIFHD

SEQ ID NO: 129281 - DNA, 2641 bp, Artificial Sequence
  derived and/or modified sequence
gagaacggggagcgcacagcctggacgcgtgcgcaggcgtcaggcgcatagacctgctagcccctcagctagcggccccgcccgcgcttagcatcactaactgggctatataacctgagcgcccgcgcggccacgacacgaggaattcgcccacgcaggaggcgcggcgtccggaggccccagggttatgagactatcactgctcaggacctactaacaacaaaggaaatcgaaacatgaccaaatcgtacagcgagagtgggctgatgggcgagcctcagccccaaggtcctccaagctggacagacgagtgtctcagttctcaggacgaggagcacgaggcagacaagaaggaggacgacctcgaagccatgaacgcagaggaggactcactgaggaacgggggagaggaggaggacgaagatgaggacctggaagaggaggaagaagaggaagaggaggatgacgatcaaaagcccaagagacgcggccccaaaaagaagaagatgactaaggctcgcctggagcgttttaaattgagacgcatgaaggctaacgcccgggagcggaaccgcatgcacggactgaacgcggcgctagacaacctgcgcaaggtggtgccttgctattctaagacgcagaagctgtccaaaatcgagactctgcgcttggccaagaactacatctgggctctgtcggagatcctgcgctcaggcaaaagcccagacctggtctccttcgttcagacgctttgcaagggcttatcccaacccaccaccaacctggttgcgggctgcctgcaactcaatcctcggacttttctgcctgagcagaaccaggacatgcccccccacctgccgacggccagcgcttccttccctgtacacccctactcctaccagtcgcctgggctgcccagtccgccttacggtaccatggacagctcccatgtcttccacgttaagcctccgccgcacgcctacagcgcagcgctggagcccttctttgaaagccctctgactgattgcaccagcccttcctttgatggacccctcagcccgccgctcagcatcaatggcaacttctctttcaaacacgaaccgtccgccgagtttgagaaaaattatgcctttaccatgcactatcctgcagcgacactggcaggggcccaaagccacggatcaatcttctcaggcaccgctgcccctcgctgcgagatccccatagacaatattatgtccttcgatagccattcacatcatgagcgagtcatgagtgcccagctcaatgccatatttcatgattagaggcacgccagtttcaccatttccgggaaacgaacccactgtgcttacagtgactgtcgtgtttacaaaaggcagccctttgggtactactgctgcaaagtgcaaatactccaagcttcaagtgatatatgtatttattgtcattactgcctttggaagaaacaggggatcaaagttcctgttcaccttatgtattattttctatagctcttctatttaaaaaataaaaaaatacagtaaagtttaaaaaatacaccacgaatttggtgtggctgtattcagatcgtattaattatctgatcgggataacaaaatcacaagcaataattaggatctatgcaatttttaaactagtaatgggccaattaaaatatatataaatatatatttttcaaccagcattttactacttgttacctttcccatgctgaattattttgttgtgattttgtacagaatttttaatgactttttataatgtggatttcctattttaaaaccatgcagcttcatcaatttttatacatatcagaaaagtagaattatatctaatttatacaaaataatttaactaatttaaaccagcagaaaagtgcttagaaagttattgtgttgccttagcacttctttcctctccaattgtaaaaaaaaaaaaaaaaaaaaaaaaaaaaaaaaaattgcacaatttgagcaattcatttcactttaaagtctttccgtctccctaaaataaaaaccagaatcataattttcaagagaagaaaaaattaagagatacattccctatcaaaacatatcaattcaacacattacttgcacaagcttgtatatacatattataaataaatgccaacatacccttctttaaatcaaaagctgcttgactatcacatacaatttgcactgttactttttagtcttttactcctttgcattccatgattttacagagaatctgaagctattgatgtttccagaaaatataaatgcatgattttatacatagtcacaaaaatggtggtttgtcatatattcatgtaataaatctgagcctaaatctaatcaggttgttaatgttgggatttatatctatagtagtcaattagtacagtagcttaaataaattcaaaccatttaattcataattagaacaatagctattgcatgtaaaatgcagtccagaataagtgctgtttgagatgtgatgctggtaccactggaatcgatctgtactgtaattttgtttgtaatcctgtatattatggtgtaatgcacaatttagaaaacattcatccagttgcaataaaatagtattgaaagtgaaaaaaaaaaaa

SEQ ID NO: 129282 - DNA, 1071 bp, Artificial Sequence
  derived and/or modified sequence
atgaccaagagctactccgagtccggtctgatgggtgagccacagccacagggtccccctagttggacggatgaatgcctttcctcgcaggacgaagagcatgaggccgacaagaaggaagatgaccttgagacaatgaatgccgaggaggattcactaagaaatggaggagaggaggaggacgaggacgaagacctggaagaagaggaggaagaagaagaggaggatgatgaccagaagcctaagagaagaggtcctaagaagaagaaaatgactaaagctaggctagagagatttaaattacgcagaatgaaagcaaatgcgagggaacgcaaccgtatgcatggactgaacgccgcattagacaatctccggaaggtcgtgccatgttatagtaagacacaaaaattatccaagatcgaaaccctacggctggcgaaaaattacatctgggcactttccgagatcctccgttccggaaagagtcctgatcttgtctcattcgtgcaaacattgtgcaagggtctaagccaacccaccacaaaccttgtagcaggctgtctacagctcaatccgagaacattcctccccgaacagaaccaggacatgcctccacacctgcccacagcttcggcctctttccccgtacatccgtattcgtaccagtcccctggcctaccgtcacctccatatggtactatggattcatcgcacgtcttccatgtgaaacctccaccacacgcttactccgcggccttggagccattctttgagtctccgctgacggactgtactagcccatcattcgacggccctctgtcccctcctctctcaatcaatgggaacttttcttttaaacacgaacccagcgcggaatttgagaagaattatgcattcaccatgcattatcccgcagctaccctggccggcgcgcagagtcacggaagtatcttcagcggaaccgccgcacccaggtgcgaaatcccgattgacaacattatgagcttcgactcacactcacatcatgagcgggttatgtctgcccaacttaatgcgatttttcacgactag

SEQ ID NO: 129283 - DNA, 1071 bp, Artificial Sequence
  derived and/or modified sequence
atgaccaagagctacagcgagagcggcctgatgggagagccccagccccagggccccccatcctggacagatgaatgtctgagcagccaggatgaggagcacgaggccgacaagaaggaggatgacctggagaccatgaatgctgaggaggacagcctgagaaatggaggagaggaggaggatgaagatgaggacctggaggaggaggaggaggaggaggaggaggatgatgaccagaagcccaagagaagaggccccaagaagaagaagatgaccaaggcccggctggagcgcttcaagctgcggaggatgaaggccaatgcccgggagaggaacaggatgcacggcctgaatgctgccctggacaacctgaggaaggtggtgccctgctacagcaagacccagaagctgagcaagattgagaccctgcggctggccaagaactacatctgggccctgtctgagatcctgcggagcggcaagagcccagacctggtgtcctttgtgcagaccctgtgcaagggcctgagccagcccaccaccaacctggtggccggctgcctgcagctgaaccccaggaccttcctgcctgagcagaaccaggacatgccaccccacctgcccacagccagcgccagcttccctgtgcacccctacagctaccagagccctggcctgcccagccccccctacggcaccatggacagcagccacgtgttccacgtgaagcccccacctcatgcctacagcgctgccctggagcccttctttgagagccccctgacagactgcaccagccccagctttgatggccccctgagcccccccctgagcatcaatggaaacttctccttcaagcatgagcccagcgctgagtttgagaagaactatgccttcaccatgcactacccagctgccaccctggccggggcccagagccacggcagcatcttctctggaacagctgccccccgctgtgagatccccatcgacaacatcatgagctttgacagccacagccaccacgagcgggtgatgtctgcccagctgaatgccatcttccatgactag

SEQ ID NO: 129284 - DNA, 1071 bp, Artificial Sequence
  derived and/or modified sequence
atgaccaagagctacagcgagagcggcctgatgggcgagccccagccacagggtcctccatcttggaccgatgagtgcctgtcgagtcaggacgaggaacacgaggccgacaaaaaggaagatgatctagaaaccatgaacgccgaagaggattcactgagaaatggcggagaagaggaagacgaggacgaggacctagaggaagaggaggaagaggaggaggaagacgacgatcaaaagcccaagagacgaggccccaagaagaagaaaatgaccaaagccaggctcgagcgatttaaattgaggcgcatgaaagcaaatgctagagagcgcaacaggatgcacggtttaaacgctgccttggacaatcttaggaaagtggtgccttgctacagtaaaacccagaagttatccaagattgaaacccttcgcctagccaagaattacatatgggcactgtccgaaatcctccggagtggcaagtctcctgacctggtgagttttgttcagaccctctgcaaaggactgtcccagcccacaaccaatctcgtcgccggttgcttgcaactgaatccccgaacgtttctcccggaacagaatcaggatatgcctccccatctacctaccgcatctgcgtctttccccgtgcatccatatagctaccagtctcccggccttccgagcccaccgtacgggactatggacagttcgcatgtctttcacgtcaaaccccctccacatgcctacagtgccgctctggaaccgttctttgaaagcccattaacggattgcacttctccctccttcgatggtcccctaagtccaccacttagcatcaacgggaacttttcatttaagcacgagccgagtgcagagtttgagaagaactacgcattcaccatgcactaccctgccgctaccctggccggtgcccagtcgcacggttccattttcagcggcaccgctgctccccgatgcgagatcccaattgacaacataatgagctttgattctcattcccaccacgaaagagtgatgtctgctcagctgaatgcaatcttccacgattag

SEQ ID NO: 129285 - DNA, 2852 bp, Artificial Sequence
  derived and/or modified sequence
tgggccactttcttctggccacaaaggggccggaatggagcgctccgcggcatacaaatgggcaggtcacgtggttccaggctcttggctggaccgggaagaccatatggcgcatgccggggaggaaggaggaggggcgggggtaggggtggagggtgaggggagcggttgtcggaggagggcgggagacgagcaaggcgtggggagaagtggggaggaggggagaacggggagcgcacagcctggacgcgtgcgcaggcgtcaggcgcatagacctgctagcccctcagctagcggccccgcccgcgcttagcatcactaactgggctatataacctgagcgcccgcgcggccacgacacgaggaattcgcccacgcaggaggcgcggcgtccggaggccccagggttatgagactatcactgctcaggacctactaacaacaaaggaaatcgaaacatgaccaaatcgtacagcgagagtgggctgatgggcgagcctcagccccaaggtcctccaagctggacagacgagtgtctcagttctcaggacgaggagcacgaggcagacaagaaggaggacgacctcgaaaccatgaacgcagaggaggactcactgaggaacgggggagaggaggaggacgaagatgaggacctggaagaggaggaagaagaggaagaggaggatgacgatcaaaagcccaagagacgcggccccaaaaagaagaagatgactaaggctcgcctggagcgttttaaattgagacgcatgaaggctaacgcccgggagcggaaccgcatgcacggactgaacgcggcgctagacaacctgcgcaaggtggtgccttgctattctaagacgcagaagctgtccaaaatcgagactctgcgcttggccaagaactacatctgggctctgtcggagatcctgcgctcaggcaaaagcccagacctggtctccttcgttcagacgctttgcaagggcttatcccaacccaccaccaacctggttgcgggctgcctgcaactcaatcctcggacttttctgcctgagcagaaccaggacatgcccccccacctgccgacggccagcgcttccttccctgtacacccctactcctaccagtcgcctgggctgcccagtccgccttacggtaccatggacagctcccatgtcttccacgttaagcctccgccgcacgcctacagcgcagcgctggagcccttctttgaaagccctctgactgattgcaccagcccttcctttgatggacccctcagcccgccgctcagcatcaatggcaacttctctttcaaacacgaaccgtccgccgagtttgagaaaaattatgcctttaccatgcactatcctgcagcgacactggcaggggcccaaagccacggatcaatcttctcaggcaccgctgcccctcgctgcgagatccccatagacaatattatgtccttcgatagccattcacatcatgagcgagtcatgagtgcccagctcaatgccatatttcatgattagaggcacgccagtttcaccatttccgggaaacgaacccactgtgcttacagtgactgtcgtgtttacaaaaggcagccctttgggtactactgctgcaaagtgcaaatactccaagcttcaagtgatatatgtatttattgtcattactgcctttggaagaaacaggggatcaaagttcctgttcaccttatgtattattttctatagctcttctatttaaaaaataaaaaaatacagtaaagtttaaaaaatacaccacgaatttggtgtggctgtattcagatcgtattaattatctgatcgggataacaaaatcacaagcaataattaggatctatgcaatttttaaactagtaatgggccaattaaaatatatataaatatatatttttcaaccagcattttactacttgttacctttcccatgctgaattattttgttgtgattttgtacagaatttttaatgactttttataatgtggatttcctattttaaaaccatgcagcttcatcaatttttatacatatcagaaaagtagaattatatctaatttatacaaaataatttaactaatttaaaccagcagaaaagtgcttagaaagttattgtgttgccttagcacttctttcctctccaattgtaaaaaaaaaaaaaaaaaaaaaaaaaaaaaaaaaattgcacaatttgagcaattcatttcactttaaagtctttccgtctccctaaaataaaaaccagaatcataattttcaagagaagaaaaaattaagagatacattccctatcaaaacatatcaattcaacacattacttgcacaagcttgtatatacatattataaataaatgccaacatacccttctttaaatcaaaagctgcttgactatcacatacaatttgcactgttactttttagtcttttactcctttgcattccatgattttacagagaatctgaagctattgatgtttccagaaaatataaatgcatgattttatacatagtcacaaaaatggtggtttgtcatatattcatgtaataaatctgagcctaaatctaatcaggttgttaatgttgggatttatatctatagtagtcaattagtacagtagcttaaataaattcaaaccatttaattcataattagaacaatagctattgcatgtaaaatgcagtccagaataagtgctgtttgagatgtgatgctggtaccactggaatcgatctgtactgtaattttgtttgtaatcctgtatattatggtgtaatgcacaatttagaaaacattcatccagttgcaataaaatagtattgaaagtga

SEQ ID NO: 129286 - DNA, 1071 bp, Artificial Sequence
  derived and/or modified sequence
atgaccaaaagctacagtgagagcggacttatgggggaaccgcagccacagggacccccttcttggactgacgagtgcttatcatcccaagatgaggagcacgaagccgacaaaaaggaagacgacctcgaaacaatgaatgccgaagaggacagtcttcgaaacgggggtgaagaggaagacgaggatgaggatctggaggaagaagaggaagaggaggaagaggacgatgaccagaaaccgaagcggagagggcctaaaaaaaaaaagatgaccaaggcccgactcgagcgatttaagttgcggaggatgaaggcaaacgccagggagcgtaatcgcatgcatggcctcaacgcagccctcgataatctgcgaaaagtggtgccttgctacagcaagactcaaaaactgtctaaaatcgagactctcagactggcaaagaactacatttgggccttatccgagatactccgctctgggaaatctcccgaccttgtcagcttcgtgcaaacactttgtaagggtctatctcagcccacaacgaatctggtggccggttgcctgcaactgaatccaagaacctttctgccagagcagaatcaagatatgccaccacacttaccaaccgcttctgcaagttttcctgtacatccctactcttaccagagtcccggactcccttcccccccatacgggaccatggacagtagccatgtgtttcacgtcaaacccccaccccacgcttatagcgcagccttggaaccattttttgagtcacctctgaccgactgcacctccccatcattcgacggcccactgagtcccccactgtctattaatggcaacttttctttcaaacacgaaccaagcgccgagtttgaaaaaaattacgcttttaccatgcattatccggctgcaaccctcgcaggagcacaaagtcacggctctattttttctggcaccgccgctcctaggtgcgagatccctatagacaatattatgtcatttgactcgcacagccatcacgaacgcgtcatgagtgcgcagttaaatgccatctttcacgattag

SEQ ID NO: 129287 - DNA, 1071 bp, Artificial Sequence
  derived and/or modified sequence
atgaccaagagctacagcgagagcggcctgatgggcgagccccagccccagggcccccccagctggaccgacgagtgcctgagcagccaggacgaggagcacgaggccgacaagaaggaggacgacctggagaccatgaacgccgaggaggacagcctgagaaacggcggcgaggaggaggacgaggacgaggacctggaggaggaggaggaggaggaggaggaggacgacgaccagaagcccaagagaagaggccccaagaagaagaagatgaccaaggccagactggagagattcaagctgagaagaatgaaggccaacgccagagagagaaacagaatgcacggcctgaacgccgccctggacaacctgagaaaggtggtgccctgctacagcaagacccagaagctgagcaagatcgagaccctgagactggccaagaactacatctgggccctgagcgagatcctgagaagcggcaagagccccgacctggtgagcttcgtgcagaccctgtgcaagggcctgagccagcccaccaccaacctggtggccggctgcctgcagctgaaccccagaaccttcctgcccgagcagaaccaggacatgcccccccacctgcccaccgccagcgccagcttccccgtgcacccctacagctaccagagccccggcctgcccagccccccctacggcaccatggacagcagccacgtgttccacgtgaagccccccccccacgcctacagcgccgccctggagcccttcttcgagagccccctgaccgactgcaccagccccagcttcgacggccccctgagcccccccctgagcatcaacggcaacttcagcttcaagcacgagcccagcgccgagttcgagaagaactacgccttcaccatgcactaccccgccgccaccctggccggcgcccagagccacggcagcatcttcagcggcaccgccgcccccagatgcgagatccccatcgacaacatcatgagcttcgacagccacagccaccacgagagagtgatgagcgcccagctgaacgccatcttccacgactag

SEQ ID NO: 129288 - protein, 441 aa, Artificial Sequence
  derived and/or modified sequence
MYSPYCLTQDEFHPFIEALLPHVRAFSYTWFNLQARKRKYFKKHEKRMSKDEERAVKDELLGEKPEIKQKWASRLLAKLRKDIRPEFREDFVLTITGKKPPCCVLSNPDQKGKIRRIDCLRQADKVWRLDLVMVILFKGIPLESTDGERLYKSPQCSNPGLCVQPHHIGVTIKELDLYLAYFVHTPESGQSDSSNQQGDADIKPLPNGHLSFQDCFVTSGVWNVTELVRVSQTPVATASGPNFSLADLESPSYYNINQVTLGRRSITSPPSTSTTKRPKSIDDSEMESPVDDVFYPGTGRSPAAGSSQSSGWPNDVDAGPASLKKSGKLDFCSALSSQGSSPRMAFTHHPLPVLAGVRPGSPRATASALHFPSTSIIQQSSPYFTHPTIRYHHHHGQDSLKEFVQFVCSDGSGQATGQHSQRQAPPLPTGLSASDPGTATF

SEQ ID NO: 129289 - DNA, 5576 bp, Artificial Sequence
  derived and/or modified sequence
gcggccgccgcctgccgggcctcccctcgccgcggccggccgccgcgctcccgcccgggcgcccagctatgtactccccgtactgcctcacccaggatgagttccacccgttcatcgaggcactgctgcctcacgtccgcgctttctcctacacctggttcaacctgcaggcgcggaagcgcaagtacttcaagaagcatgaaaagcggatgtcgaaggacgaggagcgggcggtgaaggacgagctgctgggcgagaagcccgagatcaagcagaagtgggcatcccggctgctggccaagctgcgcaaggacatccggcccgagttccgcgaggacttcgtgctgaccatcacgggcaagaagcccccctgctgcgtgctctccaaccccgaccagaagggcaagatccggcggattgactgcctgcgccaggctgacaaggtgtggcggctggacctggtcatggtgattttgtttaaggggatccccctggaaagtactgatggggagcggctctacaagtcgcctcagtgctcgaaccccggcctgtgcgtccagccacatcacattggagtcacaatcaaagaactggatctttatctggcttactttgtccacactccggaatccggacaatcagatagttcaaaccagcaaggagatgcggacatcaaaccactgcccaacgggcacttaagtttccaggactgttttgtgacttccggggtctggaatgtgacggagctggtgagagtatcacagactcctgttgcaacagcatcagggcccaacttctccctggcggacctggagagtcccagctactacaacatcaaccaggtgaccctggggcggcggtccatcacctcccctccttccaccagcaccaccaagcgccccaagtccatcgatgacagtgagatggagagccctgttgatgacgtgttctatcccgggacaggccgttccccagcagctggcagcagccagtccagcgggtggcccaacgatgtggatgcaggcccggcttctctaaagaagtcaggaaagctggacttctgcagtgccctctcctctcagggcagctccccgcgcatggctttcacccaccacccgctgcctgtgcttgctggagtcagaccagggagcccccgggccacagcatcagccctgcacttcccctccacgtccatcatccagcagtcgagcccgtatttcacgcacccgaccatccgctaccaccaccaccacgggcaggactcactgaaggagtttgtgcagtttgtgtgctcggatggctcgggccaggccaccggacagcattcgcaacgacaggcgcctcctctgccaaccggtttgtcagcatcggaccccgggacggcaactttctgaacatcccacagcagtctcagtcctggttcctctgataagatcgacaaaagaaacaacaaaatgagaagaagaggttcctcgaaaggggggagaagaaattttgagaatggaaaaatcccccagcccagcccagccccaccgaaaagcaaaaattacacgtcgtcagccactcagcccttctctcctccagcccggggacccccgcgggccccagaagcagcccagttctcagagagcccttggaaggggtctcggtggagctgtgcaccagcagccaagcagaaagaaacacgcgacatggactctgtcaagtagaggacagaaagcaagaaaggatgcagaactgccttcctccccctgaccccgccccggccttctggggaaggaacaaagtccccaaacaaagcaaccagcacaattctgaaggggcctggcctccaccctcaccccttcctaggggaaccccaccctccacacagccggagctgccctagggagcctggagggccagcttgtaaagatgatggggtttagatccctcaggctctcccctccagactccgcccttccctccctccctccctccctccctctctgccaaggctccagcttcttcccccagctgctcccgaccaggagggggagagcagcctccacttaccccaccccacccttgggctaaaagcccccaggcgggcagggggtgacccctggagctagttgcgtgtcccagaatggagggtgttctgacaccccaccctgagccgcaagagcagtcctggggccctggacccctctgtacagtccgtaggaaaaagtcggaatgctctcgacggcctcgtcccagcctgggacaggccccctttcccctctctctgcaggccaggagggcctccttcctgccacgagggaggggagtcgggccccaggtcgcccccgcccccagccctgcatgcaggtgccctcgctccgccccatcagttcctgcccctgcccctcatgcagactgccctgctggggccgggccggagggtggagcagaaaggggaccccggagccgagcgaggaggaccaggcagccgccgctgccgcgctaagccaccacctgcgcttaggtaggcgtcctgctcgccgactttcagttccttgggagggtgttgggtgtcgtccttttcaaaagtgttttggagctttctgtgccccccgactttcccccgcctccccgccccccacgtggccacttttctctggattttagctgtaatgtctttactctttatttaggggtggggcattcattgtttgggtcttttgctgttggaatgggaactcctcctccatttgagcaacttgggaacaatttggtaacacaccacaggaagtagctctcccccccagccccctcctccctcaagggagggttggggggcctgtccagagggtcttcagaagcccccctgggagggaggggaggatgagcacgcccagctcccctccagggtgtgacttggcccctctggcttgtctttctgtgccttactcctcctcctgcgtctcccgttcctggccccttcttgagtccttgtgcctctctctttctctctctttcttaattgtatgaaaacacaaagcacaggtcaggatcctctgagagaaaatcaacattgcaccacgtaggggtgggctatgggctgtatttattgtgaatctagtttgtgaggctgtggccccgagctggcggagggagggaagaggagggagtgacgggaggggaggaggtcagcgacctggggccgtagcggcaggcgaacggtgcctgctacccagctggaagccacaaggtggctggctccaggggcggcttttgttggaagttgagtgaagccctccccctgtcctcagcgtgcagccctagaggaccccagggctgaggggcagtggatcctgcgggagtctcccggggcgtggggagtaaggccccgggggtggggggccgggtgggccgggcgtgacgcgcggtcaaagtgcaatgatttttcagttcggttggctaaacagggtcagagctgagagcgaagcagaaggggctccctgtccggcccacgtgccctttccctcgacgacagtcgagggctcgggctctgtgggactgtgggagctagggtctgcggggcgcctgcccgggcgaggtcggaagctgcaggccagctgggcccgggccggagcgtgcccggcggggctgcccgggcgggcagggggtgggggctgctcctttcccaagtggtgttgtgaggggcaatgagggcaacaggagatgtggggacgtgttaggagagaaaaaaaaaaaaacaaaaatatatatgggggaaattaacttttttttttcattgaaccaagtgcaatgcatcagagagttttcctatctttgtatgttaagagattaagaaaaaaaaattctatttttgttgtaatgtcctcgcggctctggggacgctaaaagaaccgggcctgccccgccctgcgcggggataacgaaagctgagtgtttttcccttttttttgttcgtttttagtttttttttttttaagtcgttttcctgcgttgacgaggatgatctggggtttttatttgtttcgtcgttcgttctgtttcggtgggagggctgaaggaaacgttcacattttagagtttaaaaaaaacacctcgacatttaaaaaatcaaccaacacaagatcaaaaaggaaaaggacgagagaaaaattatttttaagataattaaacataaaaccctggtgcttcttacattataaagtacgttttaaagaacccacaaactattatacataagtttatgaatcaattaaatatcctgcacttgttaggaatacgcatatcccttctttgttgagtttaacggaacgggacagcggcgtgcccccggcggctggactgctccggccgcgggtctccccgggcgcccctccctggggcccagcacccctcctcgccccatccccgtccgggtacgggggcgcggcaggggtccccggcccctcccccgcagaggtcaatgccaacgaacaaacgtcccctccctccctccctctccgccccgagcgcccttctttgagccagacgccaacttgaccctcaccagcattatcaggagcgcgctcagcaagttggtagtttcctcccccctttcccggcgcccctcccgcccccattcaacatctctcatcctatccccgaccccctccggggaacaccgggaaggctcgacgctccaggacaggaccagccacgcagacaggtcgatttgcccaggcccgcgcccgcacgcacgcacgcacacggccccgcacacagccccgccccaccccgcaaccagccctgtcgactgccttatacacccgcccccgcgctggccggccgacctagtgccttgttctcacccccgtgctggcggagcggacgccgcgctctgggtcccagaggggccgggtggctcagacgacccaccactcccccaccctgaccgtgctgaacagacccccccacacgagagaaaataaaggagcaataaagtcacgagaactttcgtcccccaatcgagagcccgaggggcaccccagccccgcctctgctcccccccaccccacccaccctcggggcgcccccctccccccgcaagccagcctgggccagccccgcttcggcccctcccgggagatccgtgcgcccgaccagcaccagcatcgcggaccgcaaaggccgcccgtcccgtcaaacaagtttcttcttaggctaagaaacgcagtatatacgagtatctctatatatagtactaatggatttggtgtgcttcccccttagcgtccccctccctctgctcctcctccttcagcctggtctccccctcttctctgccctccacccccgtctctgcactgagatacataagaaacaagggtagtttactgtctgttttgttttctgggttttcagtgtcctagcggaatgcaagtaggcagccagcccgtctgttccctctccgccccgccccgccccgcccccgtcactgcgcttctgttataccatctttgcctgactctctccggcttctccattgaatggctaatgtgtatgtgaaataaagaaataaagaaaaacaaacgcga

SEQ ID NO: 129290 - DNA, 1326 bp, Artificial Sequence
  derived and/or modified sequence
atgtacagtccctactgccttacgcaagacgagttccatcccttcatcgaagcccttctcccccatgtcagggctttcagctacacatggttcaacctgcaggctaggaagagaaaatattttaagaaacacgaaaagagaatgagcaaggacgaggagcgagccgtcaaggacgaactgctcggcgagaagccagaaattaagcaaaaatgggcttctcgcctcctggcaaaacttcggaaggacattagaccagaattccgggaggactttgtgctgaccatcaccggtaaaaagccaccctgttgcgtcttatctaatcctgatcagaaaggtaaaatccgcagaattgactgcctccgccaggcagacaaggtctggagactggacctggtgatggtgattctgttcaagggaattcccctggagtctacagatggggaacggctgtataaaagcccccagtgcagtaatcccgggctatgtgtgcagccacaccatatcggagtaacgataaaagaactggatctctacttagcgtatttcgtgcatacccctgagagtgggcagtctgactcctctaatcagcagggagatgccgacattaagcccctgccaaatggtcacctgagctttcaagattgcttcgttacctcgggcgtgtggaacgtgacagagctggtgcgggttagccagacccctgttgccactgcctcggggcccaacttctccctcgccgacctggagtccccttcttactataatattaaccaggttacactgggtcggcgtagtatcacgtcacccccttccacgtctaccaccaaaaggccaaagtctattgacgattcagagatggagtctcccgtggacgatgtcttctatcctggcacaggcagatcgcccgccgcgggctcatcccaaagctccggctggcctaatgacgttgacgctggaccagcaagtctgaaaaagtcgggtaagctggacttctgcagcgccctgagctctcagggaagttcacccagaatggcctttacccatcacccattaccagtattggctggcgtgagacccggatctccacgcgccacagcatctgccctgcactttcctagcacttcaatcatccagcagtcatctccctactttactcaccccaccatacggtaccatcatcaccacggccaggacagtctgaaggaattcgtccagttcgtctgctccgacggatcaggacaggctaccggacagcattcccagcgccaggctccccctctgccaaccgggctgagtgcctctgatcctgggacagccacattttag

SEQ ID NO: 129291 - DNA, 1326 bp, Artificial Sequence
  derived and/or modified sequence
atgtacagcccctactgcctgacccaggatgagttccaccccttcatcgaggccctgctgccccacgtgcgggccttctcctacacctggttcaacctgcaggccaggaagaggaagtacttcaagaagcatgagaagaggatgagcaaggatgaggagagagctgtgaaggatgagctgctgggggagaagccagagatcaagcagaagtgggccagccggctgctggccaagctgaggaaggacatccggcctgagttcagagaagattttgtgctgaccatcaccgggaagaagccaccctgctgcgtgctgagcaacccagaccagaagggcaagatcagaagaattgactgcctgcggcaggccgacaaggtgtggaggctggacctggtgatggtgatcctcttcaagggcatccccctggagagcacagatggagagcggctgtacaagagcccccagtgcagcaaccctggcctgtgtgtgcagccccaccacatcggcgtgaccatcaaggagctggacctgtacctggcctactttgtgcacaccccagagagcggccagagcgacagcagcaaccagcagggagatgctgacatcaagcccctgcccaacggccacctgtccttccaggactgctttgtgaccagcggcgtgtggaatgtgacagagctggtgcgggtgtcccagacccctgtggccacagccagcggccccaacttcagcctggccgacctggagagccccagctactacaacatcaaccaggtgaccctgggcagaagaagcatcaccagcccccccagcaccagcaccaccaagaggcccaagagcattgatgacagcgagatggagagccctgtggatgatgtgttctacccaggcaccggccgcagccctgctgctggcagcagccagagcagcggctggcccaatgatgtggatgctggccctgccagcctgaagaagagcggcaagctggacttctgcagcgccctgagcagccagggcagcagccccaggatggccttcacccaccaccccctgcctgtgctggccggcgtgcggcccggcagcccccgggccacagccagcgccctgcacttccccagcaccagcatcatccagcagagcagcccctacttcacccaccccaccatccgctaccaccaccaccacggccaggacagcctgaaggagtttgtgcagtttgtgtgcagtgatggcagcggccaggccaccggccagcacagccagaggcaggccccacccctgcccaccggcctgagcgccagtgaccccggcacagccaccttctag

SEQ ID NO: 129292 - DNA, 1326 bp, Artificial Sequence
  derived and/or modified sequence
atgtacagcccctactgcctgacccaggacgagttccaccccttcatagaagccctgttgccccatgtgcgcgccttcagttacacatggtttaacttgcaagctaggaagcggaaatatttcaaaaaacatgagaagaggatgtccaaggacgaagaaagagccgttaaggatgaattgctaggagagaaacctgagattaaacagaagtgggcatctcgcctgctggccaagcttcgcaaggacattcgccccgagttccgagaagattttgtattaacaattactgggaaaaagccaccatgttgcgtgctgtcaaaccctgaccagaaggggaaaataagacgcattgactgcctccgacaggcagataaggtctggcgtttggatctggttatggtaatcctttttaaagggatcccgctggagtctaccgacggagagcgactctacaagagcccccagtgtagcaaccccggtctgtgtgtgcagccacaccacattggagtaactataaaagagctagatctctaccttgcatactttgttcataccccagaaagcgggcagagcgatagcagtaatcagcaaggcgatgccgatatcaaacccctcccaaacggacacctgtcatttcaagactgctttgttacttccggggtatggaatgtcaccgagcttgtccgagtgtcccagacgcccgtcgctaccgcttcgggccccaatttcagtctcgctgatttggaatcccccagctattataacatcaatcaggtcacactgggcaggcgctcaatcactagcccaccaagtacctctacaacgaaacggcctaaatctatagacgatagcgagatggagagcccagtggacgatgtgttctacccaggcactgggagaagccccgcggcaggcagttcccaatcttcaggctggccaaacgacgtggatgccggccctgctagcctcaagaagagtggaaaactagatttctgcagcgcactctcaagccagggatcatcacccagaatggcttttacccatcatcccctgcccgtgctggccggagtcagaccaggctcgcccagagcaactgctagcgctctccactttccatctacatctataatccagcaatccagcccatattttactcatcctaccatcagataccatcaccaccacggacaggactcactgaaggagttcgtgcaattcgtgtgcagcgacggatctggccaggctaccggacagcacagccagagacaggcacctccactgcctaccgggttgtccgcaagtgatccgggaacagccacattctag

SEQ ID NO: 129293 - DNA, 1326 bp, Artificial Sequence
  derived and/or modified sequence
atgtactccccttattgccttactcaggatgagtttcacccttttattgaggcacttcttccgcacgtccgtgcattcagctatacctggttcaatctgcaggccaggaaacggaagtatttcaagaagcacgagaaacggatgtcaaaggacgaagaaagggccgttaaggacgaactgctgggggagaaacccgaaattaagcaaaaatgggcatcccgtctgttggccaaattacgaaaagacatcagacccgagttcagagaagactttgtacttactattacgggcaaaaagcccccatgttgcgtgctatctaatcccgatcagaaaggaaaaatccgtcgcatcgactgccttcggcaggcagataaagtatggagactcgacttagtgatggttatcctgttcaaaggaatcccactcgaaagcacagacggagagcgcctctacaaatcaccacagtgctccaatccaggtctctgcgtccagccccaccacatcggggtcacaatcaaagaactggacttatatttagcctacttcgtgcacacacctgagtctggccaaagcgactcctcaaaccaacaaggggacgccgatattaagcccttgcctaatggacatctgtcattccaagactgcttcgtcacgtcaggcgtttggaatgttacagagttggtccgggtcagccagacccccgtcgccactgcctcaggaccgaatttcagcctggcggatctggaatcgccaagttattataacatcaatcaagttactctagggaggcggtccattaccagtccacccagcacatccacgacgaagcggcctaagagtatcgatgactctgagatggagtctccggtggatgacgtattttaccctggaaccggacggtcccccgctgcaggctcttctcagtccagtggatggcccaatgacgtggatgccggtccagcttccctgaagaaatccggaaagcttgatttctgtagtgcgctgagttcccagggaagcagccctagaatggctttcacgcaccaccccctccctgtcctcgccggtgtaaggcccggtagtcctcgagccaccgcttcggccttgcatttcccgagtacttctatcatacagcaatcttccccttacttcacccatccaacaattcggtaccatcaccaccacgggcaagactcactcaaagaattcgtgcagttcgtctgcagtgacgggagcgggcaggcgacaggtcagcatagccagaggcaggcacctcccctgccaacaggcctgagcgcttcggatccaggcactgccacgttttag

SEQ ID NO: 129294 - DNA, 1326 bp, Artificial Sequence
  derived and/or modified sequence
atgtacagcccctactgcctgacccaggacgagttccaccccttcatcgaggccctgctgccccacgtgagagccttcagctacacctggttcaacctgcaggccagaaagagaaagtacttcaagaagcacgagaagagaatgagcaaggacgaggagagagccgtgaaggacgagctgctgggcgagaagcccgagatcaagcagaagtgggccagcagactgctggccaagctgagaaaggacatcagacccgagttcagagaggacttcgtgctgaccatcaccggcaagaagcccccctgctgcgtgctgagcaaccccgaccagaagggcaagatcagaagaatcgactgcctgagacaggccgacaaggtgtggagactggacctggtgatggtgatcctgttcaagggcatccccctggagagcaccgacggcgagagactgtacaagagcccccagtgcagcaaccccggcctgtgcgtgcagccccaccacatcggcgtgaccatcaaggagctggacctgtacctggcctacttcgtgcacacccccgagagcggccagagcgacagcagcaaccagcagggcgacgccgacatcaagcccctgcccaacggccacctgagcttccaggactgcttcgtgaccagcggcgtgtggaacgtgaccgagctggtgagagtgagccagacccccgtggccaccgccagcggccccaacttcagcctggccgacctggagagccccagctactacaacatcaaccaggtgaccctgggcagaagaagcatcaccagcccccccagcaccagcaccaccaagagacccaagagcatcgacgacagcgagatggagagccccgtggacgacgtgttctaccccggcaccggcagaagccccgccgccggcagcagccagagcagcggctggcccaacgacgtggacgccggccccgccagcctgaagaagagcggcaagctggacttctgcagcgccctgagcagccagggcagcagccccagaatggccttcacccaccaccccctgcccgtgctggccggcgtgagacccggcagccccagagccaccgccagcgccctgcacttccccagcaccagcatcatccagcagagcagcccctacttcacccaccccaccatcagataccaccaccaccacggccaggacagcctgaaggagttcgtgcagttcgtgtgcagcgacggcagcggccaggccaccggccagcacagccagagacaggccccccccctgcccaccggcctgagcgccagcgaccccggcaccgccaccttctag

SEQ ID NO: 129295 - protein, 899 aa, Artificial Sequence
  derived and/or modified sequence
MESCYNPGLDGIIEYDDFKLNSSIVEPKEPAPETADGPYLVIVEQPKQRGFRFRYGCEGPSHGGLPGASSEKGRKTYPTVKICNYEGPAKIEVDLVTHSDPPRAHAHSLVGKQCSELGICAVSVGPKDMTAQFNNLGVLHVTKKNMMGTMIQKLQRQRLRSRPQGLTEAEQRELEQEAKELKKVMDLSIVRLRFSAFLRASDGSFSLPLKPVISQPIHDSKSPGASNLKISRMDKTAGSVRGGDEVYLLCDKVQKDDIEVRFYEDDENGWQAFGDFSPTDVHKQYAIVFRTPPYHKMKIERPVTVFLQLKRKRGGDVSDSKQFTYYPLVEDKEEVQRKRRKALPTFSQPFGGGSHMGGGSGGAAGGYGGAGGGGSLGFFPSSLAYSPYQSGAGPMGCYPGGGGGAQMAATVPSRDSGEEAAEPSAPSRTPQCEPQAPEMLQRAREYNARLFGLAQRSARALLDYGVTADARALLAGQRHLLTAQDENGDTPLHLAIIHGQTSVIEQIVYVIHHAQDLGVVNLTNHLHQTPLHLAVITGQTSVVSFLLRVGADPALLDRHGDSAMHLALRAGAGAPELLRALLQSGAPAVPQLLHMPDFEGLYPVHLAVRARSPECLDLLVDSGAEVEATERQGGRTALHLATEMEELGLVTHLVTKLRANVNARTFAGNTPLHLAAGLGYPTLTRLLLKAGADIHAENEEPLCPLPSPPTSDSDSDSEGPEKDTRSSFRGHTPLDLTCSTKVKTLLLNAAQNTMEPPLTPPSPAGPGLSLGDTALQNLEQLLDGPEAQGSWAELAERLGLRSLVDTYRQTTSPSGSLLRSYELAGGDLAGLLEALSDMGLEEGVRLLRGPETRDKLPSTEVKEDSAYGSQSVEQEAEKLGPPPEPPGGLCHGHPQPQVH

SEQ ID NO: 129296 - DNA, 2700 bp, Artificial Sequence
  derived and/or modified sequence
atggagagctgctacaaccccggcctggacggcatcatcgagtacgacgacttcaagctgaacagcagcatcgtggagcccaaggagcccgcccccgagaccgccgacggcccctacctggtgatcgtggagcagcccaagcagagaggcttcagattcagatacggctgcgagggccccagccacggcggcctgcccggcgccagcagcgagaagggcagaaagacctaccccaccgtgaagatctgcaactacgagggccccgccaagatcgaggtggacctggtgacccacagcgacccccccagagcccacgcccacagcctggtgggcaagcagtgcagcgagctgggcatctgcgccgtgagcgtgggccccaaggacatgaccgcccagttcaacaacctgggcgtgctgcacgtgaccaagaagaacatgatgggcaccatgatccagaagctgcagagacagagactgagaagcagaccccagggcctgaccgaggccgagcagagagagctggagcaggaggccaaggagctgaagaaggtgatggacctgagcatcgtgagactgagattcagcgccttcctgagagccagcgacggcagcttcagcctgcccctgaagcccgtgatcagccagcccatccacgacagcaagagccccggcgccagcaacctgaagatcagcagaatggacaagaccgccggcagcgtgagaggcggcgacgaggtgtacctgctgtgcgacaaggtgcagaaggacgacatcgaggtgagattctacgaggacgacgagaacggctggcaggccttcggcgacttcagccccaccgacgtgcacaagcagtacgccatcgtgttcagaacccccccctaccacaagatgaagatcgagagacccgtgaccgtgttcctgcagctgaagagaaagagaggcggcgacgtgagcgacagcaagcagttcacctactaccccctggtggaggacaaggaggaggtgcagagaaagagaagaaaggccctgcccaccttcagccagcccttcggcggcggcagccacatgggcggcggcagcggcggcgccgccggcggctacggcggcgccggcggcggcggcagcctgggcttcttccccagcagcctggcctacagcccctaccagagcggcgccggccccatgggctgctaccccggcggcggcggcggcgcccagatggccgccaccgtgcccagcagagacagcggcgaggaggccgccgagcccagcgcccccagcagaaccccccagtgcgagccccaggcccccgagatgctgcagagagccagagagtacaacgccagactgttcggcctggcccagagaagcgccagagccctgctggactacggcgtgaccgccgacgccagagccctgctggccggccagagacacctgctgaccgcccaggacgagaacggcgacacccccctgcacctggccatcatccacggccagaccagcgtgatcgagcagatcgtgtacgtgatccaccacgcccaggacctgggcgtggtgaacctgaccaaccacctgcaccagacccccctgcacctggccgtgatcaccggccagaccagcgtggtgagcttcctgctgagagtgggcgccgaccccgccctgctggacagacacggcgacagcgccatgcacctggccctgagagccggcgccggcgcccccgagctgctgagagccctgctgcagagcggcgcccccgccgtgccccagctgctgcacatgcccgacttcgagggcctgtaccccgtgcacctggccgtgagagccagaagccccgagtgcctggacctgctggtggacagcggcgccgaggtggaggccaccgagagacagggcggcagaaccgccctgcacctggccaccgagatggaggagctgggcctggtgacccacctggtgaccaagctgagagccaacgtgaacgccagaaccttcgccggcaacacccccctgcacctggccgccggcctgggctaccccaccctgaccagactgctgctgaaggccggcgccgacatccacgccgagaacgaggagcccctgtgccccctgcccagcccccccaccagcgacagcgacagcgacagcgagggccccgagaaggacaccagaagcagcttcagaggccacacccccctggacctgacctgcagcaccaaggtgaagaccctgctgctgaacgccgcccagaacaccatggagccccccctgaccccccccagccccgccggccccggcctgagcctgggcgacaccgccctgcagaacctggagcagctgctggacggccccgaggcccagggcagctgggccgagctggccgagagactgggcctgagaagcctggtggacacctacagacagaccaccagccccagcggcagcctgctgagaagctacgagctggccggcggcgacctggccggcctgctggaggccctgagcgacatgggcctggaggagggcgtgagactgctgagaggccccgagaccagagacaagctgcccagcaccgaggtgaaggaggacagcgcctacggcagccagagcgtggagcaggaggccgagaagctgggccccccccccgagccccccggcggcctgtgccacggccacccccagccccaggtgcactag

SEQ ID NO: 129297 - DNA, 2700 bp, Artificial Sequence
  derived and/or modified sequence
atggaatcttgttataatccaggcctagacgggatcatcgagtatgacgacttcaaactgaattcctctattgttgagcccaaggagccagcccccgagaccgcagacggcccctatcttgtcatcgtcgaacagcctaaacagagaggctttagattccgctatggttgcgaaggcccctcccacggcgggctgcctggcgcttctagtgagaagggccgaaagacgtaccccacagtgaaaatctgcaactacgaagggcctgcaaaaatcgaagttgacctggtgactcatagcgacccgccgagggcacacgcacattccctggtgggcaaacaatgtagcgaactgggcatctgtgcagtgtcggtcggccccaaggacatgactgctcagttcaacaatctgggcgtgttgcacgtgaccaagaaaaacatgatggggactatgattcagaagctgcagcgccagcgcttgaggagccgcccgcaggggttaacagaggccgaacaaagggagcttgagcaggaggcgaaggagttgaaaaaggtgatggacctgagtatagtccggctccgcttctctgcgttcctacgggcctctgacggtagctttagtctgccactgaagcctgtgatttcccaaccaattcacgactctaaatccccaggagctagcaaccttaaaattagcaggatggacaaaaccgccggctctgtgcgcgggggcgacgaggtgtacctcctatgtgataaagtacagaaagacgacatagaggttcgattttatgaggacgatgagaatggatggcaggctttcggcgacttctcacctactgacgtacacaagcagtacgcaattgtgttcaggaccccaccatatcacaaaatgaaaattgagagaccggtcaccgtgtttctgcagctcaaaaggaaaagaggcggcgatgttagcgattctaagcagttcacttactaccccctggtcgaagacaaggaggaagtgcaaagaaaaaggcggaaggcattgcccacattctcccagccttttgggggcggcagccatatgggaggaggaagcggcggagcggcaggcggctatggcggagctggaggaggagggagtctgggcttctttccgtcatctctggcctatagcccatatcagtcgggtgcggggcccatggggtgctacccaggcgggggggggggcgctcagatggctgctacggtcccaagtcgcgactcgggggaagaggccgccgagccttcggccccctctcgcactcctcagtgcgagccgcaggcccccgaaatgctccaaagggcccgggagtacaacgcccgtctgttcggactggcccagcgctctgctagagccctcctggactatggggtcaccgccgacgctcgcgctctactcgcagggcagaggcacctgctaacggcccaggatgagaatggagacacccccctccacctggctataatacatggacagacgagcgtgattgagcagatcgtttacgtgattcatcatgcacaggatctgggtgtcgtaaacctcactaatcacttgcaccagactccactgcaccttgcagtgattaccggccaaactagcgtcgtctcattcttacttagagttggggccgaccctgccctgctcgaccgccacggtgattcggctatgcatcttgctcttagggctggcgctggtgcccctgaactgcttagagctctgttgcagtcgggggcccccgcagtaccccagcttctccatatgccagacttcgaaggtctgtacccagtgcacctcgcagtgagagctaggagccccgaatgcttggacctccttgtggattctggagcggaggttgaagccacggagcgtcagggaggacggactgccctgcatctggctacggaaatggaagagttgggcctcgtgacccacctggtgactaagttgagagctaatgtgaatgctcggacattcgccggcaatacacctctgcatttggcggccgggctgggctaccccaccctgactcgactcctattaaaggccggggccgacatccacgccgaaaacgaggaacctctgtgccctctgccttctcccccaacatcagactctgacagcgattctgagggtcctgagaaggacacacgcagctcctttagaggccatacgccgctggatctgacgtgctccactaaggtgaaaacactcctactgaatgccgcacaaaacactatggagccccctttgacccctccctcgccagccggtcctggactgtctctaggagacacagcgcttcagaacctagagcagctcttggacggaccagaggctcagggctcatgggctgagcttgccgagcggttgggcctaagaagcctagttgacacataccgacaaacaacctccccaagcggatctctactgcgtagctatgaactggccggcggtgatttggccggtctgctagaggccctgtctgacatggggctggaggagggcgtccggttgctgcgaggcccagaaacaagagataagctgccaagtacagaagttaaggaagatagtgcatatggctcacagtccgtggaacaagaggccgagaagctggggcccccgccagaacctccgggagggctttgccacgggcatccccagccccaggtgcactag

SEQ ID NO: 129298 - DNA, 2700 bp, Artificial Sequence
  derived and/or modified sequence
atggaatcctgctataatcccggactggatgggatcatagaatatgatgactttaagttgaactcttctattgtggagccaaaggagcccgcacccgagactgctgacggcccttatctcgtcattgttgagcagccgaaacagagaggttttagattccgttacggctgtgagggcccatcccacgggggccttcctggggcttcttcagagaagggcaggaagacgtatcccacggttaagatctgcaactacgagggaccggcaaaaatagaagtggacttggtgacccatagcgaccccccacgcgcacatgcacactctctcgtgggcaagcagtgttctgagctgggaatttgtgcagtgtccgtgggccctaaagatatgacggcccaattcaataatttgggggtgctgcatgtaactaagaagaacatgatgggcaccatgattcagaaactccagaggcagagattgagaagccgcccacaaggcctcactgaggcagaacaacgcgagctggagcaggaggcgaaggaactaaagaaagtgatggacctgtcaatagtgagactcagattctcagccttcctccgagctagcgacgggagtttttcactgccactgaagccagttattagccagccaatccacgacagcaagagccccggagccagtaatttgaagatcagcagaatggataaaaccgcaggctccgtacgaggaggggacgaagtttatctcctatgcgacaaggtccagaaagacgacatcgaagtcaggttttatgaagacgatgagaacggctggcaagcctttggcgatttctcaccaactgatgtgcataagcaatatgccatcgtgtttaggacacctccctatcacaaaatgaaaatcgagcggccagtaacagtcttcctacagctgaagaggaaaagaggcggcgacgtctccgatagtaagcaattcacgtactatccgcttgtcgaagacaaggaggaagtgcagagaaaacgaagaaaggctctgccaactttcagccagccattcggaggtggcagccacatggggggcggctccggcggtgcagctggtggctacgggggggcgggcgggggagggtccctaggattcttcccttcgagtctggcctactccccttaccagagcggagcagggcccatggggtgctatcccgggggtggcggcggggcgcagatggctgcgacagtaccgagcagggactctggcgaagaagcagccgagccaagtgcccctagccggactcctcagtgtgagccgcaggccccggagatgctgcagcgggcccgggagtacaacgctcgactttttggactggctcagcgcagtgcccgcgcgctgctggactacggtgtgacagccgatgccagggctctcttggcgggccaacgacatctactgactgcacaggacgagaatggtgacaccccactacacctcgctattatccatggacaaaccagtgttatcgaacagatcgtttatgtgattcatcacgcacaagacctgggcgtcgtcaatttgaccaatcaccttcatcagacccctttacacctcgcagtcatcactggacaaacttctgtcgtatcatttctactccgcgttggggctgaccccgctcttcttgacaggcatggggattccgccatgcacctagccctgcgcgccggagccggcgcaccggagttgttgagggccctcctgcaatctggggccccagccgtgcctcagctgctccacatgcccgacttcgagggactgtaccccgtgcatttggcggtccgggccagaagcccagagtgcctggacctcctagtagattctggcgccgaggtagaggctactgagaggcagggaggccggacagcattacaccttgccactgagatggaagaactggggctcgtcacacacttggtcaccaagctaagagctaatgtgaacgcacgcacattcgcgggaaataccccccttcacttggccgctgggctagggtacccaacattgacccgtcttctgctgaaggctggagcagatatccacgcggagaatgaagagcctctgtgtccactcccgagccctcccacatccgactctgatagtgattctgaaggacctgaaaaggacactcgtagttccttccgaggtcacacccccctcgatctgacttgctctaccaaagttaaaacgctgctgctcaacgctgcacagaacacaatggagcctcctttgactcctcctagccccgcggggcctggcctgagtctgggtgatactgcattgcagaatctcgaacagctcctggatggtccagaggcccaaggctcctgggcagagctggccgagagactgggactacgcagtttggtcgatacctaccgtcaaaccacaagtccatctggatctctgctgcgatcctatgagctcgcagggggcgatttggctggactgttggaagcactcagcgacatgggactggaagaaggagtgcggttactccgaggccctgagactcgggataagctgccaagcacggaggtgaaagaagactccgcctatgggagccaatccgtggagcaggaggcagagaagttgggccccccccctgaaccacccggaggactttgccatggccatccacagccccaggtccattag

SEQ ID NO: 129299 - DNA, 2700 bp, Artificial Sequence
  derived and/or modified sequence
atggagagctgctacaaccctggcctggatggcatcattgaatatgatgacttcaagctgaacagcagcatcgtggagcccaaggagcccgcccctgagacagcagatggcccctacctggtgattgtggagcagcccaagcagaggggcttccgcttccgctatggctgtgagggccccagccacggcggcctgcccggggccagcagcgagaagggcaggaagacctaccccaccgtgaagatctgcaactatgagggccctgccaagattgaggtggacctggtgacccacagcgaccccccccgggcccacgcccacagcctggtgggcaagcagtgcagcgagctgggcatctgtgctgtgtctgtgggccccaaggacatgacagcccagttcaacaacctgggcgtgctgcacgtgaccaagaagaacatgatgggcaccatgatccagaagctgcagaggcagaggctgcggagccggccccagggcctgacagaagctgagcagcgggagctggagcaggaggccaaggagctgaagaaggtgatggacctgagcatcgtgcggctgcgcttcagcgccttcctgcgggccagtgatggcagcttcagcctgcccctgaagcctgtgatcagccagcccatccatgacagcaagagccctggggccagcaacctgaagatcagcaggatggacaagacagctggctctgtgagaggaggagatgaggtgtacctgctgtgtgacaaggtgcagaaggatgacatcgaggtgcgcttctatgaagatgatgaaaatggctggcaggcctttggagacttcagccccacagatgtgcacaagcagtatgccatcgtgttccgcaccccaccctaccacaagatgaagattgaaagacctgtgaccgtcttcctgcagctgaagaggaagagaggaggagatgtgtctgacagcaagcagttcacctactaccccctggtggaggacaaggaggaggtgcagaggaagaggaggaaggccctgcccaccttcagccagccctttggaggcggcagccacatgggcggcggcagcggcggggccgccggcggctatggaggagctgggggcggcggcagcctgggcttcttccccagcagcctggcctacagcccctaccagagcggggccggccccatgggctgctacccaggcggcggcggcggggcccagatggccgccaccgtgcccagccgggacagcggggaggaggccgctgagcccagcgcccccagcaggaccccccagtgtgagccccaggcccctgagatgctgcagagggcccgggagtacaatgcccggctgtttggcctggcccagaggtctgcccgggccctgctggactatggagtgacagcagatgcccgggccctgctggccggccagaggcacctgctgacagcccaggatgaaaatggagacacccccctgcacctggccatcatccacggccagaccagcgtcatcgagcagatcgtgtatgtgatccaccacgcccaggacctgggcgtggtgaacctgaccaaccacctgcaccagacccccctgcacctggccgtcatcaccggccagacctctgtggtgtccttcctgctgcgggtgggcgctgaccctgccctgctggacagacatggagacagcgccatgcacctggccctgcgggccggggccggggcccctgagctgctgcgggccctgctgcagagcggggccccagctgtgccccagctgctgcacatgccagactttgagggcctgtaccctgtgcacctggccgtgcgggcccggagccctgagtgcctggacctgctggtggacagcggggctgaggtggaggccacagagcggcagggcggccgcacagccctgcacctggccacagagatggaggagctgggcctggtgacccacctggtgaccaagctgcgggccaacgtgaatgcccggacctttgctggcaacacccccctgcacctggccgccggcctgggctaccccaccctgacccggctgctgctgaaggccggggctgacatccacgcagaaaatgaggagcccctgtgccccctgcccagcccccccaccagtgacagcgacagcgacagcgagggccctgagaaggacaccaggagcagcttccggggccacacccccctggacctgacctgcagcaccaaggtgaagaccctgctgctgaatgctgcccagaacaccatggagccccccctgaccccacccagccctgctggccctggcctgagcctgggggacacagccctgcagaacctggagcagctgctggatggccctgaggcccagggctcctgggccgagctggccgagcggctgggcctgcggagcctggtggacacctaccggcagaccaccagccccagcggcagcctgctgcggagctatgagctggccggcggggacctggccggcctgctggaggccctgagtgacatgggcctggaggagggcgtgcggctgctgcggggccctgagacccgggacaagctgcccagcacagaggtgaaggaggacagcgcctacggcagccagagcgtggagcaggaggccgagaagctgggccccccacctgagcccccaggcggcctgtgccacggccacccccagccccaggtgcactag

SEQ ID NO: 129300 - DNA, 2700 bp, Artificial Sequence
  derived and/or modified sequence
atggagagctgctacaaccccggcctggacggcatcatcgagtacgatgatttcaaattgaatagctcaatcgtggagcccaaggagcccgcacccgagaccgccgacggaccttatctggtgattgtcgaacagccgaagcagcgcgggtttcggttccgctatgggtgtgaaggccccagccatggtggcctgccaggggcgtcaagtgaaaaaggaaggaaaacctaccctactgtcaagatatgtaattatgaaggccccgccaaaatcgaggtggatcttgtgacccactcggatcctccacgcgcccatgctcactccctggtcggaaaacagtgttcggaacttggcatttgtgcggtgagtgtgggtccgaaagatatgactgcccagtttaacaacctaggggtgcttcatgtcacgaagaaaaatatgatgggtactatgattcaaaagttgcagagacagaggcttcgctcaaggcctcagggactgaccgaggctgaacagcgtgagttggagcaagaggccaaggagctgaagaaggtcatggacttatctatagtgcggctgaggttctccgccttcctacgagctagcgacgggtcttttagcctacctctgaagccagtgatcagtcagccgatccacgattccaaatctcccggggcctcaaatctaaagatctccagaatggataagaccgctggcagcgtacggggaggcgacgaagtgtacctgctgtgcgataaagtccaaaaagatgatatcgaggtcagattttacgaagacgacgaaaacggttggcaggccttcggggacttctcccctaccgacgtccataaacagtacgcgatagtgtttaggacccccccctaccacaagatgaaaattgagcggcctgttactgtattcttacagttaaaaaggaagagagggggggatgtgtccgattctaagcagttcacctactacccccttgtagaagataaggaagaggtgcagcgaaagagacgaaaagcactgccaacattctcacagcctttcggtggaggcagccacatggggggggggtctgggggagctgcgggaggatatgggggagctggcggaggcgggtctcttggcttcttccccagtagcctggcatattccccttaccagagtggtgctgggcccatggggtgctaccctggaggaggcggtggcgcacagatggccgctaccgtgccatcccgggactctggggaggaggccgccgagccaagtgcacccagcagaactccacagtgcgaacctcaagcccccgaaatgcttcaacgggcccgggaatataatgctcgattattcgggctggcccagaggagcgcgagggctttgctggactatggcgtcactgccgacgcacgagcactgttggccggccaaaggcacctgctgaccgcacaagacgagaacggcgacacccctcttcacctggccatcattcacggccaaacgtctgtgatcgagcagatcgtttatgtcatccaccacgctcaggacttgggggtggtgaacctgaccaaccaccttcaccagacaccccttcacctagcagttatcaccggtcaaacatcagtggtaagttttttactgcgcgtgggcgctgaccctgcactgctggacaggcacggagattctgctatgcacttggcacttagggctggggctggagcgccagaattattacgggccctgctccagagcggtgccccagcggtgccacagctgctccatatgccagatttcgaaggcctctatccggttcatctcgccgtacgggccagaagccctgagtgcctcgaccttctggtagattctggagctgaggtggaggccaccgagaggcaaggtggaagaaccgcactacacctggccacggaaatggaggagctcggcttggtcacccatttggtaacaaagctcagagcgaacgttaatgcgcgtacttttgccgggaacacgcccctgcaccttgctgccggcctagggtatccaacgctgactcgactcctgctgaaggccggtgctgacatccacgcagagaatgaagagcccctgtgtccgctcccctctccccctacaagtgatagtgactctgattctgagggacccgaaaaagataccagatcctcctttcgcgggcacactcccctggacctcacttgtagtacaaaggtgaaaaccttattgttaaacgctgcacaaaatactatggaacctcccctaacgcctccctctcctgcaggcccaggcctgtcgctgggcgacacagccctccagaacttagagcaacttcttgatggtccggaggcccagggcagctgggccgaactggcagagcggctggggctgcgctccctcgtcgacacctaccggcagacgaccagtccgtcaggttctcttttgcggagttatgagctagctggaggcgacttggcggggctcctggaggccttatcagacatgggtttagaggagggggtcaggctgctgcgagggccagaaacaagggacaaactcccatccaccgaggttaaagaagacagcgcctatgggtcccagagcgtagagcaggaagccgaaaagctgggcccccccccagagccaccgggtggactgtgccatggccatcctcaaccacaagttcactag

SEQ ID NO: 129301 - DNA, 2700 bp, Artificial Sequence
  derived and/or modified sequence
atggagagctgctacaaccccggcctggacggcatcatcgagtacgacgattttaagttgaatagcagcattgttgagccgaaagagcccgcgcctgaaaccgctgatggcccttacctagtcatagtcgaacagccaaaacagcgggggttccgatttaggtacggctgcgagggcccaagtcacggcggcctccccggggcctctagcgaaaaaggtaggaagacttatccgacggtcaaaatctgcaactacgaggggcccgctaaaattgaggtggatcttgtgacgcactccgatcccccccgcgcccatgctcatagtctcgtgggcaaacagtgcagtgagctcggcatttgtgctgtctctgtgggtcctaaagacatgaccgcccagtttaataacttaggagtgctgcacgtcaccaaaaagaacatgatgggtaccatgattcagaagctccaacggcaacgactcaggtcaagaccccaggggctcaccgaggctgagcagagagagttggagcaggaggccaaagagttaaagaaggtgatggatctgagtatcgtccgtttgagatttagcgcattcctgagagcaagcgatggaagcttctccctgccgctgaaaccggtaattagtcaaccgatccatgatagcaaatctcctggcgcttcgaacctgaagatcagcagaatggacaaaacagcaggctctgtgcgcggaggtgatgaggtttatttgctgtgcgataaggttcaaaaagatgacatcgaagtgagattttatgaggacgacgagaatggctggcaggcattcggagacttctcacctaccgatgtgcacaagcaatacgcaatcgttttccgtacccccccctatcacaaaatgaagatcgagaggcccgtcactgtgtttctgcagctgaaacgcaagaggggtggagacgtgtccgactctaaacaatttacatattatcctcttgtggaagacaaggaagaggtccagagaaaacgcaggaaggctctccccacattttcgcaaccgtttgggggcggcagtcatatgggtggcggaagtggaggagctgctgggggatatggcggggccggcggggggggctctttggggttttttccctcctctctagcctacagtccttatcaatcgggcgccgggcctatgggatgctatcccggcggaggcggcggggcacagatggcagccacagttccgagtcgggattccggcgaagaagcagcagagccctcagccccttcgaggacaccacagtgtgaaccgcaggcccctgagatgctgcagagagcccgagagtacaatgcccgcctgtttggactggcacaacgttcagctcgggccctgctcgattatggcgtgacagccgacgctcgggcccttcttgccggtcaacggcatctgctgaccgctcaggacgagaacggggacacccccttacatctggccataatccatggtcagacctctgttattgaacaaatcgtgtacgtgatacatcacgcccaggatctaggtgtcgttaacctcacaaatcacttgcaccaaactccgctgcacctggccgttatcaccgggcagacctccgtggtttctttccttctcagagttggtgctgatcccgccctcctggacagacacggggacagcgcaatgcacctggctctgcgggcaggtgcaggagctcctgaacttctgagggccctgcttcagagcggcgcgcccgcggtgccacagcttctacacatgcctgactttgagggactgtatccggtgcacttggcagttcgagcacggagtcccgaatgcctagatttgctggttgatagtggagccgaggtcgaggcgactgaacgccaggggggtaggacagccttacatctggcaacagagatggaggagctaggcttggtgacacacctggttaccaaactcagagcaaatgtcaatgcccgcacttttgcaggaaatacgcccttgcacttagccgccggcctgggatatcctactctgactaggctcctcttgaaagctggtgccgatatccatgccgagaacgaggagcccctgtgcccattaccctctcctcctactagcgatagcgactctgacagtgaggggccagagaaagacactcggagctcctttaggggccacacgccactcgatctcacgtgtagcactaaggtgaaaacacttcttttgaatgccgcccagaatacaatggaaccaccgctaactcccccaagtccagccggacccggtttgagcctcggagacactgcgctccagaacctggaacagctcttggatggccccgaggcacaggggtcctgggccgagctggccgagaggctggggttgagatctctcgtagatacatatcggcaaacgactagtccctcggggtcactcctgcggtcatacgagttggcaggcggcgatctggctggcctattggaggccctttctgacatgggcctggaggagggagtccggttgcttagaggaccggagactcgcgataaactccccagcaccgaggtgaaagaggatagtgcctacggtagtcaaagcgtcgaacaggaggccgaaaaacttggacctcctcccgagccacctggcggcttgtgccatggccaccctcagcctcaggttcactag

SEQ ID NO: 129302 - DNA, 2700 bp, Artificial Sequence
  derived and/or modified sequence
atggaatcatgttataacccaggtttagatgggattatcgaatacgacgattttaaactgaattcctccatcgtcgagcccaaggaacccgctcccgagacggcagacggtccttatcttgtgatagtagaacagccgaagcagcgtggctttaggttcaggtacgggtgcgagggacctagccacggcggactgcccggtgcttcaagcgagaaaggccgtaagacctaccctacagtgaagatctgcaactacgagggaccagccaagatcgaggtggatttggtgacccactctgatccacccagggcccacgcccattccctcgtgggaaagcagtgctccgaactgggcatctgcgcagtgtctgtggggccaaaggacatgacagctcagttcaacaatctcggggtgctccatgtcactaaaaagaatatgatgggaaccatgatccagaaactccagcgtcagcgactccgatctaggccccagggtctcaccgaagctgaacagcgggaactcgagcaagaggccaaggagcttaagaaggttatggatctttcaatcgttcggttaagattcagcgctttcctgagagcttcagacggcagctttagtctccctcttaagccggtgatttctcaacctattcacgattccaaatcccccggtgcaagcaacctgaagatatcccgtatggacaagacagccggtagtgtccggggtggagatgaggtgtacttactctgtgataaggtgcagaaggatgacatcgaggtgcggttttacgaagacgacgaaaacggttggcaagcttttggggacttttcccccaccgacgttcataaacagtatgccatcgtgtttaggacacccccatatcataagatgaagattgagcgtccagtgactgtattcttgcagctgaaacgcaagagaggcggtgacgtgtcggattctaaacagttcacttattacccactcgtcgaggacaaggaagaagtgcagagaaaacgacgcaaggcactccccactttcagccaacctttcggtggcggtagccacatgggcggaggttctggaggagcggcaggaggatacggaggcgctggaggcggaggctccttaggattcttcccttcctctctggcttatagtccataccagagcggcgctgggccaatggggtgttaccccggaggcggaggcggagcacagatggctgcgactgttccgtcacgggacagtggagaggaagctgccgagccctccgcgccttctcgcacgcctcagtgcgaaccacaggcccctgagatgctgcaaagggcgagggagtacaatgctcggcttttcggcctggcccagcgatccgcaagagcattactcgactatggagtgactgctgacgcccgagccttactcgccggacagaggcacctgctgacagcccaagatgaaaatggcgatactcctctacacctagctattattcacgggcagacttcggtgatcgaacagatcgtgtatgtaattcaccacgcccaggatctgggcgtggtcaacctcaccaatcatcttcaccagactcccctgcacttagccgtaattaccggacagacgtcagtggtaagctttctgctgagggtaggagcagaccccgctctccttgaccgtcatggcgattctgccatgcaccttgccctcagagccggagccggagcaccagagttgctgagagcgctactccagtctggagctcctgctgtgccacagctgttgcacatgccagacttcgaaggactgtaccccgtccacctggccgtgagagccaggtctccagagtgcctggatctgctcgttgacagcggggcagaggtagaagcaaccgagcgtcaggggggtaggaccgctttgcatctggctaccgaaatggaagaactgggtctagtgacacacctggtgaccaaactgcgggctaatgttaatgccaggacatttgccggtaacacccctctccatttagcggctggcctggggtaccctacactcacccgactgcttctgaaagccggtgcggacattcacgctgagaatgaggagcccctgtgcccattaccaagcccgccaacatccgattccgattctgacagtgagggtccagaaaaggacaccaggtcatccttccgcggacacaccccacttgacctcacatgtagcaccaaggtaaaaacactcctattgaacgctgctcagaatacaatggagcctccgctgacaccgccatctccagcaggacccggactcagcctgggcgacacagcacttcaaaatctagagcagttgttggacggcccagaggcacagggctcgtgggccgagctggctgaacgcctcggcctgcgtagccttgtggacacctaccgccaaaccacctctcccagtggaagcctactgaggtcttatgagctggctggaggcgaccttgccggtcttcttgaggccttgtccgacatgggcctggaagagggcgtgcgattgctccgagggccagagactcgcgataagttgccctcgactgaagtgaaagaagatagtgcatacggcagccagtccgtggaacaggaagcagaaaagctgggccctccccctgagcctcccggtggcctctgtcacggccacccgcagccccaggtccattag

SEQ ID NO: 129303 - DNA, 2700 bp, Artificial Sequence
  derived and/or modified sequence
atggagtcatgctacaaccctggactggatggcatcatcgagtacgacgacttcaagttgaactcatcgatagtcgagcctaaagagccggctccggaaaccgccgacggcccttacctggtgatcgttgagcaacccaagcagcggggattccgctttcggtacggctgcgagggcccttcacacggcggactgcctggagcatcctccgagaaaggtcgcaaaacatatcccacagtgaagatctgtaattatgagggccctgcgaagatcgaggtggatttggtcacccactccgaccccccaagggcacacgcccactcgcttgtgggtaagcagtgttcagaactcggcatctgcgccgtatctgtcggccctaaagacatgaccgctcaatttaacaacctcggtgtcctacatgttactaaaaaaaacatgatgggcaccatgatccagaagttgcagcgacagcgactgcgctcaaggccacaaggactgacagaagccgaacagcgggagctggaacaggaggccaaagaacttaagaaagtcatggatctctctattgtgaggctgagattttccgctttcctacgtgcttccgatggcagcttttcactccctttaaaaccagtcatttctcagcctatccacgattccaagagtcccggagcaagcaatctaaagatttctcggatggataagactgcaggctctgtgcggggtggtgatgaagtctacctcttgtgcgacaaagttcaaaaggatgatattgaggtgcgtttctacgaggatgatgagaatggatggcaggcattcggcgactttagccccactgacgtgcataaacagtatgctatagtgtttaggactcccccttaccacaagatgaagatcgagcggcctgttaccgtgttcttacagctgaagaggaagagaggtggggatgtgagtgattctaagcagtttacttactaccccctggtggaagacaaggaagaagtgcagaggaaacgaaggaaagctcttcccactttctcacagcccttcgggggaggttctcatatggggggaggcagcggcggagctgccggaggctatgggggagcaggcggtggaggtagtctgggcttctttccctcttccctggcctacagcccatatcagagcggtgccggtccaatgggctgctatccaggcggtggaggaggagcccagatggctgcgacagtcccttcccgcgacagtggtgaggaagccgctgaacccagcgccccttctcggaccccccagtgtgagcctcaggctcctgagatgctgcagcgggctagagagtacaatgctcggctgttcggactcgcgcagcggtccgctagggcgctcctggattatggagtgacggcggatgcacgggcattgctggcaggccagcgacacctgttgactgcacaggacgagaacggagacacaccactgcaccttgccattattcacgggcaaacctcagtgattgaacagatcgtttatgtgatccaccatgcacaagaccttggggtggtgaatcttaccaatcacctccatcaaacacccctgcacctggccgtaattaccggacaaacctccgtagtgtccttccttctaagagtcggggctgatcctgccctcctcgacagacacggggattccgcaatgcacctcgctctacgagctggagctggagccccagaactgctgcgagccttgctgcagagtggcgcacctgcagtgcctcaactgttacacatgccagacttcgaaggtctgtatcccgtgcatctggcagttagggccagatcccccgaatgcctggatctgctcgtggatagcggagcggaggtggaagccaccgaaagacaggggggtcgaactgctctgcacctggctaccgagatggaggaactcggattggtgacccatctggtgactaagctccgtgccaatgtgaatgctagaactttcgccggaaacacgccactgcatctcgctgccggattaggctaccccaccttgacacgtctgttgctgaaggctggtgcagacatccacgcagagaacgaggagcctctctgcccactgcccagtcctccgacctcagattcagattcggactctgagggcccagagaaagacacgcgaagctcttttcgcggacataccccgctagacctcacctgttccactaaggtgaaaactctgcttctgaacgcagctcagaataccatggagcccccacttacacctccatctcccgctgggcctggactatctctgggtgacacagcgctccaaaatttagaacaacttttagatggtccagaggcccaggggtcatgggctgaactcgccgagaggcttggcctccggtcattggtggatacctatcgccagaccaccagcccgtccggctctctgctccggtcatatgagctcgccggtggggatctcgccggtttgttagaggcactgagcgacatggggttggaggaaggtgttcgcttattgcgaggtccagaaacgagagataagctgccctccactgaggtgaaagaagattccgcttacgggtcccagtctgtggaacaagaggccgagaagctgggaccaccaccggagccacctggcggtctgtgtcatggtcacccccagccacaggtccattag

SEQ ID NO: 129304 - DNA, 3041 bp, Artificial Sequence
  derived and/or modified sequence
ggtattttcgggactttcctaagctgctctaactttcctgccccttccccggccaagcccaactccggatctcgctctccaccggatctcacccgccacacccggacaggcggctggaggaggcgggcgtctaaaattctgggaagcagaacctggccggagccactagacagagccgggcctagcccagagacatggagagttgctacaacccaggtctggatggtattattgaatatgatgatttcaaattgaactcctccattgtggaacccaaggagccagccccagaaacagctgatggcccctacctggtgatcgtggaacagcctaagcagagaggcttccgatttcgatatggctgtgaaggcccctcccatggaggactgcccggtgcctccagtgagaagggccgaaagacctatcccactgtcaagatctgtaactacgagggaccagccaagatcgaggtggacctggtaacacacagtgacccacctcgtgctcatgcccacagtctggtgggcaagcaatgctcggagctggggatctgcgccgtttctgtggggcccaaggacatgactgcccaatttaacaacctgggtgtcctgcatgtgactaagaagaacatgatggggactatgatacaaaaacttcagaggcagcggctccgctctaggccccagggccttacggaggccgagcagcgggagctggagcaagaggccaaagaactgaagaaggtgatggatctgagtatagtgcggctgcgcttctctgccttccttagagccagtgatggctccttctccctgcccctgaagccagtcatctcccagcccatccatgacagcaaatctccgggggcatcaaacctgaagatttctcgaatggacaagacagcaggctctgtgcggggtggagatgaagtttatctgctttgtgacaaggtgcagaaagatgacattgaggttcggttctatgaggatgatgagaatggatggcaggcctttggggacttctctcccacagatgtgcataaacagtatgccattgtgttccggacacccccctatcacaagatgaagattgagcggcctgtaacagtgtttctgcaactgaaacgcaagcgaggaggggacgtgtctgattccaaacagttcacctattaccctctggtggaagacaaggaagaggtgcagcggaagcggaggaaggccttgcccaccttctcccagcccttcgggggtggctcccacatgggtggaggctctgggggtgcagccgggggctacggaggagctggaggaggtggcagcctcggtttcttcccctcctccctggcctacagcccctaccagtccggcgcgggccccatgggctgctacccgggaggcgggggcggggcgcagatggccgccacggtgcccagcagggactccggggaggaagccgcggagccaagcgccccctccaggaccccccagtgcgagccgcaggccccggagatgctgcagcgagctcgagagtacaacgcgcgcctgttcggcctggcgcagcgcagcgcccgagccctactcgactacggcgtcaccgcggacgcgcgcgcgctgctggcgggacagcgccacctgctgacggcgcaggacgagaacggagacacaccactgcacctagccatcatccacgggcagaccagtgtcattgagcagatagtctatgtcatccaccacgcccaggacctcggcgttgtcaacctcaccaaccacctgcaccagacgcccctgcacctggcggtgatcacggggcagacgagtgtggtgagctttctgctgcgggtaggtgcagacccagctctgctggatcggcatggagactcagccatgcatctggcgctgcgggcaggcgctggtgctcctgagctgctgcgtgcactgcttcagagtggagctcctgctgtgccccagctgttgcatatgcctgactttgagggactgtatccagtacacctggcagtccgagcccgaagccctgagtgcctggatctgctggtggacagtggggctgaagtggaggccacagagcggcaggggggacgaacagccttgcatctagccacagagatggaggagctggggttggtcacccatctggtcaccaagctccgggccaacgtgaacgctcgcacctttgcgggaaacacacccctgcacctggcagctggactggggtacccgaccctcacccgcctccttctgaaggctggtgctgacatccatgctgaaaacgaggagcccctgtgcccactgccttcaccccctacctctgatagcgactcggactctgaagggcctgagaaggacacccgaagcagcttccggggccacacgcctcttgacctcacttgcagcaccaaggtgaagaccttgctgctaaatgctgctcagaacaccatggagccacccctgaccccgcccagcccagcagggccgggactgtcacttggtgatacagctctgcagaacctggagcagctgctagacgggccagaagcccagggcagctgggcagagctggcagagcgtctggggctgcgcagcctggtagacacgtaccgacagacaacctcacccagtggcagcctcctgcgcagctacgagctggctggcggggacctggcaggtctactggaggccctgtctgacatgggcctagaggagggagtgaggctgctgaggggtccagaaacccgagacaagctgcccagcacagaggtgaaggaagacagtgcgtacgggagccagtcagtggagcaggaggcagagaagctgggcccaccccctgagccaccaggagggctctgccacgggcacccccagcctcaggtgcactgacctgctgcctgcccccagcccccttcccggaccccctgtacagcgtccccacctatttcaaatcttatttaacaccccacacccacccctcagttgggacaaataaaggattctcatgggaaggggaggacccctccttcccaactt

SEQ ID NO: 129305 - DNA, 3048 bp, Artificial Sequence
  derived and/or modified sequence
ggaattcccccctccggggggccgagaaggggctttcccggccctgagccctgctggcaggcgaggtgtcgcgaccggtcccaggtgggtcgggcgcggagagaagccgcaaccagagccgccgccacggcgggcgtctaaaattctgggaagcagaacctggccggagccactagacagagccgggcctagcccagagacatggagagttgctacaacccaggtctggatggtattattgaatatgatgatttcaaattgaactcctccattgtggaacccaaggagccagccccagaaacagctgatggcccctacctggtgatcgtggaacagcctaagcagagaggcttccgatttcgatatggctgtgaaggcccctcccatggaggactgcccggtgcctccagtgagaagggccgaaagacctatcccactgtcaagatctgtaactacgagggaccagccaagatcgaggtggacctggtaacacacagtgacccacctcgtgctcatgcccacagtctggtgggcaagcaatgctcggagctggggatctgcgccgtttctgtggggcccaaggacatgactgcccaatttaacaacctgggtgtcctgcatgtgactaagaagaacatgatggggactatgatacaaaaacttcagaggcagcggctccgctctaggccccagggccttacggaggccgagcagcgggagctggagcaagaggccaaagaactgaagaaggtgatggatctgagtatagtgcggctgcgcttctctgccttccttagagccagtgatggctccttctccctgcccctgaagccagtcatctcccagcccatccatgacagcaaatctccgggggcatcaaacctgaagatttctcgaatggacaagacagcaggctctgtgcggggtggagatgaagtttatctgctttgtgacaaggtgcagaaagatgacattgaggttcggttctatgaggatgatgagaatggatggcaggcctttggggacttctctcccacagatgtgcataaacagtatgccattgtgttccggacacccccctatcacaagatgaagattgagcggcctgtaacagtgtttctgcaactgaaacgcaagcgaggaggggacgtgtctgattccaaacagttcacctattaccctctggtggaagacaaggaagaggtgcagcggaagcggaggaaggccttgcccaccttctcccagcccttcgggggtggctcccacatgggtggaggctctgggggtgcagccgggggctacggaggagctggaggaggtggcagcctcggtttcttcccctcctccctggcctacagcccctaccagtccggcgcgggccccatgggctgctacccgggaggcgggggcggggcgcagatggccgccacggtgcccagcagggactccggggaggaagccgcggagccaagcgccccctccaggaccccccagtgcgagccgcaggccccggagatgctgcagcgagctcgagagtacaacgcgcgcctgttcggcctggcgcagcgcagcgcccgagccctactcgactacggcgtcaccgcggacgcgcgcgcgctgctggcgggacagcgccacctgctgacggcgcaggacgagaacggagacacaccactgcacctagccatcatccacgggcagaccagtgtcattgagcagatagtctatgtcatccaccacgcccaggacctcggcgttgtcaacctcaccaaccacctgcaccagacgcccctgcacctggcggtgatcacggggcagacgagtgtggtgagctttctgctgcgggtaggtgcagacccagctctgctggatcggcatggagactcagccatgcatctggcgctgcgggcaggcgctggtgctcctgagctgctgcgtgcactgcttcagagtggagctcctgctgtgccccagctgttgcatatgcctgactttgagggactgtatccagtacacctggcagtccgagcccgaagccctgagtgcctggatctgctggtggacagtggggctgaagtggaggccacagagcggcaggggggacgaacagccttgcatctagccacagagatggaggagctggggttggtcacccatctggtcaccaagctccgggccaacgtgaacgctcgcacctttgcgggaaacacacccctgcacctggcagctggactggggtacccgaccctcacccgcctccttctgaaggctggtgctgacatccatgctgaaaacgaggagcccctgtgcccactgccttcaccccctacctctgatagcgactcggactctgaagggcctgagaaggacacccgaagcagcttccggggccacacgcctcttgacctcacttgcagcaccaaggtgaagaccttgctgctaaatgctgctcagaacaccatggagccacccctgaccccgcccagcccagcagggccgggactgtcacttggtgatacagctctgcagaacctggagcagctgctagacgggccagaagcccagggcagctgggcagagctggcagagcgtctggggctgcgcagcctggtagacacgtaccgacagacaacctcacccagtggcagcctcctgcgcagctacgagctggctggcggggacctggcaggtctactggaggccctgtctgacatgggcctagaggagggagtgaggctgctgaggggtccagaaacccgagacaagctgcccagcacagaggtgaaggaagacagtgcgtacgggagccagtcagtggagcaggaggcagagaagctgggcccaccccctgagccaccaggagggctctgccacgggcacccccagcctcaggtgcactgacctgctgcctgcccccagcccccttcccggaccccctgtacagcgtccccacctatttcaaatcttatttaacaccccacacccacccctcagttgggacaaataaaggattctcatgggaaggggaggacccctccttcccaactt

SEQ ID NO: 129306 - protein, 356 aa, Artificial Sequence
  derived and/or modified sequence
MAGVACLGKAADADEWCDSGLGSLGPDAAAPGGPGLGAELGPGLSWAPLVFGYVTEDGDTALHLAVIHQHEPFLDFLLGFSAGTEYMDLQNDLGQTALHLAAILGETSTVEKLYAAGAGLCVAERRGHTALHLACRVGAHACARALLQPRPRRPREAPDTYLAQGPDRTPDTNHTPVALYPDSDLEKEEEESEEDWKLQLEAENYEGHTPLHVAVIHKDVEMVRLLRDAGADLDKPEPTCGRSPLHLAVEAQAADVLELLLRAGANPAARMYGGRTPLGSAMLRPNPILARLLRAHGAPEPEGEDEKSGPCSSSSDSDSGDEGDEYDDIVVHSSRSQTRLPPTPASKPLPDDPRPV

SEQ ID NO: 129307 - protein, 361 aa, Artificial Sequence
  derived and/or modified sequence
LQNSRQSPATGGRLRGAPEAAGAMAGVACLGKAADADEWCDSGLGSLGPDAAAPGGPGLGAELGPGLSWAPLVFGYVTEDGDTALHLAVIHQHEPFLDFLLGFSAGTEYMDLQNDLGQTALHLAAILGETSTVEKLYAAGAGLCVAERRGHTALHLACRVGAHACARALLQPRPRRPREAPDTYLAQGPDRTPDTNHTPVALYPDSDLEKEEEESEEDWKLQLEAENYEGHTPLHVAVIHKDVEMVRLLRDAGADLDKPEPTCGRSPLHLAVEAQAADVLELLLRAGANPAARMYGGRTPLGSAMLRPNPILARLLRAHGAPEPEGEDEKSGPCSSSSDSDSGDEGVSQEERQGSPAGGSG

SEQ ID NO: 129308 - DNA, 1198 bp, Artificial Sequence
  derived and/or modified sequence
ccggcaaagcccagctacaggcgggcgactgcggggggcccctgaggcggcgggggccatggctggggtcgcgtgcttgggaaaagctgccgacgcagatgaatggtgcgacagcggcctgggctccctgggtccggacgcagcggcccccggaggacctgggttgggcgcggagttgggcccggggctgtcgtgggctcccctcgtcttcggctacgtcactgaggatggggacacggcactgcacttggctgtgattcatcagcatgaacccttcctggattttcttctaggcttctcggccggcactgagtacatggacctgcagaatgacctaggccagacagccctgcacctggcagccatcctgggggagacatccacggtggagaagctgtacgcagcaggcgccgggctgtgtgtggcggagcgtaggggccacacggcgctgcacctggcctgccgtgtgggggcacacgcctgtgcccgtgccctgcttcagccccgcccccggcgccccagggaagcccccgacacctacctcgctcagggccctgaccgtactcccgacaccaaccatacccctgtcgccttgtaccccgattccgacttggagaaggaagaagaggagagtgaggaggactggaagctgcagctggaggctgaaaactacgagggccacaccccactccacgtggccgttatccacaaagatgtggagatggtccggctgctccgagatgctggagctgaccttgacaaaccggagcccacgtgcggccggagcccccttcatttggcagtggaggcccaggcagccgatgtgctggagcttctcctgagggcaggcgcgaaccctgctgcccgcatgtacggtggccgcaccccactcggcagtgccatgctccggcccaaccccatcctcgcccgcctcctccgtgcacacggagcccctgagcccgagggcgaggacgagaaatccggcccctgcagcagcagtagcgacagcgacagcggagacgagggcgatgaatacgacgacattgtggttcacagcagccgcagccaaacccggctgcctcccaccccagcctcaaaacctcttcctgacgacccccgccccgtgtgatttgtttcattgttaatataatttccagtttaataaacaaaaccctagttctgacaaccagaaaaaaaa

SEQ ID NO: 129309 - DNA, 1071 bp, Artificial Sequence
  derived and/or modified sequence
atggcaggtgtagcctgtctcggaaaggccgcagacgcagatgaatggtgcgactcaggactgggttcccttggcccagacgccgcagcccccggcggccctggtctcggggccgagctcgggcctggcttgtcttgggcgcccctggtattcgggtatgtgactgaggacggcgatactgccctgcacctggctgtaatccaccagcatgaacctttcctcgactttctccttggtttcagtgccggcaccgagtacatggacctgcagaatgatctgggtcagaccgcactgcatttggcggcgatattaggggaaacctccacggtcgagaagttgtacgcggccggggctggcttgtgcgtggcagaacggcgcggacacacagccctgcaccttgcatgtagagtgggcgcccatgcgtgtgcccgggccctgctgcagccacgtcctaggcggccccgggaagctcctgacacctatctggctcagggcccagacaggacgcctgatacaaaccacacgccagtcgctctataccccgactctgacctggaaaaggaagaggaagaatccgaggaagactggaagctgcagctggaagccgaaaattatgagggccacacccctcttcacgttgccgtcatccacaaggatgtcgagatggttaggctgttgagagatgccggcgctgacctggacaaacccgagcctacctgcgggcggtcaccgctacatctcgcagtggaggcccaggccgccgatgtgcttgagcttctcctccgtgctggtgccaatccagcggctcgaatgtacggggggagaacaccactcgggagtgccatgctccgccctaatccaattcttgcccgattgcttcgcgcacatggggctcccgagcccgagggagaagatgaaaaatccgggccgtgcagtagctcctccgattctgacagtggtgacgaaggcgacgagtacgacgatatcgtcgtgcattcctcacgctcacagacccggctgccccctacgccggcttccaaaccacttcccgatgaccctagacctgtttag

SEQ ID NO: 129310 - DNA, 1086 bp, Artificial Sequence
  derived and/or modified sequence
ctgcagaatagccgccagtccccagcgaccggcgggcgattgaggggtgccccagaagccgccggcgccatggcaggcgtagcttgtctcggaaaagccgccgatgctgacgagtggtgtgattccggactagggagtctaggccctgacgctgccgcgccagggggcccgggcttaggcgcagaacttgggcccgggctcagttgggctccgttggtctttgggtacgtaacagaggatggcgatacagcacttcatcttgccgtgattcatcagcacgagccgttccttgacttcctgcttggtttttccgcgggtacagagtatatggatcttcagaatgacctcggccagactgccctgcacctggctgccattctcggggagaccagcacagtggagaaattgtacgcagccggagccggtctgtgcgttgccgagagacgtgggcataccgctttgcacttagcctgccgggtaggagcacatgcatgtgccagagccctgctacagcccagaccacgaagaccgcgggaggcccctgatacctacttggcacaggggcctgatcggacccccgacaccaaccatacccccgtcgcactgtaccccgattctgatctcgagaaggaagaggaagagagcgaagaggactggaaactgcaacttgaggctgagaattacgagggtcacacccccctacacgtagcagtcatccataaggatgtggaaatggtgcggctgttgcgtgatgccggggccgacctggataagcctgaacccacgtgcggccgatctccactgcacctggctgtagaggctcaggctgccgatgtcctggagctattgctgcgggcaggggctaatcctgctgcccgaatgtatggtggtaggacaccgctcggctcagccatgctgcgaccaaatccgattctcgcacggctactccgggctcacggtgcacctgagcctgagggggaggatgagaaaagcgggccgtgtagtagttccagcgattctgactccggcgacgagggcgtgagccaagaggagagacagggcagccccgctggcgggtccgggtag

SEQ ID NO: 129311 - DNA, 1071 bp, Artificial Sequence
  derived and/or modified sequence
atggccggcgtggcctgcctgggcaaggctgctgatgctgatgagtggtgtgacagcggcctgggcagcctgggcccagatgctgctgcccctgggggccctggcctgggcgctgagctgggccctggcctgtcctgggcccccctggtgtttggctacgtgacagaagatggagacacagccctgcacctggccgtcatccaccagcacgagcccttcctggacttcctgctgggcttctctgctggaacagagtacatggacctgcagaatgacctgggccagacagccctgcacctggccgccatcctgggggagaccagcacagtggagaagctgtatgctgctggggccggcctgtgtgtggccgagcggcggggccacacagccctgcacctggcctgccgggtgggcgcccacgcctgtgcccgggccctgctgcagccccggccccggcggccccgggaggccccagacacctacctggcccagggccctgacaggaccccagacaccaaccacacccctgtggccctgtacccagacagcgacctggagaaggaggaggaggagagcgaggaggactggaagctgcagctggaggctgaaaattatgagggccacacccccctgcacgtggccgtcatccacaaggatgtggagatggtgcggctgctgagagatgctggagctgacctggacaagccagagcccacctgtggccgcagccccctgcacctggccgtggaggcccaggccgcagatgtgctggagctgctgctgcgggccggggccaacccagctgccaggatgtatggaggccgcacccccctgggcagcgccatgctgcggcccaaccccatcctggcccggctgctgcgggcccacggggcccctgagcctgagggggaggatgagaagagcggcccctgcagcagcagcagtgacagcgacagcggagatgaaggagatgaatatgatgacatcgtggtgcacagcagccgcagccagacccggctgccccccaccccagccagcaagcccctgcctgatgaccccaggcctgtgtag

SEQ ID NO: 129312 - DNA, 1086 bp, Artificial Sequence
  derived and/or modified sequence
ctgcagaacagccggcagagccctgccaccggcggccgcctgcggggggcccctgaggccgccggggccatggccggcgtggcctgcctgggcaaggccgcagatgctgatgagtggtgtgacagcggcctgggcagcctgggcccagatgctgctgcccctgggggccctggcctgggcgctgagctgggccctggcctgtcctgggcccccctggtgtttggctacgtgacagaagatggagacacagccctgcacctggccgtcatccaccagcacgagcccttcctggacttcctgctgggcttctctgctggaacagagtacatggacctgcagaatgacctgggccagacagccctgcacctggccgccatcctgggggagaccagcacagtggagaagctgtatgctgctggagctggcctgtgtgtggccgagcggcggggccacacagccctgcacctggcctgccgggtgggcgcccacgcctgtgcccgggccctgctgcagccccggccccggcggccccgggaggccccagacacctacctggcccagggccctgacaggaccccagacaccaaccacacccctgtggccctgtacccagacagcgacctggagaaggaggaggaggagagcgaggaggactggaagctgcagctggaggccgagaactatgagggccacacccccctgcacgtggccgtcatccacaaggatgtggagatggtgcggctgctgagagatgctggagctgacctggacaagccagagcccacctgtggccgcagccccctgcacctggccgtggaggcccaggccgcagatgtgctggagctgctgctgcgggccggggccaacccagctgccaggatgtatggaggccgcacccccctgggcagcgccatgctgcggcccaaccccatcctggcccggctgctgcgggcccatggagcccctgagccagaaggagaagatgagaagagcggcccctgcagcagcagcagtgacagcgacagcggagatgagggcgtgtcccaggaggagcggcagggcagccctgctgggggcagcggctag

SEQ ID NO: 129313 - DNA, 1071 bp, Artificial Sequence
  derived and/or modified sequence
atggccggcgtggcctgcctgggcaaggccgccgacgccgacgagtggtgcgactccggtctaggctctctgggaccagacgctgcggcccctgggggccctgggctcggagccgaactcggcccaggcctaagctgggctcctctggtctttggctatgttacggaggacggggacacagcactgcatctggccgtgatccaccagcatgagccttttctagactttcttctcggcttctcggctggcactgagtacatggatcttcaaaatgatctggggcagaccgccctccatctggcagcaatcctgggcgagacctcaactgttgagaagttatacgctgctggagcgggcttatgtgtggcagagcgccgggggcacacagctttgcacctggcttgcagggttggggcacatgcctgcgcaagggcgctcctccagccaagacctaggcggccaagagaggcacctgatacataccttgcccagggcccagatcgtactcctgatactaaccacacacctgtcgcgctttaccccgactctgatctggagaaagaagaggaggaatcagaagaggactggaaactgcaactggaagccgaaaactatgagggacacaccccattacacgttgccgtcatccacaaggatgtagagatggtccggctgctgcgggatgctggcgcagatctggacaagccagagcctacttgtggtcgatcccccctgcatctggccgtagaggcacaagccgccgacgtgctggagctgctgctccgggccggtgctaaccccgctgcgcggatgtatgggggcaggaccccccttggatctgctatgctccgcccaaatcctatcttggcaaggttgctgcgagcacatggggccccagagcccgaaggtgaggacgaaaaaagcggaccttgcagttcgtcttccgactctgacagtggggacgagggcgacgaatatgacgatatcgtggttcatagcagtcgttctcagacaagattgcccccaaccccggcctccaagccactgcctgacgaccctagacccgtgtag

SEQ ID NO: 129314 - DNA, 1086 bp, Artificial Sequence
  derived and/or modified sequence
ctgcagaacagccggcagagccccgccaccggcggccggctgcggggagcccccgaggctgctggagcgatggctggggtggcatgcctcggaaaagctgccgacgctgatgagtggtgtgacagcggcctggggagtcttggccccgacgcagctgcacccggagggccagggctaggcgccgaattgggacccggattatcttgggcccccttagtgttcggttacgtgacagaggacggcgacaccgcactacatcttgccgtgatccatcagcacgagcctttcctggatttcttgttaggtttttctgccggaacagaatatatggatctgcagaatgatctcgggcaaacagcattgcatcttgcggcaatacttggggagacttccactgttgagaaactctatgccgctggagcaggcctgtgtgtggctgaaagaaggggtcacactgctctccatcttgcatgccgcgtgggcgcacatgcgtgcgcacgtgcactactgcagccacggcctagacggcctagggaggccccagatacctatctcgcccaggggccagataggacccccgacaccaaccatactcccgtagctttgtatcccgactctgacttggagaaagaagaggaagagtcagaggaggactggaaattacaactggaagcagagaattacgaaggccacacaccgcttcatgtggctgttattcacaaggatgttgagatggtgcgcctgctccgagacgctggcgcagacctggacaagcccgagcctacctgtgggagaagcccccttcatctcgctgtggaagcccaggcagcggacgtgctggaactattgcttcgggccggggcaaaccccgcagcccggatgtatggcggacgaactcctctgggtagcgctatgctgagacccaaccccattctcgcccgcctgctccgggcccacggcgctccagaacccgaaggtgaggacgagaagtccggtccgtgtagttccagtagcgattctgacagtggtgacgagggcgtttcacaagaagaaaggcagggcagcccggctggtggctcaggatag

SEQ ID NO: 129315 - DNA, 1188 bp, Artificial Sequence
  derived and/or modified sequence
ccggcaaagcccagctacaggcgggcgactgcggggggcccctgaggcggcgggggccatggctggggtcgcgtgcttgggaaaagctgccgacgcagatgaatggtgcgacagcggcctgggctccctgggtccggacgcagcggcccccggaggacctgggttgggcgcggagttgggcccggggctgtcgtgggctcccctcgtcttcggctacgtcactgaggatggggacacggcactgcacttggctgtgattcatcagcatgaacccttcctggattttcttctaggcttctcggccggcactgagtacatggacctgcagaatgacctaggccagacagccctgcacctggcagccatcctgggggagacatccacggtggagaagctgtacgcagcaggcgccgggctgtgtgtggcggagcgtaggggccacacggcgctgcacctggcctgccgtgtgggggcacacgcctgtgcccgtgccctgcttcagccccgcccccggcgccccagggaagcccccgacacctacctcgctcagggccctgaccgtactcccgacaccaaccatacccctgtcgccttgtaccccgattccgacttggagaaggaagaagaggagagtgaggaggactggaagctgcagctggaggctgaaaactacgagggccacaccccactccacgtggccgttatccacaaagatgtggagatggtccggctgctccgagatgctggagctgaccttgacaaaccggagcccacgtgcggccggagcccccttcatttggcagtggaggcccaggcagccgatgtgctggagcttctcctgagggcaggcgcgaaccctgctgcccgcatgtacggtggccgcaccccactcggcagtgccatgctccggcccaaccccatcctcgcccgcctcctccgtgcacacggagcccctgagcccgagggcgaggacgagaaatccggcccctgcagcagcagtagcgacagcgacagcggagacgagggcgatgaatacgacgacattgtggttcacagcagccgcagccaaacccggctgcctcccaccccagcctcaaaacctcttcctgacgacccccgccccgtgtgatttgtttcattgttaatataatttccagtttaataaacaaaaccctagttctgacaacc

SEQ ID NO: 129316 - DNA, 2272 bp, Artificial Sequence
  derived and/or modified sequence
ctccagaactcccggcaaagcccagctacaggcgggcgactgcggggggcccctgaggcggcgggggccatggctggggtcgcgtgcttgggaaaagctgccgacgcagatgaatggtgcgacagcggcctgggctccctgggtccggacgcagcggcccccggaggacctgggttgggcgcggagttgggcccggggctgtcgtgggctcccctcgtcttcggctacgtcactgaggatggggacacggcactgcacttggctgtgattcatcagcatgaacccttcctggattttcttctaggcttctcggccggcactgagtacatggacctgcagaatgacctaggccagacagccctgcacctggcagccatcctgggggagacatccacggtggagaagctgtacgcagcaggcgccgggctgtgtgtggcggagcgtaggggccacacggcgctgcacctggcctgccgtgtgggggcacacgcctgtgcccgtgccctgcttcagccccgcccccggcgccccagggaagcccccgacacctacctcgctcagggccctgaccgtactcccgacaccaaccatacccctgtcgccttgtaccccgattccgacttggagaaggaagaagaggagagtgaggaggactggaagctgcagctggaggctgaaaactacgagggccacaccccactccacgtggccgttatccacaaagatgtggagatggtccggctgctccgagatgctggagctgaccttgacaaaccggagcccacgtgcggccggagcccccttcatttggcagtggaggcccaggcagccgatgtgctggagcttctcctgagggcaggcgcgaaccctgctgcccgcatgtacggtggccgcaccccactcggcagtgccatgctccggcccaaccccatcctcgcccgcctcctccgtgcacacggagcccctgagcccgagggcgaggacgagaaatccggcccctgcagcagcagtagcgacagcgacagcggagacgagggcgtgagtcaggaggagagacagggcagcccagctggggggtcaggatagaccggcaggcaagaagcccaagaagataattaggcaccgaccttgggctgctgttagagaactcaggcagcagcgccagtgacacggggcactagtcaggagagacctggacaggggtggtgggaagagcttgggcagaagtggctgaaaaactaaggcagtggcaaaggtagaactcaggcaggggtggagaaaaggcgttggtcgcagtgattggtgaacacagcgggggtgggtggtagcgctgggggtgattttaggcagcaagaattggagaactcacactgcgaaaagaaaaccttgggtggcagtgatttgaacaccggcagtgctggggcaggacccgagccagcggtggggagagatatagtcagagaacccagcaatacagatccgtccttgggcaaggcgcggtgctggatgatgggtgcggaggaatttgggtaaaggcagagggaaggggtggaggagggccagctcagttgccgaaactctggagtggcggctggctagaaattggtctgtagaaatgaccttgaaaatggagttctggccaggtgcggtggctcacgcctgtaatcccagcactttgggaggccgaggcaggcagatcacgaggtcaggagttcgagaccagcctggccaacatggcaagaccctgtctctactaaaaatacaaaaattagctgggcgtggtggcgcatgcctataatcccagctacttgggaggctgaggtaggagaattgcttgaacctgggaggtggaggttgcagtgaacctagatcacgccactgcattccagcctgggcaacagagcgagactccatcttaaaaaaaaaaaaaaaaaaaagaaagaaaagaaaatggagttctgagagctaggaaactgggaggttgagccaggagcaggggaacttgggctttgaggcgagacctaattcttagggtgctctatgaggacatgggtggtgggcaaagtgacagccgcctgagcccctctgcctggtcccctttgcccccaggatgaatacgacgacattgtggttcacagcagccgcagccaaacccggctgcctcccaccccagcctcaaaacctcttcctgacgacccccgccccgtgtgatttgtttcattgttaatataatttccagtttaataaacaaaaccctagttctgacaaccag

SEQ ID NO: 129317 - DNA, 1071 bp, Artificial Sequence
  derived and/or modified sequence
atggcaggagtggcttgtctagggaaggccgcagacgctgacgagtggtgcgattcaggcctcggcagcctcggtccagatgccgcagccccaggcggtcccggattgggggctgagctggggcctgggctgtcttgggctccattagtctttggttatgtcactgaggatggtgacactgcgttgcacctggcagttattcatcagcatgaacccttcctggatttccttttgggattctccgcgggaacggagtatatggacctgcaaaacgacctcggacagaccgctctgcacctggcagctatcctcggggagacatctacagtcgaaaaactgtacgccgctggcgcaggcctgtgcgttgcagaaaggcggggtcacaccgcacttcacctcgcatgtcgtgttggcgctcacgcatgcgcacgtgctctgcttcagcccaggccacgtaggccccgtgaggcaccggacacttacttggctcaggggccagacagaacccccgatacaaaccacacacccgtggctctgtacccggattcggaccttgagaaggaggaagaagaaagtgaggaagactggaaactccagctggaagcagaaaattatgagggacacactcctctccacgtggctgtcatccacaaagatgttgaaatggtgcgactcctgcgtgatgctggggctgacctggacaaaccagagcctacgtgtgggcgaagccctctgcacctggcagtggaggcccaggcagctgatgttctcgagttgctccttagggctggagcaaaccctgcagcgagaatgtacggtggaaggaccccgcttggcagtgcaatgctgagaccaaatccgattctggcaaggctcttgcgggctcatggggctcctgagccagagggggaggacgagaagtctggtccatgcagcagttcaagcgattctgatagcggcgacgaaggcgatgaatatgacgacatcgtggttcattctagtcgctctcaaactaggttgccacccactcctgcctcaaagccgttgccagacgaccctcggccagtgtag

SEQ ID NO: 129318 - DNA, 1086 bp, Artificial Sequence
  derived and/or modified sequence
cttcagaattcgagacagagtcccgctaccggtgggagactccgcggagctccagaggctgccggagccatggcaggggtcgcctgcttggggaaggccgcagacgctgatgagtggtgtgactccggcctcggatctttgggacccgacgccgctgccccaggtggaccaggattgggggcagaactaggcccagggctgtcatgggcacctctggtcttcggctacgtgacagaagacggggacactgctttgcatttggctgtaattcaccagcacgagcccttcctagacttcttactcggattctccgcaggcacagaatacatggatctacaaaatgatcttggacaaacggctcttcatttggccgcaatacttggcgagactagcaccgtggaaaagttatatgcggctggcgcaggactttgtgtcgccgagcggagggggcacacggccttacacctggcctgtcgggttggagcgcatgcgtgcgccagggcccttctccagcctaggccgcgtcgtccccgtgaggctccggacacctacctggcccagggacctgatcgcacccccgatactaatcacactccagtggccttgtacccggacagcgatcttgagaaggaggaggaagagtcagaggaagattggaaactccagctggaagctgagaactatgagggtcacacgcccctgcatgttgccgtgattcacaaagatgttgagatggtgagattgttgcgtgacgcaggagccgatctcgataaacccgagccaacatgtggacggagcccactccatctggcagtggaagcgcaggctgctgatgtcctggagctcctgctgagggccggtgcaaaccccgctgcacgcatgtacgggggtcgcacacccctcggctctgctatgcttcgtcctaacccaatactggcccgtctgctacgcgctcacggcgctccagagcccgagggggaggatgagaagagcggaccttgttcttcaagtagcgacagcgattcgggggatgagggagtatctcaggaagaacggcagggctctcccgctggaggcagtggctag

SEQ ID NO: 129319 - DNA, 1071 bp, Artificial Sequence
  derived and/or modified sequence
atggccggcgtggcctgcctgggcaaggccgccgacgccgacgagtggtgcgacagcggcctgggcagcctgggccccgacgccgccgcccccggcggccccggcctgggcgccgagctgggccccggcctgagctgggcccccctggtgttcggctacgtgaccgaggacggcgacaccgccctgcacctggccgtgatccaccagcacgagcccttcctggacttcctgctgggcttcagcgccggcaccgagtacatggacctgcagaacgacctgggccagaccgccctgcacctggccgccatcctgggcgagaccagcaccgtggagaagctgtacgccgccggcgccggcctgtgcgtggccgagagaagaggccacaccgccctgcacctggcctgcagagtgggcgcccacgcctgcgccagagccctgctgcagcccagacccagaagacccagagaggcccccgacacctacctggcccagggccccgacagaacccccgacaccaaccacacccccgtggccctgtaccccgacagcgacctggagaaggaggaggaggagagcgaggaggactggaagctgcagctggaggccgagaactacgagggccacacccccctgcacgtggccgtgatccacaaggacgtggagatggtgagactgctgagagacgccggcgccgacctggacaagcccgagcccacctgcggcagaagccccctgcacctggccgtggaggcccaggccgccgacgtgctggagctgctgctgagagccggcgccaaccccgccgccagaatgtacggcggcagaacccccctgggcagcgccatgctgagacccaaccccatcctggccagactgctgagagcccacggcgcccccgagcccgagggcgaggacgagaagagcggcccctgcagcagcagcagcgacagcgacagcggcgacgagggcgacgagtacgacgacatcgtggtgcacagcagcagaagccagaccagactgccccccacccccgccagcaagcccctgcccgacgaccccagacccgtgtag

SEQ ID NO: 129320 - DNA, 1086 bp, Artificial Sequence
  derived and/or modified sequence
ctgcagaacagcagacagagccccgccaccggcggcagactgagaggcgcccccgaggccgccggcgccatggccggcgtggcctgcctgggcaaggccgccgacgccgacgagtggtgcgacagcggcctgggcagcctgggccccgacgccgccgcccccggcggccccggcctgggcgccgagctgggccccggcctgagctgggcccccctggtgttcggctacgtgaccgaggacggcgacaccgccctgcacctggccgtgatccaccagcacgagcccttcctggacttcctgctgggcttcagcgccggcaccgagtacatggacctgcagaacgacctgggccagaccgccctgcacctggccgccatcctgggcgagaccagcaccgtggagaagctgtacgccgccggcgccggcctgtgcgtggccgagagaagaggccacaccgccctgcacctggcctgcagagtgggcgcccacgcctgcgccagagccctgctgcagcccagacccagaagacccagagaggcccccgacacctacctggcccagggccccgacagaacccccgacaccaaccacacccccgtggccctgtaccccgacagcgacctggagaaggaggaggaggagagcgaggaggactggaagctgcagctggaggccgagaactacgagggccacacccccctgcacgtggccgtgatccacaaggacgtggagatggtgagactgctgagagacgccggcgccgacctggacaagcccgagcccacctgcggcagaagccccctgcacctggccgtggaggcccaggccgccgacgtgctggagctgctgctgagagccggcgccaaccccgccgccagaatgtacggcggcagaacccccctgggcagcgccatgctgagacccaaccccatcctggccagactgctgagagcccacggcgcccccgagcccgagggcgaggacgagaagagcggcccctgcagcagcagcagcgacagcgacagcggcgacgagggcgtgagccaggaggagagacagggcagccccgccggcggcagcggctag

SEQ ID NO: 129321 - protein, 347 aa, Artificial Sequence
  derived and/or modified sequence
MEQYTANSNSSTEQIVVQAGQIQQQQQGGVTAVQLQTEAQVASASGQQVQTLQVVQGQPLMVQVSGGQLITSTGQPIMVQAVPGGQGQTIMQVPVSGTQGLQQIQLVPPGQIQIQGGQAVQVQGQQGQTQQIIIQQPQTAVTAGQTQTQQQIAVQGQQVAQTAEGQTIVYQPVNADGTILQQVTVPVSGMITIPAASLAGAQIVQTGANTNTTSSGQGTVTVTLPVAGNVVNSGGMVMMVPGAGSVPAIQRIPLPGAEMLEEEPLYVNAKQYHRILKRRQARAKLEAEGKIPKERRKYLHESRHRHAMARKRGEGGRFFSPKEKDSPHMQDPNQADEEAMTQIIRVS

SEQ ID NO: 129322 - protein, 427 aa, Artificial Sequence
  derived and/or modified sequence
MGAGATGRAMDGPRLLLLLLLGVSLGGAKEACPTGLYTHSGECCKACNLGEGVAQPCGANQTVCEPCLDSVTFSDVVSATEPCKPCTECVGLQSMSAPCVEADDAVCRCAYGYYQDETTGRCEACRVCEAGSGLVFSCQDKQNTVCEECPDGTYSDEANHVDPCLPCTVCEDTERQLRECTRWADAECEEIPGRWITRSTPPEGSDSTAPSTQEPEAPPEQDLIASTVAGVVTTVMGSSQPVVTRGTTDNLIPVYCSILAAVVVGLVAYIAFKRWNSCKQNKQGANSRPVNQTPPPEGEKLHSDSGISVDSQSLHDQQPHTQTASGQALKGDGGLYSSLPPAKREEVEKLLNGSAGDTWRHLAGELGYQPEHIDSFTHEACPVRALLASWATQDSATLDALLAALRRIQRADLVESLCSESTATSPV

SEQ ID NO: 129323 - protein, 333 aa, Artificial Sequence
  derived and/or modified sequence
MSAPCVEADDAVCRCAYGYYQDETTGRCEACRVCEAGSGLVFSCQDKQNTVCEECPDGTYSDEANHVDPCLPCTVCEDTERQLRECTRWADAECEEIPGRWITRSTPPEGSDSTAPSTQEPEAPPEQDLIASTVAGVVTTVMGSSQPVVTRGTTDNLIPVYCSILAAVVVGLVAYIAFKRWNSCKQNKQGANSRPVNQTPPPEGEKLHSDSGISVDSQSLHDQQPHTQTASGQALKGDGGLYSSLPPAKREEVEKLLNGSAGDTWRHLAGELGYQPEHIDSFTHEACPVRALLASWATQDSATLDALLAALRRIQRADLVESLCSESTATSPV

SEQ ID NO: 129324 - DNA, 1284 bp, Artificial Sequence
  derived and/or modified sequence
atgggagccggggctaccggccgagcgatggacgggccccgactactcctgctcctcttactgggggtgagcttaggaggagccaaggaggcctgccccaccggcctctacacccacagtggagagtgttgcaaagcctgtaacctcggggagggtgtggcacagccctgtggcgccaatcagaccgtttgcgagccttgccttgactccgtcactttcagcgacgtagtgtccgctactgagccatgcaagccgtgtactgaatgtgtgggcctacagtcaatgagcgcaccttgtgttgaggccgatgacgcagtctgtcgctgcgcctatggctattaccaggatgaaacaactggacgatgcgaagcgtgccgcgtgtgcgaggccggatcagggctcgtgttttcatgccaggacaaacaaaatacagtctgcgaggagtgtcctgacgggacgtacagcgatgaggccaatcatgtggacccttgcctgccatgcacagtctgcgaagacacggagcgccaattgagagagtgtaccaggtgggccgacgctgagtgtgaggaaattccggggcgctggatcaccaggtctaccccaccagaaggcagcgattcgacagctccgtctactcaggagcccgaggccccgcccgaacaggatcttattgccagcacagtcgccggggtggtgacaaccgtgatgggcagcagccagcccgtggttaccagaggcaccacagataatctgattccagtgtattgctcgattctggctgcggtggttgtagggttagtggcctatatcgcctttaagcgctggaatagttgtaagcagaacaaacagggtgccaacagccgtcctgtcaatcagacacctcctcctgagggcgaaaagctgcacagcgactcaggcatcagcgtggattctcagtccctacatgaccaacagcctcacacacagaccgcctcaggccaggctctcaaaggagatggtggcctgtattcttctctcccaccagctaagagagaggaggtggagaaactgctgaacggatcagcgggagacacctggcgccatctcgctggtgaattggggtaccagcccgagcatatcgacagtttcacacacgaggcatgcccagtgcgagctctcctggcttcctgggccacgcaggattcagctaccctggatgccctgttggcagccttgaggagaattcagagagccgacttagttgagagcttgtgttccgaatcaactgcgacaagtcccgtatag

SEQ ID NO: 129325 - DNA, 1002 bp, Artificial Sequence
  derived and/or modified sequence
atgtccgcaccctgcgtcgaggcagatgacgctgtttgcaggtgtgcatacggatattaccaggacgagactaccggacgctgcgaggcttgccgagtctgcgaggcagggtcaggcctggtgttctcatgccaagataaacagaacaccgtatgcgaagagtgtcctgatggcacctattctgatgaggccaatcatgtcgacccgtgcttgccgtgcaccgtttgtgaagacaccgaaaggcagttgcgagagtgcacgagatgggccgacgccgaatgcgaagaaatacccggcagatggatcaccaggagcacacctcccgaaggatcagactcaacagctccttcaacccaggaacctgaggccccacctgaacaggacctaatcgcttcaacagtggcgggagtggtgacgactgtgatgggctcctcacagccggtggtcaccaggggaacaaccgacaacctgatcccagtctattgctcaatcttggctgcggtggtcgtaggtctggtagcctatattgctttcaaaagatggaattcgtgtaagcagaacaaacagggggccaactccaggcccgtcaatcagacccctcccccagaaggagagaaattgcactctgacagcggaatctccgtggacagtcaatctctgcacgaccagcaacctcatacccaaacagccagcggccaggccctcaagggtgatgggggcctgtacagttccctgccgcctgccaaacgagaagaagtagagaagttgctgaatggatctgccggtgacacctggagacatcttgccggagagcttggctatcagccagaacatatcgacagtttcactcatgaagcgtgtcccgtccgtgcgctgctggcttcatgggccacacaggatagcgcgaccctggatgccctacttgccgctctgagaagaatccagcgagctgatttggtggagagtctttgttccgaatcaactgccacgagccccgtatag

SEQ ID NO: 129326 - DNA, 1284 bp, Artificial Sequence
  derived and/or modified sequence
atgggcgctggggccaccggccgggccatggatggcccccggctgctgctgctgctgctgctgggcgtgtccctgggcggggccaaggaggcctgccccaccggcctgtacacccacagcggggagtgctgcaaggcctgcaacctgggggagggcgtggcccagccctgtggggccaaccagacagtgtgtgagccctgcctggacagcgtgaccttcagtgatgtggtgtctgccacagagccctgcaagccctgcacagaatgtgtgggcctgcagagcatgtctgccccctgtgtggaggctgatgatgctgtgtgccgctgtgcctacggctactaccaggatgagaccaccggccgctgtgaggcctgccgggtgtgtgaggccggcagcggcctggtgttcagctgccaggacaagcagaacacagtgtgtgaggagtgcccagatggcacctacagtgatgaggccaaccacgtggacccctgcctgccctgcaccgtgtgtgaggacacagagcggcagctgagagaatgtacccgctgggcagatgctgaatgtgaggagatccctggccgctggatcaccaggagcaccccacctgagggcagtgacagcacagcccccagcacccaggagcctgaggcccctcctgagcaggacctgattgccagcacagtggccggcgtggtgaccaccgtgatgggcagcagccagcctgtggtgacccggggcaccacagacaacctgatccctgtgtactgcagcatcctggccgctgtggtggtgggcctggtggcctacatcgccttcaagcgctggaacagctgcaagcagaacaagcagggcgccaacagcaggcctgtgaaccagaccccacctcctgagggggagaagctgcacagcgacagcggcatctctgtggacagccagagcctgcatgaccagcagccccacacccagacagccagcggccaggccctgaagggagatggcggcctgtacagcagcctgcccccagccaagcgggaggaggtggagaagctgctgaatggcagcgctggggacacctggaggcacctggccggggagctgggctaccagcctgagcacatcgacagcttcacccatgaggcctgccctgtgcgggccctgctggcctcctgggccacccaggacagcgccaccctggatgccctgctggccgccctgcggcgcatccagagagctgacctggtggagagcctgtgcagcgagagcacagccaccagccctgtgtag

SEQ ID NO: 129327 - DNA, 1002 bp, Artificial Sequence
  derived and/or modified sequence
atgtctgccccctgtgtggaggctgatgatgctgtgtgccgctgtgcctacggctactaccaggatgagaccaccggccgctgtgaggcctgccgggtgtgtgaggccggcagcggcctggtgttcagctgccaggacaagcagaacacagtgtgtgaggagtgcccagatggcacctacagtgatgaggccaaccacgtggacccctgcctgccctgcaccgtgtgtgaggacacagagcggcagctgagagaatgtacccgctgggcagatgctgaatgtgaggagatccctggccgctggatcaccaggagcaccccacctgagggcagtgacagcacagcccccagcacccaggagcctgaggcccctcctgagcaggacctgattgccagcacagtggccggcgtggtgaccaccgtgatgggcagcagccagcctgtggtgacccggggcaccacagacaacctgatccctgtgtactgcagcatcctggccgctgtggtggtgggcctggtggcctacatcgccttcaagcgctggaacagctgcaagcagaacaagcagggcgccaacagcaggcctgtgaaccagaccccacctcctgagggggagaagctgcacagcgacagcggcatctctgtggacagccagagcctgcatgaccagcagccccacacccagacagccagcggccaggccctgaagggagatggcggcctgtacagcagcctgcccccagccaagcgggaggaggtggagaagctgctgaatggcagcgctggggacacctggaggcacctggccggggagctgggctaccagcctgagcacatcgacagcttcacccatgaggcctgccctgtgcgggccctgctggcctcctgggccacccaggacagcgccaccctggatgccctgctggccgccctgcggcgcatccagagagctgacctggtggagagcctgtgcagcgagagcacagccaccagccctgtgtag

SEQ ID NO: 129328 - DNA, 1284 bp, Artificial Sequence
  derived and/or modified sequence
atgggcgccggcgccaccggccgggccatggacggcccccggctgcttctgctgctcctcctaggagtctcactgggaggcgcaaaagaagcatgccccaccgggctttatacccacagtggggagtgttgcaaagcgtgcaaccttggagagggcgttgcccagccatgcggcgccaaccagacagtctgcgagccatgtctagattctgttacattctccgatgtggtaagtgcaactgagccctgtaagccttgcacggaatgcgtaggccttcagagcatgtcagcgccctgtgtggaggccgacgatgcggtgtgcagatgcgcctacgggtattaccaggacgagactaccggcaggtgtgaagcttgccgcgtctgcgaagctggttctggcttggtattttcatgccaggataagcaaaatacggtttgcgaggagtgcccagacgggacctacagtgacgaagctaatcacgtggatccatgcctgccttgcactgtatgtgaggatacagaaagacagctgcgtgaatgtacacgatgggcggacgcagagtgcgaagaaattcctgggcgttggattacgaggtctacccctcctgagggcagcgacagcacggcaccaagtacccaggaaccagaggcccctcccgagcaagacctaatagcatccacagtagctggcgtcgtgacaaccgtgatgggctcatcacagcccgtggttacacgtggaactactgacaacttaatccccgtgtactgtagcattctggctgctgtggtggttgggctggttgcctacatagcatttaagcgctggaatagttgcaagcagaacaagcagggcgcaaattctcgtcctgtgaaccagaccccgcccccagagggcgaaaaacttcacagcgatagtggcatcagtgttgacagccagagccttcatgatcaacagcctcacactcaaaccgccagtgggcaggctctcaaaggggacggcgggctgtattcgtcactccctcccgccaagcgcgaggaagtcgaaaagctgctgaacggtagtgccggagatacgtggcgccacctggcgggcgagctcgggtatcagcccgagcacatcgactccttcacccacgaggcatgccccgtccgcgccctcttagccagttgggcgactcaggatagtgccactctagatgctctgctggcagccctgcgccgtatacagagggctgatttggtggagagcctgtgttcagagagcacagctacatcaccagtgtag

SEQ ID NO: 129329 - DNA, 1002 bp, Artificial Sequence
  derived and/or modified sequence
atgagcgccccctgcgtggaggccgacgacgccgtgtgccggtgcgcctacgggtattaccaggacgagacgacaggaaggtgcgaagcctgtcgggtatgcgaagctggctccgggctggtatttagttgccaggacaaacaaaatacagtatgcgaggaatgtcccgatggtacatatagcgatgaggcaaatcacgtagatccgtgcctcccctgtacagtgtgcgaggataccgaacgccagttaagagaatgtacccgctgggcagacgcggagtgcgaagagattccagggcgctggatcactcgctctaccccccccgaagggtccgactcgaccgcacccagcacccaggaacctgaggcacctccggaacaggacttgatcgcgagtaccgtggccggcgtggttactaccgtaatggggtcctcacaaccagtggtaacccgtggcaccacagataatctaatcccagtgtactgttcgatcctggcggccgtagtggttgggctcgtcgcatacatcgctttcaaacggtggaattcttgtaaacaaaacaagcaaggagccaattcacgtcccgtcaatcagaccccccctccagagggagaaaaactgcactctgacagcggaattagcgtggattcccagagtttgcacgatcaacagcctcacacacagaccgcctctggccaggccctgaagggggatggcggattatattcatcccttcccccagctaaaagggaggaggtcgaaaaactgctgaatggtagcgcgggagatacctggagacacttggccggggaactcggataccagcccgagcacatcgattcattcactcacgaggcatgtcctgtccgggcccttctggcatcctgggccactcaagacagcgcgacactcgatgcactcctcgctgcactgcggaggatccagagagcagatctggttgaatctctttgctctgagagcactgcgactagcccagtgtag

SEQ ID NO: 129330 - DNA, 3417 bp, Artificial Sequence
  derived and/or modified sequence
agagcgagccgagccgcggccagctccggcgggcagggggggcgctggagcgcagcgcagcgcagccccatcagtccgcaaagcggaccgagctggaagtcgagcgctgccgcgggaggcgggcgatgggggcaggtgccaccggccgcgccatggacgggccgcgcctgctgctgttgctgcttctgggggtgtcccttggaggtgccaaggaggcatgccccacaggcctgtacacacacagcggtgagtgctgcaaagcctgcaacctgggcgagggtgtggcccagccttgtggagccaaccagaccgtgtgtgagccctgcctggacagcgtgacgttctccgacgtggtgagcgcgaccgagccgtgcaagccgtgcaccgagtgcgtggggctccagagcatgtcggcgccgtgcgtggaggccgacgacgccgtgtgccgctgcgcctacggctactaccaggatgagacgactgggcgctgcgaggcgtgccgcgtgtgcgaggcgggctcgggcctcgtgttctcctgccaggacaagcagaacaccgtgtgcgaggagtgccccgacggcacgtattccgacgaggccaaccacgtggacccgtgcctgccctgcaccgtgtgcgaggacaccgagcgccagctccgcgagtgcacacgctgggccgacgccgagtgcgaggagatccctggccgttggattacacggtccacacccccagagggctcggacagcacagcccccagcacccaggagcctgaggcacctccagaacaagacctcatagccagcacggtggcaggtgtggtgaccacagtgatgggcagctcccagcccgtggtgacccgaggcaccaccgacaacctcatccctgtctattgctccatcctggctgctgtggttgtgggccttgtggcctacatagccttcaagaggtggaacagctgcaagcagaacaagcaaggagccaacagccggccagtgaaccagacgcccccaccagagggagaaaaactccacagcgacagtggcatctccgtggacagccagagcctgcatgaccagcagccccacacgcagacagcctcgggccaggccctcaagggtgacggaggcctctacagcagcctgcccccagccaagcgggaggaggtggagaagcttctcaacggctctgcgggggacacctggcggcacctggcgggcgagctgggctaccagcccgagcacatagactcctttacccatgaggcctgccccgttcgcgccctgcttgcaagctgggccacccaggacagcgccacactggacgccctcctggccgccctgcgccgcatccagcgagccgacctcgtggagagtctgtgcagtgagtccactgccacatccccggtgtgagcccaaccggggagcccccgccccgccccacattccgacaaccgatgctccagccaacccctgtggagcccgcacccccaccctttggggggggcccgcctggcagaactgagctcctctgggcaggacctcagagtccaggccccaaaaccacagccctgtcagtgcagcccgtgtggccccttcacttctgaccacacttcctgtccagagagagaagtgcccctgctgcctccccaaccctgcccctgccccgtcaccatctcaggccacctgcccccttctcccacactgctaggtgggccagcccctcccaccacagcaggtgtcatatatggggggccaacaccagggatggtactagggggaagtgacaaggccccagagactcagagggaggaatcgaggaaccagagccatggactctacactgtgaacttggggaacaagggtggcatcccagtggcctcaaccctccctcagcccctcttgccccccaccccagcctaagatgaagaggatcggaggcttgtcagagctgggaggggttttcgaagctcagcccacccccctcattttggatataggtcagtgaggcccagggagaggccatgattcgcccaaagccagacagcaacggggaggccaagtgcaggctggcaccgccttctctaaatgaggggcctcaggtttgcctgagggcgaggggagggtggcaggtgaccttctgggaaatggcttgaagccaagtcagctttgccttccacgctgtctccagacccccaccccttccccactgcctgcccacccgtggagatgggatgcttgcctagggcctggtccatgatggagtcaggtttggggttcgtggaaagggtgctgcttccctctgcctgtccctctcaggcatgcctgtgtgacatcagtggcatggctccagtctgctgccctccatcccgacatggacccggagctaacactggcccctagaatcagcctaggggtcagggaccaaggacccctcaccttgcaacacacagacacacgcacacacacacacaggaggagaaatctcacttttctccatgagttttttctcttgggctgagactggatactgcccggggcagctgccagagaagcatcggagggaattgaggtctgctcggccgtcttcactcgcccccgggtttggcgggccaaggactgccgaccgaggctggagctggcgtctgtcttcaagggcttacacgtggaggaatgctcccccatcctccccttccctgcaaacatggggttggctgggcccagaaggttgtgatgaagaaaagtgggccagtgtgggaatgcggcaagaaggaattgacttcgactgtgacctgtggggatttctcccagctctagacaaccctgcaaaggactgttttttcctgagcttggccagaagggggccatgaggcctcagtggactttccaccccctccctggcctgttctgttttgcctgaagttggagtgagtgtggctcccctctatttagcatgacaagccccaggcaggctgtgcgctgacaaccaccgctccccagcccagggttcccccagccctgtggaagggactaggagcactgtagtaaatggcaattctttgacctcaacctgtgatgaggggaggaaactcacctgctggcccctcacctgggcacctggggagtgggacagagtctgggtgtatttattttcctccccagcaggtggggagggggtttgggggcttgcaagtatgttttagcatgtgtttggttctggggcccctttttactccccttgagctgagatggaacccttttggcccccgagctgggggccatgagctccagacccccagcaaccctcctatcacctcccctccttgcctcctgtgtaatcatttcttgggccctcctgaaacttacacacaaaacgttaagtgatgaacattaaatagcaaagaaagaaaaatagtacaaa

SEQ ID NO: 129331 - DNA, 1840 bp, Artificial Sequence
  derived and/or modified sequence
gtagaccaggagagcggggaggagggaccggatcccagaggggcaacgacttgggctccgggtctgggcaagagcgagggtccccgcgcgaagacccaaggaaggaggggagctgggcgtggaggacctgggcgcttgggaaggtgtaccccgacaggaacctgccgtctgcagcccctgcggctcccgcctccgcctcggcgcgcggctgctcggtctgggatggctgtgcgcggtccgagtttcttcctgggccgcggtgtcccttggaggtgccaaggaggcatgccccacaggcctgtacacacacagcggtgagtgctgcaaagcctgcaacctgggcgagggtgtggcccagccttgtggagccaaccagaccgtgtgtgagccctgcctggacagcgtgacgttctccgacgtggtgagcgcgaccgagccgtgcaagccgtgcaccgagtgcgtggggctccagagcatgtcggcgccgtgcgtggaggccgacgacgccgtgtgccgctgcgcctacggctactaccaggatgagacgactgggcgctgcgaggcgtgccgcgtgtgcgaggcgggctcgggcctcgtgttctcctgccaggacaagcagaacaccgtgtgcgaggagtgccccgacggcacgtattccgacgaggccaaccacgtggacccgtgcctgccctgcaccgtgtgcgaggacaccgagcgccagctccgcgagtgcacacgctgggccgacgccgagtgcgaggagatccctggccgttggattacacggtccacacccccagagggctcggacagcacagcccccagcacccaggagcctgaggcacctccagaacaagacctcatagccagcacggtggcaggtgtggtgaccacagtgatgggcagctcccagcccgtggtgacccgaggcaccaccgacaacctcatccctgtctattgctccatcctggctgctgtggttgtgggccttgtggcctacatagccttcaagaggtggaacagctgcaagcagaacaagcaaggagccaacagccggccagtgaaccagacgcccccaccagagggagaaaaactccacagcgacagtggcatctccgtggacagccagagcctgcatgaccagcagccccacacgcagacagcctcgggccaggccctcaagggtgacggaggcctctacagcagcctgcccccagccaagcgggaggaggtggagaagcttctcaacggctctgcgggggacacctggcggcacctggcgggcgagctgggctaccagcccgagcacatagactcctttacccatgaggcctgccccgttcgcgccctgcttgcaagctgggccacccaggacagcgccacactggacgccctcctggccgccctgcgccgcatccagcgagccgacctcgtggagagtctgtgcagtgagtccactgccacatccccggtgtgagcccaaccggggagcccccgccccgccccacattccgacaaccgatgctccagccaacccctgtggagcccgcacccccaccctttggggggggcccgcctggcagaactgagctcctctgggcaggacctcagagtccaggccccaaaaccacagccctgtcagtgcagcccgtgtggccccttcacttctgaccacacttcctgtccagagagagaagtgcccctgctgcctccccaaccctgcccctgccccgtcaccatctcaggccacctgcccccttctcccacactgctaggtgggccagcccctcccaccacagcaggtgtcatatatggggggccaacaccagggatggtacta

SEQ ID NO: 129332 - DNA, 1284 bp, Artificial Sequence
  derived and/or modified sequence
atgggcgctggagctacagggagggcgatggacggacctaggctactgctgttgctcctgctcggcgtgtccttgggaggggcaaaggaggcatgccccactggcctctacacccattccggggagtgctgcaaggcctgcaacttaggtgagggcgtggcccagccctgcggtgctaaccagacagtctgtgagccttgcctggatagcgtaactttcagtgatgtggtaagtgccacagagccatgtaaaccctgcaccgagtgtgtggggctccagagcatgagtgctccctgcgtggaagctgacgatgccgtctgcaggtgcgcctacggctattatcaggacgaaacaactggaaggtgtgaggcttgtcgcgtatgtgaagctgggtccggattagtattttcctgccaggacaagcagaacacagtatgtgaagagtgtccggacggaacatactcagatgaggctaaccacgttgatccatgcctgccatgtaccgtctgtgaagacaccgaaagacaactgcgcgaatgcaccagatgggcagacgctgagtgcgaagagattcccggacgttggataacccgttcaactccccctgaagggagcgattcgacagccccttcaactcaggagccagaggcgccaccagagcaagatcttattgcgagcaccgtggccggtgtggtcacgaccgtgatgggaagcagtcaacccgtcgtgactagaggtactacagacaacctaatcccagtgtactgctccatcctcgcagcggtcgtggtgggactcgtggcttatatcgccttcaaaaggtggaattcatgcaaacaaaacaaacaaggggctaacagtaggccagttaatcagacacctcccccagaaggcgaaaaactgcacagtgattcagggattagtgtggactcacaaagcctgcacgaccagcagccgcatacacagaccgcatctggccaagccttgaaaggtgacggtggcctttatagctcactgcccccagccaaacgggaagaggtggagaagttgttaaacggttccgcgggagatacatggcgtcacctcgcaggagaactgggttaccaaccagaacacatagatagcttcacacatgaagcatgtccagtgagggctctgcttgcgtcttgggcaacccaggacagtgcaactcttgatgccctcttggctgcactaaggaggatccagcgagccgatctcgtggagtctttatgctccgaatcaacagcgacctcccccgtttag

SEQ ID NO: 129333 - DNA, 1002 bp, Artificial Sequence
  derived and/or modified sequence
atgtcagctccctgcgtagaggctgacgatgccgtgtgccgatgcgcttacggatattatcaggatgaaacaactggtcggtgtgaagcctgtcgggtgtgtgaggcgggatcaggactggtcttttcttgtcaggataagcaaaacaccgtgtgcgaggaatgtcccgatgggacgtattcagatgaggctaatcatgtagacccctgcttaccatgcaccgtgtgcgaggacaccgagagacagcttcgggagtgtaccagatgggctgacgccgagtgtgaggaaattcctgggaggtggattaccagatctacacccccagagggatcagactcaaccgctccttcgacccaggagccagaggccccacccgaacaagatctcattgcatcaacagtggccggagtggtcactactgtgatgggcagctcccaacctgtcgttacacgaggcaccactgataacctcattccagtgtattgctccattctggcagctgtagtagttgggttggtggcttatatcgcatttaagagatggaactcatgtaaacaaaacaagcaaggggctaatagcagaccagtaaaccagacccctccgccagagggcgaaaagttacattctgacagtggtatttctgttgatagtcagagcttacatgaccaacagcctcatactcagacagcctcaggccaagctctgaaaggcgacggcggactctatagcagcctgcctccagctaagcgcgaagaggtggagaagctgctgaatggctccgccggtgacacctggaggcacctcgccggagagctggggtatcagcccgagcacattgatagtttcacccatgaagcttgccccgtgagagcactgttggccagttgggccacacaagattcagccacccttgatgcactgctggctgcactgaggaggatccagcgggcagatctggtggagtccttgtgtagtgagagcactgcaacgtcccctgtctag

SEQ ID NO: 129334 - DNA, 1284 bp, Artificial Sequence
  derived and/or modified sequence
atgggcgccggcgccaccggcagagccatggacggccccagactgctgctgctgctgctgctgggcgtgagcctgggcggcgccaaggaggcctgccccaccggcctgtacacccacagcggcgagtgctgcaaggcctgcaacctgggcgagggcgtggcccagccctgcggcgccaaccagaccgtgtgcgagccctgcctggacagcgtgaccttcagcgacgtggtgagcgccaccgagccctgcaagccctgcaccgagtgcgtgggcctgcagagcatgagcgccccctgcgtggaggccgacgacgccgtgtgcagatgcgcctacggctactaccaggacgagaccaccggcagatgcgaggcctgcagagtgtgcgaggccggcagcggcctggtgttcagctgccaggacaagcagaacaccgtgtgcgaggagtgccccgacggcacctacagcgacgaggccaaccacgtggacccctgcctgccctgcaccgtgtgcgaggacaccgagagacagctgagagagtgcaccagatgggccgacgccgagtgcgaggagatccccggcagatggatcaccagaagcaccccccccgagggcagcgacagcaccgcccccagcacccaggagcccgaggccccccccgagcaggacctgatcgccagcaccgtggccggcgtggtgaccaccgtgatgggcagcagccagcccgtggtgaccagaggcaccaccgacaacctgatccccgtgtactgcagcatcctggccgccgtggtggtgggcctggtggcctacatcgccttcaagagatggaacagctgcaagcagaacaagcagggcgccaacagcagacccgtgaaccagacccccccccccgagggcgagaagctgcacagcgacagcggcatcagcgtggacagccagagcctgcacgaccagcagccccacacccagaccgccagcggccaggccctgaagggcgacggcggcctgtacagcagcctgccccccgccaagagagaggaggtggagaagctgctgaacggcagcgccggcgacacctggagacacctggccggcgagctgggctaccagcccgagcacatcgacagcttcacccacgaggcctgccccgtgagagccctgctggccagctgggccacccaggacagcgccaccctggacgccctgctggccgccctgagaagaatccagagagccgacctggtggagagcctgtgcagcgagagcaccgccaccagccccgtgtag

SEQ ID NO: 129335 - DNA, 1002 bp, Artificial Sequence
  derived and/or modified sequence
atgagcgccccctgcgtggaggccgacgacgccgtgtgcagatgcgcctacggctactaccaggacgagaccaccggcagatgcgaggcctgcagagtgtgcgaggccggcagcggcctggtgttcagctgccaggacaagcagaacaccgtgtgcgaggagtgccccgacggcacctacagcgacgaggccaaccacgtggacccctgcctgccctgcaccgtgtgcgaggacaccgagagacagctgagagagtgcaccagatgggccgacgccgagtgcgaggagatccccggcagatggatcaccagaagcaccccccccgagggcagcgacagcaccgcccccagcacccaggagcccgaggccccccccgagcaggacctgatcgccagcaccgtggccggcgtggtgaccaccgtgatgggcagcagccagcccgtggtgaccagaggcaccaccgacaacctgatccccgtgtactgcagcatcctggccgccgtggtggtgggcctggtggcctacatcgccttcaagagatggaacagctgcaagcagaacaagcagggcgccaacagcagacccgtgaaccagacccccccccccgagggcgagaagctgcacagcgacagcggcatcagcgtggacagccagagcctgcacgaccagcagccccacacccagaccgccagcggccaggccctgaagggcgacggcggcctgtacagcagcctgccccccgccaagagagaggaggtggagaagctgctgaacggcagcgccggcgacacctggagacacctggccggcgagctgggctaccagcccgagcacatcgacagcttcacccacgaggcctgccccgtgagagccctgctggccagctgggccacccaggacagcgccaccctggacgccctgctggccgccctgagaagaatccagagagccgacctggtggagagcctgtgcagcgagagcaccgccaccagccccgtgtag

SEQ ID NO: 129336 - DNA, 825 bp, Artificial Sequence
  derived and/or modified sequence
atgggggcaggtgccaccggccgcgccatggacgggccgcgcctgctgctgttgctgcttctgggggtgtcccttggaggtgccaaggaggcatgccccacaggcctgtacacacacagcggtgagtgctgcaaagcctgcaacctgggcgagggtgtggcccagccttgtggagccaaccagaccgtgtgtgagccctgcctggacagcgtgacgttctccgacgtggtgagcgcgaccgagccgtgcaagccgtgcaccgagtgcgtggggctccagagcatgtcggcgccgtgcgtggaggccgacgacgccgtgtgccgctgcgcctacggctactaccaggatgagacgactgggcgctgcgaggcgtgccgcgtgtgcgaggcgggctcgggcctcgtgttctcctgccaggacaagcagaacaccgtgtgcgaggagtgccccgacggcacgtattccgacgaggccaaccacgtggacccgtgcctgccctgcaccgtgtgcgaggacaccgagcgccagctccgcgagtgcacacgctgggccgacgccgagtgcgaggagatccctggccgttggattacacggtccacacccccagagggctcggacagcacagcccccagcacccaggagcctgaggcacctccagaacaagacctcatagccagcacggtggcaggtgtggtgaccacagtgatgggcagctcccagcccgtggtgacccgaggcaccaccgacaacctcatccctgtctattgctccatcctggctgctgtggttgtgggtcttgtggcctacatagccttcaagaggtga

SEQ ID NO: 129337 - DNA, 1016 bp, Artificial Sequence
  derived and/or modified sequence
aagcttttggaccctcgtacagaagctaatacgactcactatagggaaataagagagaaaagaagagtaagaagaaatataagagccaccatgggggcaggtgccaccggccgcgccatggacgggccgcgcctgctgctgttgctgcttctgggggtgtcccttggaggtgccaaggaggcatgccccacaggcctgtacacacacagcggtgagtgctgcaaagcctgcaacctgggcgagggtgtggcccagccttgtggagccaaccagaccgtgtgtgagccctgcctggacagcgtgacgttctccgacgtggtgagcgcgaccgagccgtgcaagccgtgcaccgagtgcgtggggctccagagcatgtcggcgccgtgcgtggaggccgacgacgccgtgtgccgctgcgcctacggctactaccaggatgagacgactgggcgctgcgaggcgtgccgcgtgtgcgaggcgggctcgggcctcgtgttctcctgccaggacaagcagaacaccgtgtgcgaggagtgccccgacggcacgtattccgacgaggccaaccacgtggacccgtgcctgccctgcaccgtgtgcgaggacaccgagcgccagctccgcgagtgcacacgctgggccgacgccgagtgcgaggagatccctggccgttggattacacggtccacacccccagagggctcggacagcacagcccccagcacccaggagcctgaggcacctccagaacaagacctcatagccagcacggtggcaggtgtggtgaccacagtgatgggcagctcccagcccgtggtgacccgaggcaccaccgacaacctcatccctgtctattgctccatcctggctgctgtggttgtgggtcttgtggcctacatagccttcaagaggtgagctgccttctgcggggcttgccttctggccatgcccttcttctctcccttgcacctgtacctcttggtctttgaataaagcctgagtaggaaggcggccgc

SEQ ID NO: 129338 - protein, 1247 aa, Artificial Sequence
  derived and/or modified sequence
MLASSSRIRAAWTRALLLPLLLAGPVGCLSRQELFPFGPGQGDLELEDGDDFVSPALELSGALRFYDRSDIDAVYVTTNGIIATSEPPAKESHPGLFPPTFGAVAPFLADLDTTDGLGKVYYREDLSPSITQRAAECVHRGFPEISFQPSSAVVVTWESVAPYQGPSRDPDQKGKRNTFQAVLASSDSSSYAIFLYPEDGLQFHTTFSKKENNQVPAVVAFSQGSVGFLWKSNGAYNIFANDRESVENLAKSSNSGQQGVWVFEIGSPATTNGVVPADVILGTEDGAEYDDEDEDYDLATTRLGLEDVGTTPFSYKALRRGGADTYSVPSVLSPRRAATERPLGPPTERTRSFQLAVETFHQQHPQVIDVDEVEETGVVFSYNTDSRQTCANNRHQCSVHAECRDYATGFCCSCVAGYTGNGRQCVAEGSPQRVNGKVKGRIFVGSSQVPIVFENTDLHSYVVMNHGRSYTAISTIPETVGYSLLPLAPVGGIIGWMFAVEQDGFKNGFSITGGEFTRQAEVTFVGHPGNLVIKQRFSGIDEHGHLTIDTELEGRVPQIPFGSSVHIEPYTELYHYSTSVITSSSTREYTVTEPERDGASPSRIYTYQWRQTITFQECVHDDSRPALPSTQQLSVDSVFVLYNQEEKILRYALSNSIGPVREGSPDALQNPCYIGTHGCDTNAACRPGPRTQFTCECSIGFRGDGRTCYDIDECSEQPSVCGSHTICNNHPGTFRCECVEGYQFSDEGTCVAVVDQRPINYCETGLHNCDIPQRAQCIYTGGSSYTCSCLPGFSGDGQACQDVDECQPSRCHPDAFCYNTPGSFTCQCKPGYQGDGFRCVPGEVEKTRCQHEREHILGAAGATDPQRPIPPGLFVPECDAHGHYAPTQCHGSTGYCWCVDRDGREVEGTRTRPGMTPPCLSTVAPPIHQGPAVPTAVIPLPPGTHLLFAQTGKIERLPLEGNTMRKTEAKAFLHVPAKVIIGLAFDCVDKMVYWTDITEPSIGRASLHGGEPTTIIRQDLGSPEGIAVDHLGRNIFWTDSNLDRIEVAKLDGTQRRVLFETDLVNPRGIVTDSVRGNLYWTDWNRDNPKIETSYMDGTNRRILVQDDLGLPNGLTFDAFSSQLCWVDAGTNRAECLNPSQPSRRKALEGLQYPFAVTSYGKNLYFTDWKMNSVVALDLAISKETDAFQPHKQTRLYGITTALSQCPQGHNYCSVNNGGCTHLCLATPGSRTCRCPDNTLGVDCIEQK

SEQ ID NO: 129339 - DNA, 3744 bp, Artificial Sequence
  derived and/or modified sequence
atgttggctagtagcagcagaattagagccgcttggacacgagcactgctcttgccattgctcttggctgggcctgtcggatgtctgtctcgccaggagctgttcccttttggcccaggacaaggagaccttgagctggaagatggagatgatttcgtgtctcccgctctcgaactatcaggagctctccgcttttacgacaggagtgacattgacgcggtctacgtgacaaccaacggtattatagccaccagtgagcctccggctaaggagtcgcatccagggctcttcccccctacgtttggcgctgtcgccccttttctggccgatctggataccacggacggcttgggtaaggtgtattatcgggaggaccttagtcctagtattacacagcgcgcagcagagtgcgttcatcgtggcttcccagagatctcctttcaaccttcgagtgccgttgtggtcacctgggaaagcgttgctccataccagggacccagccgggatcctgatcagaagggcaagcggaacacctttcaggcagtgctggcctcctctgactcaagctcatacgcaatctttttgtaccctgaggatgggttgcagttccacactaccttctctaaaaaagagaataatcaggttccagctgttgtcgcttttagtcagggcagtgtggggttcctgtggaaaagcaacggggcttacaacatattcgccaacgatagggagtccgttgaaaacctggcaaaatccagcaacagtgggcagcaaggcgtgtgggtgtttgaaatcggcagtcctgccaccaccaacggcgtggtccccgctgatgtgatattaggcactgaagacggcgctgagtacgacgatgaggatgaagattacgacttggcaacaacccgtttagggttagaagatgtaggtaccacgcccttttcttataaggccctgcggcgaggcggagccgacacttacagcgtaccctcagtgctctctccaaggcgcgcagccacagagcgcccactgggccctccaaccgagcgcactagatcttttcaactggccgtcgaaacttttcaccagcagcacccccaagtgatcgacgtcgatgaggtcgaggagacaggtgttgtattttcctacaatactgattcaagacagacttgcgcgaacaatagacaccagtgcagtgttcatgcggagtgccgcgattacgcaaccgggttctgctgttcctgcgtagcgggttacacaggcaatggaagacagtgtgtcgccgaaggttctccccagcgcgtgaatggcaaagtgaaagggcgaatcttcgtggggtcaagccaagtgccgatagtatttgaaaacacagaccttcatagctacgtcgttatgaatcacggcagatcttacacggcgatctcaaccatcccggaaactgtggggtactccctactgcccctggcgcctgtgggaggcatcatcgggtggatgtttgccgtggagcaagatggcttcaagaacgggtttagcattacagggggtgagttcacccggcaggccgaagtcacttttgtaggccaccctgggaatctcgtgattaaacagcggttctctggcattgatgagcatggccatctcaccatagacactgagttggaaggccgagtacctcagattcctttcggaagctctgtccacatcgagccatatacggaactgtatcattactctacgagcgtgataacctctagctctacaagagagtatactgtgacagagcctgagagggacggagctagtcctagccgaatttacacatatcagtggcgacaaaccattactttccaggagtgcgtgcacgacgacagtaggccagcactgcccagcacacagcagctctctgttgactctgtgtttgtcctttataaccaggaagagaaaatattgagatatgcgctatccaactccattggccctgtgcgcgagggaagccctgacgcccttcagaatccctgctacatcgggacacacgggtgtgacacaaatgctgcttgcagaccaggcccaaggacacaattcacttgcgaatgttctatcggcttcagaggagatggcagaacctgctacgacattgacgaatgctccgagcagccatccgtgtgtgggagccataccatctgcaataaccaccctgggacctttcgctgtgaatgcgtggagggctaccagtttagcgatgagggtacatgcgttgctgtggtggatcagcgtcccatcaactactgtgaaacaggactgcataattgcgatatcccacagcgagcacagtgcatctatacaggaggatcatcatatacttgcagttgccttccaggattcagcggcgacgggcaagcctgccaggatgtggacgaatgtcagcccagccggtgtcaccctgatgcgttctgttacaatacccctggaagtttcacctgccaatgcaaaccaggctaccagggcgacggcttcagatgtgtgccaggggaagtggaaaaaactcgctgccagcatgagagggagcacatcctgggggctgccggtgcgaccgacccccagagacccatccccccagggctattcgttcccgagtgcgatgctcatggtcactacgcccctacacagtgtcacggcagcacggggtactgttggtgcgtggaccgagatggaagggaagtggagggtacaaggacacgacccggtatgacccctccatgcctatcaaccgtggccccacctatccaccagggacctgccgtccccaccgccgtgatcccactcccccctggaactcacttactcttcgcccagacaggcaagatcgagcgactgcccctcgagggcaatacgatgcgtaagacagaagccaaggcctttcttcatgtgcctgctaaggtgatcattgggctggcttttgattgtgtggacaaaatggtgtattggactgatataactgagccaagtatcggacgtgcaagtcttcacggcggtgaaccaacgaccatcatccgccaggatcttggcagtcccgagggcattgcggtggaccatctgggcagaaacatcttctggaccgatagcaacctcgacagaatcgaggtggctaaacttgatgggactcaaagaagggtcctgtttgaaaccgatttagttaaccccaggggtatcgtcacagactcagttaggggcaatttgtactggactgattggaatcgcgacaatcccaagatcgagacaagctacatggacgggacaaacaggcgaattctggtccaagacgacttgggccttcccaacgggctgacctttgatgcctttagttcccaactctgctgggtggacgcgggaacaaatcgggcagagtgcctgaacccttctcagccgtcccggaggaaggctctagaaggactccagtacccgttcgccgtgacaagttacgggaagaatttgtatttcaccgattggaagatgaactccgttgttgcgcttgatctggctatatcaaaggagaccgacgcctttcagccccataaacaaacccggctgtacgggatcactactgctctgagtcagtgcccacaagggcacaactactgttctgtgaacaatggtggatgcacccacctctgcttggctaccccaggaagccgaacctgccgctgtccagacaacactctcggtgtagattgcatcgaacagaaatag

SEQ ID NO: 129340 - DNA, 3744 bp, Artificial Sequence
  derived and/or modified sequence
atgttggctagctcatcaagaatccgggctgcatggacgagagcgctcctgttgcctctgcttctcgccggacccgtcggttgtctgtctcgacaggaactttttccattcggtcctggtcagggcgacttggagttggaagacggtgatgactttgtgagccccgcactggagctgtcaggcgccctgcggttttacgatcgcagcgatattgacgccgtgtacgtgaccacaaacggaattatagctacctccgagccgccagcaaaagagtctcacccaggcctattcccccctacattcggtgctgtagctccttttctggcggatttggatacaaccgacgggcttggcaaggtgtattaccgtgaagacttgagtccatcaatcacccagagggcggcagagtgcgtacaccgggggtttccagaaatttcttttcagccctcttccgcagttgttgtcacatgggaatctgtggctccataccagggccccagtagggatcctgatcagaagggtaagagaaatacattccaggccgtccttgctagttcagacagctctagctacgccatatttttatatcctgaggatggcctgcagttccataccacgttcagtaagaaggagaataatcaggttccagcagtagtggccttctcacaaggctcagtggggttcctgtggaagtccaacggcgcgtacaacatcttcgccaatgacagggaatccgtcgaaaaccttgcgaagagcagcaacagcggccagcaaggggtatgggtgtttgagatagggtccccggctaccactaacggcgtggtgccagccgacgttatccttggaaccgaagacggcgctgaatacgatgatgaagacgaagactacgacctggccaccactcggctgggactcgaggacgtcggcacgacacctttcagttacaaagccctgagacgcggcggcgctgacacatactccgtgccctcagtactcagccccagaagagcagcaaccgagaggcctttgggccccccaactgagagaacccgaagttttcaacttgctgttgagaccttccatcagcagcatccacaggtgattgatgtggacgaggttgaggaaactggggtggtattctcctataacaccgactccagacaaacgtgcgccaataatcgccaccaatgctcagtgcacgcggagtgccgtgattatgctaccggtttttgttgttcctgcgtggcaggttatactggtaacgggcgccagtgcgtggcagaaggttcgccacagcgagtaaacggtaaagtcaagggccggatctttgtcgggtctagtcaggtacccatcgtatttgagaatacagatctccatagctacgtggtgatgaaccatggtcgctcatataccgctattagtactatccctgagactgtcggatatagtctgctgccactggcaccggtgggcggaatcataggatggatgtttgctgttgaacaggatggcttcaaaaacgggttttctatcaccggcggcgagtttacacggcaggctgaggtgacatttgtcggacatcccggaaatctggttatcaagcagagattttctggcatagatgaacatggacaccttactatagacacagagctagaaggcagagtgcctcagatcccctttggctcaagcgtgcatatcgaaccgtatactgaattgtatcattactcaacatctgtgatcacctcatccagcactcgggagtatacagtcacagagccagagcgcgacggggcaagcccatcaagaatttacacataccagtggcgacagaccataaccttccaggagtgcgtgcatgacgattctagacccgccttaccgtccacacagcagctgtccgttgattcagttttcgttttatacaaccaggaagagaaaatacttcggtacgccctatcaaattccatcggtccagtacgcgagggatctccggacgcccttcaaaatccatgttatattggtactcacggctgcgatacaaacgctgcctgtaggcctggtcccaggacacagtttacatgcgaatgttctataggcttccgcggagacgggcggacgtgttacgacatcgatgaatgctctgaacaacctagtgtctgcggctcccacacaatttgtaacaatcacccagggacctttcgttgtgaatgcgtggaaggatatcagttcagtgatgaaggcacctgtgttgcggtggtggatcagagacccattaactactgcgaaaccggtctccataactgtgacattccacagcgcgcacagtgcatctacaccggtggttcaagctacacatgcagctgcctcccggggtttagcggtgacggccaggcatgccaggacgtggacgagtgtcagcctagccgttgccatccggatgcattctgctacaacacacctggctcctttacctgccagtgcaaaccaggctatcagggcgacggcttccggtgtgtacctggcgaagtcgagaaaacccggtgccagcacgaaagggaacatatcctgggagcggccggagcaaccgatccccagagaccaatccctcccggattgtttgttcctgagtgtgacgcacacggccactacgcacctactcaatgtcacggctctacagggtactgctggtgtgtcgaccgagatggtcgggaggtagaaggtacaaggacacgaccaggcatgacgcccccttgtctctcgactgtcgctccccctatccaccagggccccgctgtcccgacagccgtcattccgctcccgcctggcacccacctgctgttcgcccagacagggaagattgagaggttacctcttgaagggaacaccatgcgtaagactgaagccaaggcgtttctccatgtgccagcaaaggtaatcatcggactggcatttgattgcgtcgataagatggtttattggactgacataacagagcctagcataggcagagccagcttgcacggtggtgaacctaccacaattatccgccaggatcttggctctccggagggcattgctgttgaccacctgggtcgcaacatcttctggactgattctaacctagacaggattgaagtcgccaagcttgacggtacgcagcggagggtgctgttcgaaactgatcttgtgaatcctagggggattgtcacagacagtgtccgtggtaacctgtattggaccgattggaaccgcgacaatccaaaaattgaaacttcgtatatggacggtacaaacaggcgcatactagtccaggatgatctgggccttcctaatggattgacatttgacgccttttcatctcagctatgttgggtagacgccgggaccaatagagccgagtgcctgaatccatcgcagcctagccggagaaaggctctggaaggcctgcagtatccattcgccgttacttcttacggaaagaacctgtactttacagactggaagatgaatagtgtcgtggcccttgatctagctatttcaaaggaaacagatgcctttcagcctcataagcagacgcgtctatatggtatcactaccgcactctcacagtgtcctcaaggccacaactattgcagtgtgaacaatggaggctgtactcacttatgcctcgctactccgggctctagaacatgtcgctgtccagacaataccctcggtgtggattgcattgagcagaagtag

SEQ ID NO: 129341 - DNA, 3744 bp, Artificial Sequence
  derived and/or modified sequence
atgctcgcatccagctcacgaatcagagctgcatggacccgcgctctacttctgcccttactcctcgcaggccccgtgggctgcctctccagacaggagctgttcccctttggcccgggacaaggcgacctggagcttgaggatggtgacgactttgtcagcccagccttagaactctcaggcgctctgcgattttatgatcgctccgatatcgatgcagtatatgtgacaaccaacgggattatagctactagcgaaccacctgccaaagaatcacatccgggcctgttcccaccaacgttcggtgccgtagctccttttttagccgacctcgacactaccgacggcctgggtaaagtgtactacagggaagacttatcaccttccatcacccagagggccgctgagtgcgtacatagaggctttccagagatatctttccagccttcgagcgccgtggttgtgacctgggagagcgttgccccttatcaggggccatcccgagaccccgatcaaaaaggcaaacgcaacacattccaagccgtgctggcttcctctgatagctcctcttacgcgattttcctttatccggaggatgggctgcagttccacaccacatttagtaaaaaggagaacaatcaggtgcctgccgtggtggctttctcacagggtagcgtgggcttcttatggaaatcaaacggcgcatacaacatatttgccaacgatcgtgaatcagtcgagaacctggcgaagtcaagtaactcagggcaacagggcgtttgggtgttcgagatcggctcccccgctacaaccaatggagtggttcctgcagacgttatcctggggaccgaagatggcgccgagtacgacgatgaagacgaagattatgacctggccacgacaagattaggattggaggacgtaggtacaacaccgtttagctacaaggcactacgaaggggcggtgcggacacctactccgtcccaagtgttttgtcccccaggagggctgccactgagaggcctctgggtcccccaacagagcgtacaagaagttttcagctggcagtcgaaacattccaccaacaacatccgcaagtgatcgatgtagatgaggtcgaggaaactggcgtcgtattctcttacaacaccgactcaagacagacatgcgcgaacaaccgacatcagtgtagcgtccacgccgagtgtagggactatgccaccggcttttgttgttcttgtgtcgcagggtatacaggcaacggacggcaatgcgtagctgagggatctcctcagagggtaaacgggaaggtgaagggcagaatcttcgtcgggtctagtcaggttccaattgttttcgagaatacggatctccactcatatgttgtgatgaatcatggcaggagttacaccgcgatctccacgatcccagaaacagtcgggtattcactgttgcctttggccccagtggggggaataataggctggatgttcgctgtcgaacaggatggcttcaaaaacgggttttctatcaccggcggcgagtttacacggcaggctgaggtgacatttgtcggacatcccggaaatctggttatcaagcagagattttctggcatagatgaacatggacaccttactatagacacagagctagaaggcagagtgcctcagatcccctttggctcaagcgtgcatatcgaaccgtatactgaattgtatcattactcaacatctgtgatcacctcatccagcactcgggagtatacagtcacagagccagagcgcgacggggcaagcccatcaagaatttacacataccagtggcgacagaccataaccttccaggagtgcgtgcatgacgattctagacccgccttaccgtccacacagcagctgtccgttgattcagttttcgttttatacaaccaggaagagaaaatacttcggtacgccctatcaaattccatcggtccagtacgcgagggatctccggacgcccttcaaaatccatgttatattggtactcacggctgcgatacaaacgctgcctgtaggcctggtcccaggacacagtttacatgcgaatgttctataggctttcgaggggatggtcgcacatgttatgatatcgacgagtgctccgaacaaccgagtgtgtgtggatcccatactatctgcaataaccatccaggcacttttcggtgtgagtgtgtagaaggatatcaattttctgatgaaggtacctgcgttgccgtggtggatcagcgccccattaactattgcgaaactggcttacataactgtgatatcccccaaagagctcagtgcatctataccggaggaagctcttacacttgcagctgcttacccgggttttccggcgacggccaggcctgtcaagatgtggacgagtgtcagccttccagatgtcatccagacgcattttgctataacactcctgggtctttcacatgtcagtgtaaaccaggttaccagggagacgggtttcgctgcgttcctggcgaagttgaaaaaacaagatgccaacacgaacgagaacatatcctgggggccgccggcgccaccgatcctcagagaccgataccccccgggctctttgtccctgaatgtgacgcccatggtcactacgctcccacccaatgccacggctcgaccgggtactgctggtgtgtggaccgcgacgggagagaggttgagggaacgcgaacccgacccggaatgacccctccctgcctatccactgtagcaccacctatacatcaagggcccgctgtacccaccgccgttatcccactgccccccggaacacacttgctttttgcccagacagggaagattgaacgactccccctcgagggaaatactatgagaaagaccgaggccaaggcctttctacacgtccccgccaaggtcataatcggtctggccttcgattgtgtagacaaaatggtctactggacagacatcacagaaccaagtattggtagagccagtctacatgggggagagcctacaaccattatacgacaagatctggggagtcctgaaggcatcgctgtagaccacctcggaaggaacatcttttggacagacagtaacctggatagaatcgaagtcgctaagctggacggtacccaacgccgtgtgctgttcgagacagacctggtcaatcctagaggtattgttaccgactccgtcagaggcaacctgtactggactgactggaaccgagataatccaaaaatcgaaacatcctacatggacggaacgaatagaaggatccttgtacaagatgatcttggcttgcctaacggacttacttttgacgccttctcttcacagttgtgttgggtcgatgcaggaaccaaccgtgctgaatgcttaaaccctagccagccatcccggagaaaagcgcttgagggcctgcagtatccattcgctgtcacctcatatgggaagaatctgtacttcactgattggaagatgaactccgtggtcgctctggatctcgccatatctaaagaaacagacgccttccagcctcacaaacagacccgactatacggtatcactacagcattgtctcaatgtccccaggggcacaattattgcagcgtgaacaacgggggatgcacccatctttgccttgccactccaggatctcggacgtgcagatgcccagataacacactcggtgtggactgtatagaacaaaagtag

SEQ ID NO: 129342 - DNA, 5864 bp, Artificial Sequence
  derived and/or modified sequence
ggctgccaggggcgtccggttacatccccgccttcctctgtcctggccgcgggaccgggtttgcgggaccgcagttcgggaacatgttggcctcgagcagccggatccgggctgcgtggacgcgggcgctgctgctgccgctgctgctggcggggcctgtgggctgcctgagccgccaggagctctttcccttcggccccggacagggggacctggagctggaggacggggatgacttcgtctctcctgccctggagctgagtggggcgctccgcttctacgacagatccgacatcgacgcagtctacgtcaccacaaatggcatcattgctacgagtgaacccccggccaaagaatcccatcccgggctcttcccaccaacattcggtgcagtcgcccctttcctggcggacttggacacgaccgatggcctggggaaggtttattatcgagaagacttatccccctccatcactcagcgagcagcagagtgtgtccacagagggttcccggagatctctttccagcctagtagcgcggtggttgtcacttgggaatccgtggccccctaccaagggcccagcagggacccagaccagaaaggcaagagaaacacgttccaggctgttctagcctcctctgattccagctcctatgccattttcctttatcctgaggatggtctgcagttccatacgacattctcaaagaaggaaaacaaccaagttcctgccgtggttgcattcagtcaaggttcagtgggattcttatggaagagcaacggagcttataacatatttgctaatgacagggaatcagttgaaaatttggccaagagtagtaactctgggcagcagggtgtctgggtgtttgagattgggagtccagccaccaccaatggcgtggtgcctgcagacgtgatcctcggaactgaagatggggcagagtatgatgatgaggatgaagattatgacctggcgaccactcgtctgggcctggaggatgtgggcaccacgcccttctcctacaaggctctgagaaggggaggtgctgacacatacagtgtgcccagcgtcctctccccgcgccgggcagctaccgaaaggccccttggacctcccacagagagaaccaggtctttccagttggcagtggagacttttcaccagcagcaccctcaggtcatagatgtggatgaagttgaggaaacaggagttgttttcagctataacacggattcccgccagacgtgtgctaacaacagacaccagtgctcggtgcacgcagagtgcagggactacgccacgggcttctgctgcagctgtgtcgctggctatacgggcaatggcaggcaatgtgttgcagaaggttccccccagcgagtcaatggcaaggtgaaaggaaggatctttgtggggagcagccaggtccccattgtctttgagaacactgacctccactcttacgtagtaatgaaccacgggcgctcctacacagccatcagcaccattcccgagaccgttggatattctctgcttccactggccccagttggaggcatcattggatggatgtttgcagtggagcaggacggattcaagaatgggttcagcatcaccgggggtgagttcactcgccaggctgaggtgaccttcgtggggcacccgggcaatctggtcattaagcagcggttcagcggcatcgatgagcatgggcacctgaccatcgacacggagctggagggccgcgtgccgcagattccgttcggctcctccgtgcacattgagccctacacggagctgtaccactactccacctcagtgatcacttcctcctccacccgggagtacacggtgactgagcccgagcgagatggggcatctccttcacgcatctacacttaccagtggcgccagaccatcaccttccaggaatgcgtccacgatgactcccggccagccctgcccagcacccagcagctctcggtggacagcgtgttcgtcctgtacaaccaggaggagaagatcttgcgctatgctctcagcaactccattgggcctgtgagggaaggctcccctgatgctcttcagaatccctgctacatcggcactcatgggtgtgacaccaacgcggcctgtcgccctggtcccaggacacagttcacctgcgagtgctccatcggcttccgaggagacgggcgaacctgctatgatattgatgaatgttcagaacaaccctcagtgtgtgggagccacacaatctgcaataatcacccaggaaccttccgctgcgagtgtgtggagggctaccagttttcagatgagggaacgtgtgtggctgtcgtggaccagcgccccatcaactactgtgaaactggccttcataactgcgacataccccagcgggcccagtgtatctacacaggaggctcctcctacacctgttcctgcttgccaggcttttctggggatggccaagcctgccaagatgtagatgaatgccagccaagccgatgtcaccctgacgccttctgctacaacactccaggctctttcacgtgccagtgcaaacctggttatcagggagacggcttccgttgcgtgcccggagaggtggagaaaacccggtgccagcacgagcgagaacacattctcggggcagcgggggcgacagacccacagcgacccattcctccggggctgttcgttcctgagtgcgatgcgcacgggcactacgcgcccacccagtgccacggcagcaccggctactgctggtgcgtggatcgcgacggccgcgaggtggagggcaccaggaccaggcccgggatgacgcccccgtgtctgagtacagtggctcccccgattcaccaaggacctgcggtgcctaccgccgtgatccccttgcctcctgggacccatttactctttgcccagactgggaagattgagcgcctgcccctggagggaaataccatgaggaagacagaagcaaaggcgttccttcatgtcccggctaaagtcatcattggactggcctttgactgcgtggacaagatggtttactggacggacatcactgagccttccattgggagagctagtctacatggtggagagccaaccaccatcattagacaagatcttggaagtccagaaggtatcgctgttgatcaccttggccgcaacatcttctggacagactctaacctggatcgaatagaagtggcgaagctggacggcacgcagcgccgggtgctctttgagactgacttggtgaatcccagaggcattgtaacggattccgtgagagggaacctttactggacagactggaacagagataaccccaagattgaaacttcctacatggacggcacgaaccggaggatccttgtgcaggatgacctgggcttgcccaatggactgaccttcgatgcgttctcatctcagctctgctgggtggatgcaggcaccaatcgggcggaatgcctgaaccccagtcagcccagcagacgcaaggctctcgaagggctccagtatccttttgctgtgacgagctacgggaagaatctgtatttcacagactggaagatgaattccgtggttgctctcgatcttgcaatttccaaggagacggatgctttccaaccccacaagcagacccggctgtatggcatcaccacggccctgtctcagtgtccgcaaggccataactactgctcagtgaacaatggcggctgcacccacctatgcttggccaccccagggagcaggacctgccgttgccctgacaacaccttgggagttgactgtatcgaacagaaatgaagacaagagtgccttatttcctttccaagtatttcacagcaacactctacttgaagcaacttggtccagattgaaaagtgtcctctggctgagtggccactaggcccagacccagcccagcctgagccccaacaacttttccctcactgttccccaaaacatgcaccctggacttctctaatagaaaagtctccacccctacacaaggacagaaccctccacccctacccccaaccctcagacagacttatacacccctgagtgaggattacatgcccatcccagtgtcctaggaccttttcccaatactagccccccagtggtgaacagaacctcccaaatttgagttgcacccttccctgtggccttatgagctcagcctcgctttgaggtacccaccgtcctgtcagctccttgacctatgagccggggcctgactaggaaaagttgggagttaaggaggaaattagcattccttaatgttttgttttggtgctctgaatttcttctttattatagtcctatagttttactcctcagttcctcaccatcatcatcttgtctaagacccccattataatattcatgcgctgctttttcatcaaaacctaccctgtcctagagatctatgggcatttggtggatgataatgagcagcccctcccagatagaatgtcaatatttgagcagtaggatattggcatttgttagttaaaggcttaaatcaaaagaatgtccaatggtaggaatttcaaggtgtaggtcagatatttgagaataggggatttttttgatgtgccttaaattataccaaagattactaattattcctctttgcccaaaatacttgcatccaaggttctagtctctgttgctgtgctggtctttagccccactgcttgcactgatgtccctccttttcacggagacctatctgaggtacaggatggggctggcaccagatgatgtcccaccacagtccctcacctccggcctccacatgacagaaccaatttacactcaaccatgacctcacccctccttggtttctccctcgatctgtggccctttttggatgtattcttatctaacaacacaatccggaaagactgaattgaatatttatactaatggttcatatcctttattgctcaatgatctaattaaagggatcattgccacatttcatgtttatatttctacaatttgtttagaaaacatctcctgaccatatcagtagctcgtgttatctttttatcaactgcttcccagagtcctaaaacaatagaaattttggattgaaaagttcagcataaggagtttgagtcagtaaaggatgggataaaggagtcgagatgattcaatgaaaagtatcacaaaaaagagattgatcaacaagagaaataaaaaagcccaagaggaagtggtaggggaaggaatttaagaacagcaataagtaaaactcttaagtaactccaaaaagaaaatggtacattttgccaaagaccacttatacttgagaacatggaagaatttgcctgatactctctttggggaaaagagtctctcctcttttcctcaaaccccagtacactcagcctctctgccccaccttctcctgactttgtcctcacttgcttctgcagtacattggaacctgaattgaaagaaagtcttccttgaataattggagtttgtcttgagaggcaaatatagccccaagaatcacaagattcgaggaccatgtaggtcttttacgtagcccaaatccataaattagtctcactttttgtatttatcgtttcatattaaaccctctatatcaaatgttcatcatgattttgtatgatttttataactattttattcattttattagatttattctaaaattttttaatggtaaattcttaaactgtggaaaccactgaaggtgcttattaactgttctcccagatttgtacaagtattggatgattccttgagtttacagctgtacaaatagtgtggaaaataaactttttttaaaaaagaaaa

SEQ ID NO: 129343 - DNA, 3744 bp, Artificial Sequence
  derived and/or modified sequence
atgctggccagcagcagcagaatcagagccgcctggaccagagccctgctgctgcccctgctgctggccggccccgtgggctgcctgagcagacaggagctgttccccttcggccccggccagggcgacctggagctggaggacggcgacgacttcgtgagccccgccctggagctgagcggcgccctgagattctacgacagaagcgacatcgacgccgtgtacgtgaccaccaacggcatcatcgccaccagcgagccccccgccaaggagagccaccccggcctgttcccccccaccttcggcgccgtggcccccttcctggccgacctggacaccaccgacggcctgggcaaggtgtactacagagaggacctgagccccagcatcacccagagagccgccgagtgcgtgcacagaggcttccccgagatcagcttccagcccagcagcgccgtggtggtgacctgggagagcgtggccccctaccagggccccagcagagaccccgaccagaagggcaagagaaacaccttccaggccgtgctggccagcagcgacagcagcagctacgccatcttcctgtaccccgaggacggcctgcagttccacaccaccttcagcaagaaggagaacaaccaggtgcccgccgtggtggccttcagccagggcagcgtgggcttcctgtggaagagcaacggcgcctacaacatcttcgccaacgacagagagagcgtggagaacctggccaagagcagcaacagcggccagcagggcgtgtgggtgttcgagatcggcagccccgccaccaccaacggcgtggtgcccgccgacgtgatcctgggcaccgaggacggcgccgagtacgacgacgaggacgaggactacgacctggccaccaccagactgggcctggaggacgtgggcaccacccccttcagctacaaggccctgagaagaggcggcgccgacacctacagcgtgcccagcgtgctgagccccagaagagccgccaccgagagacccctgggcccccccaccgagagaaccagaagcttccagctggccgtggagaccttccaccagcagcacccccaggtgatcgacgtggacgaggtggaggagaccggcgtggtgttcagctacaacaccgacagcagacagacctgcgccaacaacagacaccagtgcagcgtgcacgccgagtgcagagactacgccaccggcttctgctgcagctgcgtggccggctacaccggcaacggcagacagtgcgtggccgagggcagcccccagagagtgaacggcaaggtgaagggcagaatcttcgtgggcagcagccaggtgcccatcgtgttcgagaacaccgacctgcacagctacgtggtgatgaaccacggcagaagctacaccgccatcagcaccatccccgagaccgtgggctacagcctgctgcccctggcccccgtgggcggcatcatcggctggatgttcgccgtggagcaggacggcttcaagaacggcttcagcatcaccggcggcgagttcaccagacaggccgaggtgaccttcgtgggccaccccggcaacctggtgatcaagcagagattcagcggcatcgacgagcacggccacctgaccatcgacaccgagctggagggcagagtgccccagatccccttcggcagcagcgtgcacatcgagccctacaccgagctgtaccactacagcaccagcgtgatcaccagcagcagcaccagagagtacaccgtgaccgagcccgagagagacggcgccagccccagcagaatctacacctaccagtggagacagaccatcaccttccaggagtgcgtgcacgacgacagcagacccgccctgcccagcacccagcagctgagcgtggacagcgtgttcgtgctgtacaaccaggaggagaagatcctgagatacgccctgagcaacagcatcggccccgtgagagagggcagccccgacgccctgcagaacccctgctacatcggcacccacggctgcgacaccaacgccgcctgcagacccggccccagaacccagttcacctgcgagtgcagcatcggcttcagaggcgacggcagaacctgctacgacatcgacgagtgcagcgagcagcccagcgtgtgcggcagccacaccatctgcaacaaccaccccggcaccttcagatgcgagtgcgtggagggctaccagttcagcgacgagggcacctgcgtggccgtggtggaccagagacccatcaactactgcgagaccggcctgcacaactgcgacatcccccagagagcccagtgcatctacaccggcggcagcagctacacctgcagctgcctgcccggcttcagcggcgacggccaggcctgccaggacgtggacgagtgccagcccagcagatgccaccccgacgccttctgctacaacacccccggcagcttcacctgccagtgcaagcccggctaccagggcgacggcttcagatgcgtgcccggcgaggtggagaagaccagatgccagcacgagagagagcacatcctgggcgccgccggcgccaccgacccccagagacccatcccccccggcctgttcgtgcccgagtgcgacgcccacggccactacgcccccacccagtgccacggcagcaccggctactgctggtgcgtggacagagacggcagagaggtggagggcaccagaaccagacccggcatgacccccccctgcctgagcaccgtggccccccccatccaccagggccccgccgtgcccaccgccgtgatccccctgccccccggcacccacctgctgttcgcccagaccggcaagatcgagagactgcccctggagggcaacaccatgagaaagaccgaggccaaggccttcctgcacgtgcccgccaaggtgatcatcggcctggccttcgactgcgtggacaagatggtgtactggaccgacatcaccgagcccagcatcggcagagccagcctgcacggcggcgagcccaccaccatcatcagacaggacctgggcagccccgagggcatcgccgtggaccacctgggcagaaacatcttctggaccgacagcaacctggacagaatcgaggtggccaagctggacggcacccagagaagagtgctgttcgagaccgacctggtgaaccccagaggcatcgtgaccgacagcgtgagaggcaacctgtactggaccgactggaacagagacaaccccaagatcgagaccagctacatggacggcaccaacagaagaatcctggtgcaggacgacctgggcctgcccaacggcctgaccttcgacgccttcagcagccagctgtgctgggtggacgccggcaccaacagagccgagtgcctgaaccccagccagcccagcagaagaaaggccctggagggcctgcagtaccccttcgccgtgaccagctacggcaagaacctgtacttcaccgactggaagatgaacagcgtggtggccctggacctggccatcagcaaggagaccgacgccttccagccccacaagcagaccagactgtacggcatcaccaccgccctgagccagtgcccccagggccacaactactgcagcgtgaacaacggcggctgcacccacctgtgcctggccacccccggcagcagaacctgcagatgccccgacaacaccctgggcgtggactgcatcgagcagaagtag

SEQ ID NO: 129344 - DNA, 3744 bp, Artificial Sequence
  derived and/or modified sequence
atgttggcctccagtagccgcattagggcagcttggacccgagctttattactgcccctgctgctcgccgggccagtgggctgcctgtcccgtcaggagttgtttccctttggcccagggcagggcgacctcgaactcgaggatggagatgactttgtctcacctgccttagagctcagcggtgccttgcgtttctatgaccggtcagatatcgacgctgtctacgtgacaaccaacggcattatcgccacaagcgaaccaccagcgaaggagtctcaccccggcctctttccccccacattcggtgcggttgccccttttctggcagatcttgatacaaccgatggactgggaaaggtttattacagagaggacctgtctccctccattactcagagagctgcggaatgcgttcacagaggattccctgaaatttcatttcaaccgtcaagtgcagtggtggttacatgggagtcagtggccccataccagggtccctcaagagaccctgaccaaaaagggaaacgcaatacattccaggctgtgcttgcatcatcagattctagctcctacgccatcttcctttatccagaagatggcctgcagtttcatacaaccttctctaaaaaggagaacaaccaagtgccggcggtggtcgcttttagtcagggcagcgtgggtttcttatggaagtctaacggggcgtacaacatctttgccaacgacagagaaagcgttgagaacctcgcaaagtcaagtaacagcggtcaacagggcgtctgggtcttcgagataggatccccggcaacaaccaatggcgtggtgcccgccgatgtgattctgggtacagaggatggggcagagtacgacgacgaggatgaggattacgacctggccaccaccagactgggcttggaggatgtagggactacaccattttcatataaagccctccggcggggtggtgccgatacatactctgttcctagcgtcctgtcaccgcgcagagcggcgacagagcgcccgcttgggccacctactgaacgcaccagatcctttcagctcgcggttgagacttttcaccagcagcaccctcaggtgattgacgtggacgaagtggaggaaactggggttgtatttagctataatactgactcccgccagacttgcgctaataaccgccatcagtgctccgtgcacgccgaatgccgtgattatgccaccggtttctgttgcagttgcgtcgccggctacaccggaaatggccgtcagtgcgtggccgaaggctccccgcaacgcgttaatggcaaggttaaagggcgcatctttgttggcagcagccaagtaccaatcgttttcgaaaacactgaccttcattcctatgttgtcatgaatcatggccgaagctatactgccatctctactatcccggagaccgtgggctatagcttactcccactagccccagtgggggggataattgggtggatgttcgctgtggaacaagacggattcaagaatggcttctctatcacgggaggcgagttcaccaggcaggctgaggtaacatttgtggggcatcccggaaacttggtgatcaagcagaggtttagcggcatagacgagcacgggcatctcacaatcgatactgaactggagggtcgcgtcccccagattccgttcgggagcagcgtgcatatcgagccatacactgaattataccactattctaccagcgtgatcacaagttctagcaccagggagtacacagtaactgagccagaaagggacggggcgtcacccagcagaatttatacctaccagtggagacagacaataacctttcaagagtgcgtacatgatgactcccgcccagccctgcctagcacacagcagctttctgttgactccgtgttcgtgctgtacaaccaagaggaaaagatacttcgatatgctctctctaattccattggacccgtccgcgagggatcccccgatgccctccagaacccctgttacatcggtacccacggatgtgatacaaacgctgcatgtaggcccggcccccgcacgcagttcacttgtgaatgcagcatcgggttcagaggtgacgggaggacttgttatgatatcgacgagtgcagcgagcagccctcagtgtgtggctcacataccatttgtaataaccatcctggtactttccgatgcgaatgcgtcgaaggttatcaattttctgacgagggaacctgcgttgcggtggttgatcagcgccctattaactattgcgagaccggcttacataattgtgatattccgcagcgcgcacagtgcatatacacaggcggcagcagttatacatgtagctgcctgcccgggttcagcggagacggccaggcctgccaggacgtagacgagtgccaaccaagtagatgccatcccgatgccttttgctacaacactccagggagtttcacctgtcagtgcaaacctgggtatcagggagacggtttccggtgtgtcccaggcgaagttgaaaaaacacgttgccaacacgagagagaacatattcttggcgccgccggtgccacagatccccaacggcctatccctccgggcttatttgtgccagaatgcgatgcacatggacactacgctccaacacaatgccacggaagcacaggctactgctggtgcgtagatagagatgggcgggaggtggagggaacacggactagacccggaatgacacctccatgtctgtccaccgttgccccgcccatccaccaaggcccagcagtgccaactgccgtgatccccctgccccctggcactcatctgctcttcgcacagactggcaagatagaacgcctgccattggagggtaatacaatgcgcaaaacagaagccaaggctttccttcacgtcccagctaaggtgataatcgggctcgccttcgattgcgtagacaaaatggtttattggaccgatatcactgaaccgtctataggccgggctagtctacacgggggcgaaccgacaaccattatcagacaagacctgggaagcccagaggggatcgctgtcgaccacttaggtcgcaacatcttctggaccgactctaatctggatagaatcgaggtcgcaaagctcgatggtacccaacggcgggtcttgtttgagacagacctcgtgaacccccggggtatcgtaactgatagtgtgcgcggcaacttatattggactgactggaatcgtgacaaccctaagattgaaaccagttacatggacggcactaatcgacggattcttgtgcaggatgatctgggccttccaaacggcctgactttcgatgcctttagtagccagctgtgttgggtggatgccggaaccaacagggctgagtgtctgaaccctagccagccatcacggcgcaaggccctggagggcctacagtatccgttcgccgtcacctcttacgggaagaatctctattttacagattggaaaatgaactccgtggtagccctggacttagccattagcaaagagacggatgcttttcagccccacaaacagacgcgattgtacggaatcacaaccgccttgagccagtgcccacaaggacacaactattgttcggttaacaacggcggatgcacacatctgtgtctggccacgcctggttcacgcacatgtcggtgccctgataatactcttggcgtggactgcatcgagcagaaatag

SEQ ID NO: 129345 - DNA, 3744 bp, Artificial Sequence
  derived and/or modified sequence
atgctggccagcagcagccgcatccgggccgcctggacccgggccctgctgctgcccctgctgctggccggccctgtgggctgcctgagccggcaggagctgttcccctttggacctggccagggcgacctggagctggaggatggagatgactttgtgtccccagccctggagctgagcggggccctgcgcttctatgacagaagtgacattgatgctgtgtatgtgaccaccaacggcatcatcgccaccagcgagcccccagccaaggagagccaccctggcctcttcccccccacctttggagctgtggcccccttcctggccgacctggacaccacagatggcctgggcaaggtgtactaccgggaggacctgagccccagcatcacccagagagctgctgaatgtgtgcaccggggcttccctgagatctccttccagcccagcagcgctgtggtggtgacctgggagagcgtggccccctaccagggccccagccgggaccctgaccagaagggcaagaggaacaccttccaggccgtgctggccagcagtgacagcagcagctatgccatcttcctgtacccagaagatggcctgcagttccacaccaccttcagcaagaaggagaacaaccaggtgcctgctgtggtggccttcagccagggctctgtgggcttcctgtggaagagcaatggagcctacaacatctttgccaatgaccgggagagcgtggagaacctggccaagagcagcaacagcggccagcagggcgtgtgggtgtttgaaattggcagccctgccaccaccaacggggtggtgcctgcagatgtgatcctgggcacagaagatggagcagaatatgatgatgaagatgaggactatgacctggccaccacccggctgggcctggaggatgtgggcaccacccccttctcctacaaggccctgcggcggggcggcgctgacacctacagcgtgcccagcgtgctgagccccaggagagctgccacagagcggcccctgggccccccaacagagaggaccaggagcttccagctggccgtggagaccttccaccagcagcacccccaggtgattgatgtggatgaggtggaggagaccggggtggtgttctcctacaacacagacagccggcagacctgtgccaacaacagacaccagtgcagcgtgcatgctgagtgccgggactatgccaccggcttctgctgcagctgtgtggccggctacacaggaaatggccggcagtgtgtggccgagggcagcccccagagggtgaatggcaaggtgaagggccgcatctttgtgggcagcagccaggtgcccatcgtgtttgagaacacagacctgcacagctatgtggtgatgaaccacggccgcagctacacagccatcagcaccatccctgagaccgtgggctacagcctgctgcccctggcccctgtgggcggcatcatcggctggatgtttgctgtggagcaggacggcttcaagaatggcttcagcatcaccggcggggagttcacccggcaggccgaggtgacctttgtgggccaccctggcaacctggtgatcaagcagcgcttcagcggcattgatgaacatggccacctgaccatcgacacagagctggagggccgggtgccccagatccccttcggcagctctgtgcacatcgagccctacacagagctgtaccactacagcaccagcgtcatcaccagcagcagcacccgggagtacacagtgacagagcctgagagagatggagccagccccagccgcatctacacctaccagtggaggcagaccatcaccttccaggagtgtgtgcatgatgacagcaggcctgccctgcccagcacccagcagctgtctgtggacagcgtgtttgtgctgtacaaccaggaggagaagatcctgcgctatgccctgagcaacagcatcggccctgtgcgggagggcagcccagatgccctgcagaacccctgctacatcggcacccacggctgtgacaccaatgctgcctgcaggcctggccccaggacccagttcacctgtgagtgcagcatcggcttcagaggagatggccgcacctgctatgacattgatgaatgttctgagcagcccagcgtgtgtggcagccacaccatctgcaacaaccaccctggcaccttccgctgtgaatgtgtggagggctaccagttcagtgatgagggcacctgtgtggccgtggtggaccagaggcccatcaactactgtgagaccggcctgcacaactgtgacatcccccagagggcccagtgcatctacacaggaggcagcagctacacctgcagctgcctgcccggcttctctggagatggccaggcctgccaggatgtggatgagtgccagcccagccgctgccacccagatgccttctgctacaacaccccaggcagcttcacctgccagtgcaagccaggctaccagggagatggcttccgctgtgtgcctggagaggtggagaagacccgctgccagcacgagcgggagcacatcctgggcgccgccggggccacagacccccagaggcccatccccccaggcctgtttgtgcctgaatgtgatgcccacggccactacgcccccacccagtgccacggcagcacaggctactgctggtgtgtggacagagatggccgggaggtggagggcaccaggaccaggcctggcatgaccccaccctgcctgagcacagtggccccacccatccaccagggccctgctgtgcccacagctgtgatccccctgcccccaggcacccacctgctgtttgcccagacaggcaagattgaaaggctgcccctggagggcaacaccatgaggaagacagaggccaaggccttcctgcacgtgcctgccaaggtgatcatcggcctggcctttgactgtgtggacaagatggtgtactggacagacatcacagagcccagcatcggccgggccagcctgcacggcggggagcccaccaccatcatccggcaggacctgggcagccctgagggcattgctgtggaccacctgggcaggaacatcttctggacagacagcaacctggacagaattgaggtggccaagctggatggcacccagaggagagtgctgtttgaaacagacctggtgaacccccggggcatcgtgacagattctgtgcggggcaacctgtactggacagactggaacagagacaaccccaagattgagaccagctacatggatggcaccaacagacgcatcctggtgcaggatgacctgggcctgcccaacggcctgacctttgatgccttcagcagccagctgtgctgggtggatgctggcaccaacagagctgagtgcctgaaccccagccagcccagcaggaggaaggccctggagggcctgcagtacccctttgctgtgaccagctatggcaagaacctgtacttcacagactggaagatgaacagcgtggtggccctggacctggccatcagcaaggagacagatgccttccagccccacaagcagacccggctgtatggcatcaccacagccctgagccagtgcccccagggccacaactactgcagcgtgaacaacggcggctgcacccacctgtgcctggccaccccaggcagcaggacctgccgctgcccagacaacaccctgggcgtggactgcatcgagcagaagtag

SEQ ID NO: 129346 - DNA, 3744 bp, Artificial Sequence
  derived and/or modified sequence
atgctggccagcagcagccggatccgggccgcctggacccgggccctcttgcttccgctcctgcttgccggccctgttggttgtctttcacggcaggagctgttcccctttggcccaggccaaggagacctggagctggaagacggcgacgacttcgtcagtcccgcactggagctgtccggagccctcaggttctacgataggtctgatatcgacgcagtctacgtgaccaccaatggcattatcgctacttccgagccccctgcaaaggagtcacatccaggcctctttcctccaacatttggcgccgttgccccttttctcgcagacctcgacacaactgatggattaggcaaagtttactaccgggaagatctgagccctagcatcacccagagggcagctgagtgcgtgcaccgggggtttccagaaatttctttccagccctcatcagctgtggtcgtgacatgggaatcggtcgcaccttatcagggacccagccgcgatccagaccagaagggcaaacggaacacctttcaggcagttctagcgagcagcgatagttcgtcgtatgccatattcctctacccggaggatgggttgcagtttcacacaaccttttccaaaaaggaaaataaccaggtgcccgccgtggtagctttcagccaagggtcggttggctttctgtggaagagtaacggcgcatacaacatctttgcaaacgacagagagtccgtggagaacttggctaaatccagcaacagtggtcaacagggcgtttgggtgtttgagataggttcaccagcgaccacaaatggggtcgtgcccgccgatgtaatcctcggaacagaggatggcgccgaatatgacgatgaggacgaagattacgatctagccaccactaggcttgggctggaggacgtggggacaacacctttcagttacaaagcgctgcggcgaggaggagccgacacttattccgtgccgtcagtactgtctccaaggagagcagctactgagcggcctttagggcctccaactgagaggactcgctctttccaacttgctgttgaaacctttcatcagcaacacccccaggtaatcgatgtcgatgaggtcgaggagacaggtgtggttttctcctacaacaccgacagtaggcagacctgcgctaacaaccgacaccaatgttctgtccatgcagaatgtcgcgactatgcaacaggtttttgctgcagttgcgtggccggttacacaggaaatggtcgccaatgcgtcgccgaaggaagccctcagcgcgtgaatgggaaagtcaaaggtcgcatctttgtcggttcctcccaagtcccaatcgtctttgagaacactgacctgcactcctatgtggtgatgaatcacggcaggtcatacactgcaatcagcactattcccgagacagtgggttactctctgcttcctctggcccctgtgggggggataatcgggtggatgtttgccgttgagcaggatgggttcaaaaatggattcagcattacgggtggagagtttacaaggcaggcggaagtgacttttgtgggacaccctggcaatctggtgattaaacagcgattttctgggatcgatgaacacggacacttaaccattgacacagagttggaaggacgtgtcccacaaatccccttcggctcttccgtgcatatcgaaccatataccgagctctaccattattcaacctcggtcatcacaagtagctcaaccagggagtacacggtgaccgaacctgagagagacggagcgagcccaagccggatttatacataccaatggagacagaccattacattccaagaatgtgttcacgatgacagtaggcctgctcttccttccacccaacagctgagtgtggatagtgtttttgttttgtacaatcaggaggaaaagattctgcggtacgcactgtcaaattctattggtcccgtcagggagggtagccctgacgcacttcaaaatccctgttacatcggcacccacggatgtgatacgaatgccgcgtgtcgaccaggaccgaggactcaatttacctgtgaatgtagtattggctttcgaggagatggcaggacttgttatgacatcgatgaatgctcagaacagccgtcagtgtgtggctcacatacaatttgcaacaatcatccagggacttttcgctgcgagtgtgtcgagggttatcagttttccgacgagggaacatgcgtcgcagtggtggaccagcgtcctattaactattgcgaaactggcctacataattgcgatatcccgcagcgggctcagtgcatttatactggaggcagttcttatacttgctcttgtttgcccgggttttcaggcgacgggcaagcctgccaagacgttgacgaatgtcagccctccagatgccacccagacgccttttgctacaatactccagggtcattcacctgccagtgtaagccaggatatcagggcgatggattccggtgtgtgcctggcgaggtggaaaagacccgttgtcagcatgagagagaacatatcctcggagctgccggcgccacagacccccagcgtccgatccctccaggactgttcgttccggaatgcgatgcccacgggcattacgcccctacacagtgccacgggtctactggttactgctggtgcgttgatagagacggtcgggaagtggagggaactagaacccgtcccggtatgactccaccctgcctctcgaccgttgcgcctcctatccaccagggtccagctgtgccgacggctgtaattccgctgcctccaggaacccatctgctgttcgcacagaccggcaagatcgagcgacttcccctcgagggaaatacaatgcgaaaaaccgaagccaaggccttcctgcatgtgccagctaaggttatcattggactggcttttgactgcgtggacaaaatggtatattggaccgacattaccgaaccaagcatcgggcgcgcctcacttcatggtggcgagccaacaactatcatccgacaagacctcggcagccctgaaggcatcgcagttgaccatctggggaggaacattttctggacagattcaaatctggatcgaatcgaagtggccaaactcgacggtacccagaggagagtcctgttcgaaaccgatctcgttaacccaagaggtatagtcaccgacagcgtacgggggaacctgtactggaccgactggaaccgagataatccgaaaatagagacatcttacatggacggcaccaatcgcaggatcctggtgcaggacgacctcggccttcctaatgggctcacttttgacgcgttctcttcgcagctctgctgggtggacgcaggaaccaatcgcgccgaatgcctcaaccctagccagcccagtagaagaaaagccctagaggggctgcagtacccctttgctgtgacctcctatggcaaaaacctgtactttaccgattggaaaatgaattctgtggtggccctggatctggcaatttccaaagagacagatgccttccaaccgcataaacaaacacgattatatggcataaccactgccctgtcacagtgtccccagggccacaattactgctcagtgaataacgggggctgtactcacctatgcctggctactccagggtcccgcacatgtcgatgccccgataacaccctgggggtggattgcatagaacaaaagtag

SEQ ID NO: 129347 - RNA, 3744 nt, Artificial Sequence
  derived and/or modified sequence
auguuggcuagcucaucaagaauccgggcugcauggacgagagcgcuccuguugccucugcuucucgccggacccgucgguugucugucucgacaggaacuuuuuccauucgguccuggucagggcgacuuggaguuggaagacggugaugacuuugugagccccgcacuggagcugucaggcgcccugcgguuuuacgaucgcagcgauauugacgccguguacgugaccacaaacggaauuauagcuaccuccgagccgccagcaaaagagucucacccaggccuauuccccccuacauucggugcuguagcuccuuuucuggcggauuuggauacaaccgacgggcuuggcaagguguauuaccgugaagacuugaguccaucaaucacccagagggcggcagagugcguacaccggggguuuccagaaauuucuuuucagcccucuuccgcaguuguugucacaugggaaucuguggcuccauaccagggccccaguagggauccugaucagaaggguaagagaaauacauuccaggccguccuugcuaguucagacagcucuagcuacgccauauuuuuauauccugaggauggccugcaguuccauaccacguucaguaagaaggagaauaaucagguuccagcaguaguggccuucucacaaggcucagugggguuccuguggaaguccaacggcgcguacaacaucuucgccaaugacagggaauccgucgaaaaccuugcgaagagcagcaacagcggccagcaagggguauggguguuugagauaggguccccggcuaccacuaacggcguggugccagccgacguuauccuuggaaccgaagacggcgcugaauacgaugaugaagacgaagacuacgaccuggccaccacucggcugggacucgaggacgucggcacgacaccuuucaguuacaaagcccugagacgcggcggcgcugacacauacuccgugcccucaguacucagccccagaagagcagcaaccgagaggccuuugggccccccaacugagagaacccgaaguuuucaacuugcuguugagaccuuccaucagcagcauccacaggugauugauguggacgagguugaggaaacuggggugguauucuccuauaacaccgacuccagacaaacgugcgccaauaaucgccaccaaugcucagugcacgcggagugccgugauuaugcuaccgguuuuuguuguuccugcguggcagguuauacugguaacgggcgccagugcguggcagaagguucgccacagcgaguaaacgguaaagucaagggccggaucuuugucgggucuagucagguacccaucguauuugagaauacagaucuccauagcuacguggugaugaaccauggucgcucauauaccgcuauuaguacuaucccugagacugucggauauagucugcugccacuggcaccggugggcggaaucauaggauggauguuugcuguugaacaggauggcuucaaaaacggguuuucuaucaccggcggcgaguuuacacggcaggcugaggugacauuugucggacaucccggaaaucugguuaucaagcagagauuuucuggcauagaugaacauggacaccuuacuauagacacagagcuagaaggcagagugccucagauccccuuuggcucaagcgugcauaucgaaccguauacugaauuguaucauuacucaacaucugugaucaccucauccagcacucgggaguauacagucacagagccagagcgcgacggggcaagcccaucaagaauuuacacauaccaguggcgacagaccauaaccuuccaggagugcgugcaugacgauucuagacccgccuuaccguccacacagcagcuguccguugauucaguuuucguuuuauacaaccaggaagagaaaauacuucgguacgcccuaucaaauuccaucgguccaguacgcgagggaucuccggacgcccuucaaaauccauguuauauugguacucacggcugcgauacaaacgcugccuguaggccuggucccaggacacaguuuacaugcgaauguucuauaggcuuccgcggagacgggcggacguguuacgacaucgaugaaugcucugaacaaccuagugucugcggcucccacacaauuuguaacaaucacccagggaccuuucguugugaaugcguggaaggauaucaguucagugaugaaggcaccuguguugcggugguggaucagagacccauuaacuacugcgaaaccggucuccauaacugugacauuccacagcgcgcacagugcaucuacaccggugguucaagcuacacaugcagcugccucccgggguuuagcggugacggccaggcaugccaggacguggacgagugucagccuagccguugccauccggaugcauucugcuacaacacaccuggcuccuuuaccugccagugcaaaccaggcuaucagggcgacggcuuccgguguguaccuggcgaagucgagaaaacccggugccagcacgaaagggaacauauccugggagcggccggagcaaccgauccccagagaccaaucccucccggauuguuuguuccugagugugacgcacacggccacuacgcaccuacucaaugucacggcucuacaggguacugcuggugugucgaccgagauggucgggagguagaagguacaaggacacgaccaggcaugacgcccccuugucucucgacugucgcucccccuauccaccagggccccgcugucccgacagccgucauuccgcucccgccuggcacccaccugcuguucgcccagacagggaagauugagagguuaccucuugaagggaacaccaugcguaagacugaagccaaggcguuucuccaugugccagcaaagguaaucaucggacuggcauuugauugcgucgauaagaugguuuauuggacugacauaacagagccuagcauaggcagagccagcuugcacgguggugaaccuaccacaauuauccgccaggaucuuggcucuccggagggcauugcuguugaccaccugggucgcaacaucuucuggacugauucuaaccuagacaggauugaagucgccaagcuugacgguacgcagcggagggugcuguucgaaacugaucuugugaauccuagggggauugucacagacaguguccgugguaaccuguauuggaccgauuggaaccgcgacaauccaaaaauugaaacuucguauauggacgguacaaacaggcgcauacuaguccaggaugaucugggccuuccuaauggauugacauuugacgccuuuucaucucagcuauguuggguagacgccgggaccaauagagccgagugccugaauccaucgcagccuagccggagaaaggcucuggaaggccugcaguauccauucgccguuacuucuuacggaaagaaccuguacuuuacagacuggaagaugaauagugucguggcccuugaucuagcuauuucaaaggaaacagaugccuuucagccucauaagcagacgcgucuauaugguaucacuaccgcacucucacaguguccucaaggccacaacuauugcagugugaacaauggaggcuguacucacuuaugccucgcuacuccgggcucuagaacaugucgcuguccagacaauacccucgguguggauugcauugagcagaaguag

SEQ ID NO: 129348 - RNA, 3744 nt, Artificial Sequence
  derived and/or modified sequence
augcucgcauccagcucacgaaucagagcugcauggacccgcgcucuacuucugcccuuacuccucgcaggccccgugggcugccucuccagacaggagcuguuccccuuuggcccgggacaaggcgaccuggagcuugaggauggugacgacuuugucagcccagccuuagaacucucaggcgcucugcgauuuuaugaucgcuccgauaucgaugcaguauaugugacaaccaacgggauuauagcuacuagcgaaccaccugccaaagaaucacauccgggccuguucccaccaacguucggugccguagcuccuuuuuuagccgaccucgacacuaccgacggccuggguaaaguguacuacagggaagacuuaucaccuuccaucacccagagggccgcugagugcguacauagaggcuuuccagagauaucuuuccagccuucgagcgccgugguugugaccugggagagcguugccccuuaucaggggccaucccgagaccccgaucaaaaaggcaaacgcaacacauuccaagccgugcuggcuuccucugauagcuccucuuacgcgauuuuccuuuauccggaggaugggcugcaguuccacaccacauuuaguaaaaaggagaacaaucaggugccugccgugguggcuuucucacaggguagcgugggcuucuuauggaaaucaaacggcgcauacaacauauuugccaacgaucgugaaucagucgagaaccuggcgaagucaaguaacucagggcaacagggcguuuggguguucgagaucggcucccccgcuacaaccaauggagugguuccugcagacguuauccuggggaccgaagauggcgccgaguacgacgaugaagacgaagauuaugaccuggccacgacaagauuaggauuggaggacguagguacaacaccguuuagcuacaaggcacuacgaaggggcggugcggacaccuacuccgucccaaguguuuugucccccaggagggcugccacugagaggccucugggucccccaacagagcguacaagaaguuuucagcuggcagucgaaacauuccaccaacaacauccgcaagugaucgauguagaugaggucgaggaaacuggcgucguauucucuuacaacaccgacucaagacagacaugcgcgaacaaccgacaucaguguagcguccacgccgaguguagggacuaugccaccggcuuuuguuguucuugugucgcaggguauacaggcaacggacggcaaugcguagcugagggaucuccucagaggguaaacgggaaggugaagggcagaaucuucgucgggucuagucagguuccaauuguuuucgagaauacggaucuccacucauauguugugaugaaucauggcaggaguuacaccgcgaucuccacgaucccagaaacagucggguauucacuguugccuuuggccccaguggggggaauaauaggcuggauguucgcugucgaacaggauggcuucaaaaacggguuuucuaucaccggcggcgaguuuacacggcaggcugaggugacauuugucggacaucccggaaaucugguuaucaagcagagauuuucuggcauagaugaacauggacaccuuacuauagacacagagcuagaaggcagagugccucagauccccuuuggcucaagcgugcauaucgaaccguauacugaauuguaucauuacucaacaucugugaucaccucauccagcacucgggaguauacagucacagagccagagcgcgacggggcaagcccaucaagaauuuacacauaccaguggcgacagaccauaaccuuccaggagugcgugcaugacgauucuagacccgccuuaccguccacacagcagcuguccguugauucaguuuucguuuuauacaaccaggaagagaaaauacuucgguacgcccuaucaaauuccaucgguccaguacgcgagggaucuccggacgcccuucaaaauccauguuauauugguacucacggcugcgauacaaacgcugccuguaggccuggucccaggacacaguuuacaugcgaauguucuauaggcuuucgaggggauggucgcacauguuaugauaucgacgagugcuccgaacaaccgaguguguguggaucccauacuaucugcaauaaccauccaggcacuuuucggugugaguguguagaaggauaucaauuuucugaugaagguaccugcguugccgugguggaucagcgccccauuaacuauugcgaaacuggcuuacauaacugugauaucccccaaagagcucagugcaucuauaccggaggaagcucuuacacuugcagcugcuuacccggguuuuccggcgacggccaggccugucaagauguggacgagugucagccuuccagaugucauccagacgcauuuugcuauaacacuccugggucuuucacaugucaguguaaaccagguuaccagggagacggguuucgcugcguuccuggcgaaguugaaaaaacaagaugccaacacgaacgagaacauauccugggggccgccggcgccaccgauccucagagaccgauaccccccgggcucuuugucccugaaugugacgcccauggucacuacgcucccacccaaugccacggcucgaccggguacugcugguguguggaccgcgacgggagagagguugagggaacgcgaacccgacccggaaugaccccucccugccuauccacuguagcaccaccuauacaucaagggcccgcuguacccaccgccguuaucccacugccccccggaacacacuugcuuuuugcccagacagggaagauugaacgacucccccucgagggaaauacuaugagaaagaccgaggccaaggccuuucuacacguccccgccaaggucauaaucggucuggccuucgauuguguagacaaaauggucuacuggacagacaucacagaaccaaguauugguagagccagucuacaugggggagagccuacaaccauuauacgacaagaucuggggaguccugaaggcaucgcuguagaccaccucggaaggaacaucuuuuggacagacaguaaccuggauagaaucgaagucgcuaagcuggacgguacccaacgccgugugcuguucgagacagaccuggucaauccuagagguauuguuaccgacuccgucagaggcaaccuguacuggacugacuggaaccgagauaauccaaaaaucgaaacauccuacauggacggaacgaauagaaggauccuuguacaagaugaucuuggcuugccuaacggacuuacuuuugacgccuucucuucacaguuguguugggucgaugcaggaaccaaccgugcugaaugcuuaaacccuagccagccaucccggagaaaagcgcuugagggccugcaguauccauucgcugucaccucauaugggaagaaucuguacuucacugauuggaagaugaacuccguggucgcucuggaucucgccauaucuaaagaaacagacgccuuccagccucacaaacagacccgacuauacgguaucacuacagcauugucucaauguccccaggggcacaauuauugcagcgugaacaacgggggaugcacccaucuuugccuugccacuccaggaucucggacgugcagaugcccagauaacacacucgguguggacuguauagaacaaaaguag

SEQ ID NO: 129349 - protein, 273 aa, Artificial Sequence
  derived and/or modified sequence
MSLTNTKTGFSVKDILDLPDTNDEEGSVAEGPEEENEGPEPAKRAGPLGQGALDAVQSLPLKNPFYDSSDNPYTRWLASTEGLQYSLHGLAAGAPPQDSSSKSPEPSADESPDNDKETPGGGGDAGKKRKRRVLFSKAQTYELERRFRQQRYLSAPEREHLASLIRLTPTQVKIWFQNHRYKMKRARAEKGMEVTPLPSPRRVAVPVLVRDGKPCHALKAQDLAAATFQAGIPFSAYSAQSLQHMQYNAQYSSASTPQYPTAHPLVQAQQWTW

SEQ ID NO: 129350 - DNA, 2092 bp, Artificial Sequence
  derived and/or modified sequence
gcggccgccggagcccgagctgacgccgccttggcacccctcctggagttagaaactaaggccggggcccgcggcgctcggcgcgcaggccgcccggcttcctgcgtccatttccgcgtgctttcaaagaagacagagagaggcactgggttgggcttcatttttttcctccccatccccagtttctttctctttttaaaaataataattatcccaataattaaagccaattcccccctcccctcccccagtccctccccccaactcccccctcccccgcccgccggggcaggggagcgccacgaattgaccaagtgaagctacaactttgcgacataaattttggggtctcgaaccatgtcgctgaccaacacaaagacggggttttcggtcaaggacatcttagacctgccggacaccaacgatgaggagggctctgtggccgaaggtccggaggaagagaacgaggggcccgagccagccaagagggccgggccgctggggcagggcgccctggacgcggtgcagagcctgcccctgaagaaccccttctacgacagcagcgacaacccgtacacgcgctggctggccagcaccgagggccttcagtactccctgcacggtctggctgccggggcgccccctcaggactcaagctccaagtccccggagccctcggccgacgagtcaccggacaatgacaaggagaccccgggcggcgggggggacgccggcaagaagcgaaagcggcgagtgcttttctccaaggcgcagacctacgagctggagcggcgctttcggcagcagcggtacctgtcggcgcccgagcgcgaacacctggccagcctcatccgcctcacgcccacgcaggtcaagatctggttccagaaccaccgctacaagatgaagcgcgcccgggccgagaaaggtatggaggtgacgcccctgccctcgccgcgccgggtggccgtgcccgtcttggtcagggacggcaaaccatgtcacgcgctcaaagcccaggacctggcagccgccaccttccaggcgggcattcccttttctgcctacagcgcgcagtcgctgcagcacatgcagtacaacgcccagtacagctcggccagcaccccccagtacccgacagcacaccccctggtccaggcccagcagtggacttggtgagcgccgccccaacgagactcgcggccccaggcccaggccccaccccggcggcggtggcggcgaggaggcctcggtccttatggtggttattattattattataattattattatggagtcgagttgactctcggctccactagggaggcgccgggaggttgcctgcgtctccttggagtggcagattccacccacccagctctgcccatgcctctccttctgaaccttgggagagggctgaactctacgccgtgtttacagaatgtttgcgcagcttcgcttctttgcctctccccggggggaccaaaccgtcccagcgttaatgtcgtcacttgaaaacgagaaaaagaccgaccccccacccctgctttcgtgcattttgtaaaatatgtttgtgtgagtagcgatattgtcagccgtcttctaaagcaagtggagaacactttaaaaatacagagaatttcttcctttttttaaaaaaaaataagaaaatgctaaatatttatggccatgtaaacgttctgacaactggtggcagatttcgcttttcgttgtaaatatcggtggtgattgttgccaaaatgaccttcaggaccggcctgtttcccgtctgggtccaactcctttctttgtggcttgtttgggtttgttttttgttttgtttttgtttttgcgttttcccctgctttcttcctttctctttttattttattgtgcaaacatttctcaaatatggaaaagaaaaccctgtaggcagggagccctctgccctgtcctccgggccttcagccccgaacttggagctcagctattcggcgcggttccccaacagcgccgggcgcagaaagctttcgattttttaaataagaattttaataaaaatcctgtgtttaaaaaagaaaaaaagaaaaaa

SEQ ID NO: 129351 - DNA, 822 bp, Artificial Sequence
  derived and/or modified sequence
atgagcctaactaacactaagacaggtttttcggtgaaggatatcttggatctacccgacacaaacgatgaagaagggtcggtggccgaggggccagaggaagaaaacgaagggcccgagccggctaagcgagccggacctctgggccaaggcgcgctcgacgctgtacaaagtctgcccctaaagaacccattctacgacagttcagataatccatacacaaggtggctggcgtctactgaggggcttcaatattcactccatggtctggccgctggtgcgcctcctcaggactcaagcagtaagagcccagaaccgtcggctgacgagtccccagataatgataaggaaactcccggcggcggtggtgacgcaggaaaaaagaggaagcggagagtgctgttttccaaggcccaaacatacgagctggaacgccgctttagacagcagcgttatctgtccgctccggaaagagagcacctggccagtctcataagactgacacctacacaggtgaaaatttggttccaaaaccaccgatataagatgaaacgggcacgcgctgaaaaaggaatggaggtgactcctctaccatccccaaggcgcgtagccgtgccagttctagtcagggatggtaagccctgccacgctcttaaagcacaggaccttgccgctgccaccttccaggcaggcattcccttttctgcatattcggcgcagagtctacagcacatgcaatataatgcacaatattcttctgccagtacacctcagtaccccacagcccacccactggtacaggcacagcagtggacatggtag

SEQ ID NO: 129352 - DNA, 822 bp, Artificial Sequence
  derived and/or modified sequence
atgagcctgaccaacaccaagacaggcttctctgtgaaggacatcctggacctgcctgacaccaatgatgaggagggctctgtggccgagggccctgaggaggagaatgaaggacctgagcccgccaagagagctggccccctgggccagggcgccctggatgctgtgcagagcctgcccctgaagaaccccttctatgacagcagtgacaacccctacacccgctggctggccagcacagagggcctgcagtacagcctgcacggcctggccgccggggccccaccccaggacagcagcagcaagagccctgagcccagcgcagatgagagcccagacaatgacaaggagaccccaggcggcggcggagatgctgggaagaagaggaagagaagagtgctcttcagcaaggcccagacctatgagctggagcggcgcttccggcagcagcgctacctgagcgcccctgagcgggagcacctggccagcctcatccggctgacccccacccaggtgaagatctggttccagaaccaccgctacaagatgaagagggcccgggcagagaagggcatggaggtgacccccctgcccagccccaggagagtggccgtgcctgtgctggtgagagatggcaagccctgccacgccctgaaggcccaggacctggccgccgccaccttccaggccggcatccccttcagcgcctacagcgcccagagcctgcagcacatgcagtacaatgcccagtacagcagcgccagcaccccccagtaccccacagcccaccccctggtgcaggcccagcagtggacctggtag

SEQ ID NO: 129353 - DNA, 822 bp, Artificial Sequence
  derived and/or modified sequence
atgagcctgaccaacaccaagaccggcttcagcgtgaaggacatcctcgacctgcctgacacaaatgacgaggagggctccgtggcagaaggtcccgaggaggagaatgaaggaccagaacccgccaagagggccggtccattgggacagggggccctcgacgctgtgcagagtctgcctctgaagaatcctttctatgattcatcagataatccttatacacggtggctcgcttctacggaaggcttgcagtatagccttcacgggttggctgccggagctccccctcaagatagcagcagcaagtcaccggagccatctgctgacgaaagcccagataacgataaggaaactcccggagggggcggggacgccggaaagaagaggaaaaggcgggtacttttctccaaagctcagacgtacgaacttgaacggaggtttcgtcagcagcgttacctctccgcacccgagcgagaacacctggcctccctgattcgtctgacccccacgcaggtgaagatttggtttcaaaaccaccggtataagatgaaaagagccagggccgaaaagggcatggaagttaccccactgccctctccaagacgcgtggccgtgcctgtcctcgtcagggatggaaagccctgccacgcgttgaaggcccaggacctggccgccgcaacattccaagccggcatcccattctctgcgtatagtgcccagtccctacagcatatgcagtacaacgctcagtattcaagcgcatccaccccacagtatcccactgcacatccgctggtgcaagcgcagcagtggacgtggtag

SEQ ID NO: 129354 - DNA, 822 bp, Artificial Sequence
  derived and/or modified sequence
atgtccctgacaaatacgaaaaccggcttcagtgtaaaggacattctagacttgcccgacaccaatgatgaggaaggaagcgtagctgaaggacccgaagaagaaaacgaaggccctgaacccgcaaaaagggccggaccactgggacagggagctctggacgccgtgcagagtctccctttaaagaacccgttctatgactccagtgataacccatatactagatggttggcctccacagaaggcttgcagtattctttgcatggtctggccgctggcgcaccccctcaggactcatcctcaaagtctcctgagccatcagccgacgaatctcctgataatgacaaggagactcccggagggggaggagatgctgggaaaaagagaaagaggagagtgctattttctaaggctcagacatacgaacttgaacgacgtttcagacagcagaggtatctgtctgcaccggaacgcgagcacctggccagccttatacggctcacacctactcaggtcaagatttggtttcaaaatcaccggtataaaatgaaacgagccagggccgagaaaggaatggaggtgacgccccttccctcacctcggcgagttgcggttccagtgctggttcgcgatggtaaaccctgtcacgctctgaaagcccaggatctcgccgcagccaccttccaggcaggaatccctttttctgcctatagcgcgcaatctctgcagcatatgcagtataacgctcaatatagcagcgcctcaacacctcagtatcccacagcgcatcctctcgtacaggcccaacagtggacatggtag

SEQ ID NO: 129355 - DNA, 822 bp, Artificial Sequence
  derived and/or modified sequence
atgagcctgaccaacaccaagaccggcttcagcgtgaaggacatcctggacctgcccgacaccaacgacgaggagggcagcgtggccgagggccccgaggaggagaacgagggccccgagcccgccaagagagccggccccctgggccagggcgccctggacgccgtgcagagcctgcccctgaagaaccccttctacgacagcagcgacaacccctacaccagatggctggccagcaccgagggcctgcagtacagcctgcacggcctggccgccggcgcccccccccaggacagcagcagcaagagccccgagcccagcgccgacgagagccccgacaacgacaaggagacccccggcggcggcggcgacgccggcaagaagagaaagagaagagtgctgttcagcaaggcccagacctacgagctggagagaagattcagacagcagagatacctgagcgcccccgagagagagcacctggccagcctgatcagactgacccccacccaggtgaagatctggttccagaaccacagatacaagatgaagagagccagagccgagaagggcatggaggtgacccccctgcccagccccagaagagtggccgtgcccgtgctggtgagagacggcaagccctgccacgccctgaaggcccaggacctggccgccgccaccttccaggccggcatccccttcagcgcctacagcgcccagagcctgcagcacatgcagtacaacgcccagtacagcagcgccagcaccccccagtaccccaccgcccaccccctggtgcaggcccagcagtggacctggtag

SEQ ID NO: 129356 - protein, 560 aa, Artificial Sequence
  derived and/or modified sequence
MECLYYFLGFLLLAARLPLDAAKRFHDVLGNERPSAYMREHNQLNGWSSDENDWNEKLYPVWKRGDMRWKNSWKGGRVQAVLTSDSPALVGSNITFAVNLIFPRCQKEDANGNIVYEKNCRNEAGLSADPYVYNWTAWSEDSDGENGTGQSHHNVFPDGKPFPHHPGWRRWNFIYVFHTLGQYFQKLGRCSVRVSVNTANVTLGPQLMEVTVYRRHGRAYVPIAQVKDVYVVTDQIPVFVTMFQKNDRNSSDETFLKDLPIMFDVLIHDPSHFLNYSTINYKWSFGDNTGLFVSTNHTVNHTYVLNGTFSLNLTVKAAAPGPCPPPPPPPRPSKPTPSLGPAGDNPLELSRIPDENCQINRYGHFQATITIVEGILEVNIIQMTDVLMPVPWPESSLIDFVVTCQGSIPTEVCTIISDPTCEITQNTVCSPVDVDEMCLLTVRRTFNGSGTYCVNLTLGDDTSLALTSTLISVPDRDPASPLRMANSALISVGCLAIFVTVISLLVYKKHKEYNPIENSPGNVVRSKGLSVFLNRAKAVFFPGNQEKDPLLKNQEFKGVS

SEQ ID NO: 129357 - protein, 461 aa, Artificial Sequence
  derived and/or modified sequence
MECLYYFLGFLLLAARLPLDAAKQAGLSADPYVYNWTAWSEDSDGENGTGQSHHNVFPDGKPFPHHPGWRRWNFIYVFHTLGQYFQKLGRCSVRVSVNTANVTLGPQLMEVTVYRRHGRAYVPIAQVKDVYVVTDQIPVFVTMFQKNDRNSSDETFLKDLPIMFDVLIHDPSHFLNYSTINYKWSFGDNTGLFVSTNHTVNHTYVLNGTFSLNLTVKAAAPGPCPPPPPPPRPSKPTPSLGPAGDNPLELSRIPDENCQINRYGHFQATITIVEGILEVNIIQMTDVLMPVPWPESSLIDFVVTCQGSIPTEVCTIISDPTCEITQNTVCSPVDVDEMCLLTVRRTFNGSGTYCVNLTLGDDTSLALTSTLISVPDRDPASPLRMANSALISVGCLAIFVTVISLLVYKKHKEYNPIENSPGNVVRSKGLSVFLNRAKAVFFPGNQEKDPLLKNQEFKGVS

SEQ ID NO: 129358 - DNA, 1683 bp, Artificial Sequence
  derived and/or modified sequence
atggagtgcctgtactacttcctgggcttcctgctgctggccgccagactgcccctggacgccgccaagagattccacgacgtgctgggcaacgagagacccagcgcctacatgagagagcacaaccagctgaacggctggagcagcgacgagaacgactggaacgagaagctgtaccccgtgtggaagagaggcgacatgagatggaagaacagctggaagggcggcagagtgcaggccgtgctgaccagcgacagccccgccctggtgggcagcaacatcaccttcgccgtgaacctgatcttccccagatgccagaaggaggacgccaacggcaacatcgtgtacgagaagaactgcagaaacgaggccggcctgagcgccgacccctacgtgtacaactggaccgcctggagcgaggacagcgacggcgagaacggcaccggccagagccaccacaacgtgttccccgacggcaagcccttcccccaccaccccggctggagaagatggaacttcatctacgtgttccacaccctgggccagtacttccagaagctgggcagatgcagcgtgagagtgagcgtgaacaccgccaacgtgaccctgggcccccagctgatggaggtgaccgtgtacagaagacacggcagagcctacgtgcccatcgcccaggtgaaggacgtgtacgtggtgaccgaccagatccccgtgttcgtgaccatgttccagaagaacgacagaaacagcagcgacgagaccttcctgaaggacctgcccatcatgttcgacgtgctgatccacgaccccagccacttcctgaactacagcaccatcaactacaagtggagcttcggcgacaacaccggcctgttcgtgagcaccaaccacaccgtgaaccacacctacgtgctgaacggcaccttcagcctgaacctgaccgtgaaggccgccgcccccggcccctgccccccccccccccccccccccagacccagcaagcccacccccagcctgggccccgccggcgacaaccccctggagctgagcagaatccccgacgagaactgccagatcaacagatacggccacttccaggccaccatcaccatcgtggagggcatcctggaggtgaacatcatccagatgaccgacgtgctgatgcccgtgccctggcccgagagcagcctgatcgacttcgtggtgacctgccagggcagcatccccaccgaggtgtgcaccatcatcagcgaccccacctgcgagatcacccagaacaccgtgtgcagccccgtggacgtggacgagatgtgcctgctgaccgtgagaagaaccttcaacggcagcggcacctactgcgtgaacctgaccctgggcgacgacaccagcctggccctgaccagcaccctgatcagcgtgcccgacagagaccccgccagccccctgagaatggccaacagcgccctgatcagcgtgggctgcctggccatcttcgtgaccgtgatcagcctgctggtgtacaagaagcacaaggagtacaaccccatcgagaacagccccggcaacgtggtgagaagcaagggcctgagcgtgttcctgaacagagccaaggccgtgttcttccccggcaaccaggagaaggaccccctgctgaagaaccaggagttcaagggcgtgagctag

SEQ ID NO: 129359 - DNA, 1386 bp, Artificial Sequence
  derived and/or modified sequence
atggagtgcctgtactacttcctgggcttcctgctgctggccgccagactgcccctggacgccgccaagcaggccggcctgagcgccgacccctacgtgtacaactggaccgcctggagcgaggacagcgacggcgagaacggcaccggccagagccaccacaacgtgttccccgacggcaagcccttcccccaccaccccggctggagaagatggaacttcatctacgtgttccacaccctgggccagtacttccagaagctgggcagatgcagcgtgagagtgagcgtgaacaccgccaacgtgaccctgggcccccagctgatggaggtgaccgtgtacagaagacacggcagagcctacgtgcccatcgcccaggtgaaggacgtgtacgtggtgaccgaccagatccccgtgttcgtgaccatgttccagaagaacgacagaaacagcagcgacgagaccttcctgaaggacctgcccatcatgttcgacgtgctgatccacgaccccagccacttcctgaactacagcaccatcaactacaagtggagcttcggcgacaacaccggcctgttcgtgagcaccaaccacaccgtgaaccacacctacgtgctgaacggcaccttcagcctgaacctgaccgtgaaggccgccgcccccggcccctgccccccccccccccccccccccagacccagcaagcccacccccagcctgggccccgccggcgacaaccccctggagctgagcagaatccccgacgagaactgccagatcaacagatacggccacttccaggccaccatcaccatcgtggagggcatcctggaggtgaacatcatccagatgaccgacgtgctgatgcccgtgccctggcccgagagcagcctgatcgacttcgtggtgacctgccagggcagcatccccaccgaggtgtgcaccatcatcagcgaccccacctgcgagatcacccagaacaccgtgtgcagccccgtggacgtggacgagatgtgcctgctgaccgtgagaagaaccttcaacggcagcggcacctactgcgtgaacctgaccctgggcgacgacaccagcctggccctgaccagcaccctgatcagcgtgcccgacagagaccccgccagccccctgagaatggccaacagcgccctgatcagcgtgggctgcctggccatcttcgtgaccgtgatcagcctgctggtgtacaagaagcacaaggagtacaaccccatcgagaacagccccggcaacgtggtgagaagcaagggcctgagcgtgttcctgaacagagccaaggccgtgttcttccccggcaaccaggagaaggaccccctgctgaagaaccaggagttcaagggcgtgagctag

SEQ ID NO: 129360 - DNA, 2862 bp, Artificial Sequence
  derived and/or modified sequence
ttgaatctagtaaatgtggaatcacaaaattgaaataatgtgcatctgaaaagtgaataaatagatgccaagaaggagtgagtcataagcacatgagttgtaagaggttgaacttgagagaccagatcaggcagtgccgcttaataccatcacatgatcctccccgaggccctgtatttaattaaaatagagagggaggcaccacagatgccagaagaacactgttgctcttggtggacgggcccagaggaattcagagttaaaccttgagtgcctgcgtccgtgagaattcagcatggaatgtctctactatttcctgggatttctgctcctggctgcaagattgccacttgatgccgccaaacgatttcatgatgtgctgggcaatgaaagaccttctgcttacatgagggagcacaatcaattaaatggctggtcttctgatgaaaatgactggaatgaaaaactctacccagtgtggaagcggggagacatgaggtggaaaaactcctggaagggaggccgtgtgcaggcggtcctgaccagtgactcaccagccctcgtgggctcaaatataacatttgcggtgaacctgatattccctagatgccaaaaggaagatgccaatggcaacatagtctatgagaagaactgcagaaatgaggctggtttatctgctgatccgtatgtttacaactggacagcatggtcagaggacagtgacggggaaaatggcaccggccaaagccatcataacgtcttccctgatgggaaaccttttcctcaccaccccggatggagaagatggaatttcatctacgtcttccacacacttggtcagtatttccagaaattgggacgatgttcagtgagagtttctgtgaacacagccaatgtgacacttgggcctcaactcatggaagtgactgtctacagaagacatggacgggcatatgttcccatcgcacaagtgaaagatgtgtacgtggtaacagatcagattcctgtgtttgtgactatgttccagaagaacgatcgaaattcatccgacgaaaccttcctcaaagatctccccattatgtttgatgtcctgattcatgatcctagccacttcctcaattattctaccattaactacaagtggagcttcggggataatactggcctgtttgtttccaccaatcatactgtgaatcacacgtatgtgctcaatggaaccttcagccttaacctcactgtgaaagctgcagcaccaggaccttgtccgccaccgccaccaccacccagaccttcaaaacccaccccttctttaggacctgctggtgacaaccccctggagctgagtaggattcctgatgaaaactgccagattaacagatatggccactttcaagccaccatcacaattgtagagggaatcttagaggttaacatcatccagatgacagacgtcctgatgccggtgccatggcctgaaagctccctaatagactttgtcgtgacctgccaagggagcattcccacggaggtctgtaccatcatttctgaccccacctgcgagatcacccagaacacagtctgcagccctgtggatgtggatgagatgtgtctgctgactgtgagacgaaccttcaatgggtctgggacgtactgtgtgaacctcaccctgggggatgacacaagcctggctctcacgagcaccctgatttctgttcctgacagagacccagcctcgcctttaaggatggcaaacagtgccctgatctccgttggctgcttggccatatttgtcactgtgatctccctcttggtgtacaaaaaacacaaggaatacaacccaatagaaaatagtcctgggaatgtggtcagaagcaaaggcctgagtgtctttctcaaccgtgcaaaagccgtgttcttcccgggaaaccaggaaaaggatccgctactcaaaaaccaagaatttaaaggagtttcttaaatttcgaccttgtttctgaagctcacttttcagtgccattgatgtgagatgtgctggagtggctattaacctttttttcctaaagattattgttaaatagatattgtggtttggggaagttgaattttttataggttaaatgtcattttagagatggggagagggattatactgcaggcagcttcagccatgttgtgaaactgataaaagcaacttagcaaggcttcttttcattattttttatgtttcacttataaagtcttaggtaactagtaggatagaaacactgtgtcccgagagtaaggagagaagctactattgattagagcctaacccaggttaactgcaagaagaggcgggatactttcagctttccatgtaactgtatgcataaagccaatgtagtccagtttctaagatcatgttccaagctaactgaatcccacttcaatacacactcatgaactcctgatggaacaataacaggcccaagcctgtggtatgatgtgcacacttgctagactcagaaaaaatactactctcataaatgggtgggagtattttggtgacaacctactttgcttggctgagtgaaggaatgatattcatatattcatttattccatggacatttagttagtgctttttatataccaggcatgatgctgagtgacactcttgtgtatatttccaaatttttgtacagtcgctgcacatatttgaaatcatatattaagactttccaaagatgaggtccctggtttttcatggcaacttgatcagtaaggatttcacctctgtttgtaactaaaaccatctactatatgttagacatgacattctttttctctccttcctgaaaaataaagtgtgggaagagacaa

SEQ ID NO: 129361 - DNA, 1879 bp, Artificial Sequence
  derived and/or modified sequence
agaagaacactgttgctcttggtggacgggcccagaggaattcagagttaaaccttgagtgcctgcgtccgtgagaattcagcatggaatgtctctactatttcctgggatttctgctcctggctgcaagattgccacttgatgccgccaaacaggctggtttatctgctgatccgtatgtttacaactggacagcatggtcagaggacagtgacggggaaaatggcaccggccaaagccatcataacgtcttccctgatgggaaaccttttcctcaccaccccggatggagaagatggaatttcatctacgtcttccacacacttggtcagtatttccagaaattgggacgatgttcagtgagagtttctgtgaacacagccaatgtgacacttgggcctcaactcatggaagtgactgtctacagaagacatggacgggcatatgttcccatcgcacaagtgaaagatgtgtacgtggtaacagatcagattcctgtgtttgtgactatgttccagaagaacgatcgaaattcatccgacgaaaccttcctcaaagatctccccattatgtttgatgtcctgattcatgatcctagccacttcctcaattattctaccattaactacaagtggagcttcggggataatactggcctgtttgtttccaccaatcatactgtgaatcacacgtatgtgctcaatggaaccttcagccttaacctcactgtgaaagctgcagcaccaggaccttgtccgccaccgccaccaccacccagaccttcaaaacccaccccttctttaggacctgctggtgacaaccccctggagctgagtaggattcctgatgaaaactgccagattaacagatatggccactttcaagccaccatcacaattgtagagggaatcttagaggttaacatcatccagatgacagacgtcctgatgccggtgccatggcctgaaagctccctaatagactttgtcgtgacctgccaagggagcattcccacggaggtctgtaccatcatttctgaccccacctgcgagatcacccagaacacagtctgcagccctgtggatgtggatgagatgtgtctgctgactgtgagacgaaccttcaatgggtctgggacgtactgtgtgaacctcaccctgggggatgacacaagcctggctctcacgagcaccctgatttctgttcctgacagagacccagcctcgcctttaaggatggcaaacagtgccctgatctccgttggctgcttggccatatttgtcactgtgatctccctcttggtgtacaaaaaacacaaggaatacaacccaatagaaaatagtcctgggaatgtggtcagaagcaaaggcctgagtgtctttctcaaccgtgcaaaagccgtgttcttcccgggaaaccaggaaaaggatccgctactcaaaaaccaagaatttaaaggagtttcttaaatttcgaccttgtttctgaagctcacttttcagtgccattgatgtgagatgtgctggagtggctattaacctttttttcctaaagattattgttaaatagatattgtggtttggggaagttgaattttttataggttaaatgtcattttagagatggggagagggattatactgcaggcagcttcagccatgttgtgaaactgataaaagcaacttagcaaggcttcttttcattattttttatgtttcacttataaagtcttaggtaactagtaggatagaaacactgtgtcccgagagtaaggagagaagctactattgattagagcctaacccaggttaactgcaagaagaggcgggatactttcagctttccatgtaactgtatgcataaagccaatgtagtccag

SEQ ID NO: 129362 - DNA, 1683 bp, Artificial Sequence
  derived and/or modified sequence
atggagtgcctctactactttctcggatttctgctgctggcagctcgactacccctggacgcagccaaaagatttcacgatgttctgggtaacgagcgccctagcgcttatatgcgggagcacaatcagctgaacggatggtccagtgacgaaaacgattggaatgagaaactttaccccgtgtggaaaaggggcgacatgcggtggaagaactcctggaaaggaggacgcgttcaagctgttcttacttcagatagccctgcacttgtggggtccaatatcacgttcgccgtgaacctcattttcccaaggtgccaaaaagaggatgcaaatggtaacattgtatacgagaagaactgtcgcaacgaggcaggtctgagcgcagacccttacgtgtacaattggaccgcatggtctgaagattctgatggcgagaatggcaccggtcagagtcatcacaatgtgttcccagatggaaagcctttcccacatcaccccggatggcgcagatggaattttatctacgttttccatacactgggtcaatactttcaaaagctcggcaggtgtagcgtccgcgtaagtgtaaacacagcaaatgtcacgctgggcccacagcttatggaagtcactgtgtacagacgccatggccgggcctatgtgcctattgcacaggtgaaggacgtgtatgtggttacagaccaaattccagtgtttgtgacaatgttccagaaaaacgaccgcaattcttctgatgaaaccttcctgaaagacctccccatcatgttcgacgttcttattcacgacccaagtcactttctaaactacagtacaataaactacaagtggtcatttggcgataacaccggcctgtttgtttctaccaaccacacagtcaaccacacttatgttttgaacgggacattttcattaaacctcaccgtcaaggctgctgctccgggcccctgtccaccacctccacctccccccagacccagcaaacctactccttctctgggtcccgcaggagacaatccgctggagctgtcgcgtatcccagatgaaaattgtcagatcaaccgctatggccacttccaggctaccattactatagtagaaggcatactggaagtgaatattatccagatgacagatgtgctaatgccagtgccgtggcctgaatcttccctgatcgactttgtggtgacctgccagggctctatccctactgaagtttgtacaattatttccgaccccacatgtgagattactcagaatacagtttgctcacccgtggatgtggacgaaatgtgtttgctgaccgtccgcagaacttttaacggctccggcacctactgtgtaaatttgaccttgggcgacgacacctcactggcacttacgagtacactgattagtgtcccagacagggatccagcaagccccctaaggatggctaattccgcgctcattagtgttggctgcctagccatctttgtcactgtgatcagcttgctggtctacaagaagcacaaggaatataatccaatcgagaatagccccggaaatgtagtccgcagcaaaggattaagtgtgtttctcaatagagcgaaagccgtgttctttcctgggaatcaggaaaaagacccactgctcaagaaccaggagttcaagggcgtgagttag

SEQ ID NO: 129363 - DNA, 1386 bp, Artificial Sequence
  derived and/or modified sequence
atggagtgtttatattattttttggggtttctcctcttggcagcccgtcttcctctagatgccgcaaaacaggccggtctgtctgcggacccttatgtatacaactggaccgcatggtcagaggacagcgacggtgagaatggtaccgggcaatctcaccataatgtattccccgacgggaaaccgttcccacaccaccctggatggaggaggtggaactttatatatgtttttcacaccctgggacaatactttcagaaactggggagatgttccgttcgagtttccgtgaacacagccaacgtcacactgggaccacagttaatggaggttaccgtatacaggcgtcacggcagggcatatgttcctatcgcacaggttaaggacgtatacgttgttaccgatcaaatccctgtgttcgtgacaatgtttcagaaaaatgacaggaactcctctgatgagactttccttaaagaccttccgatcatgttcgatgtgctgattcacgacccatctcatttcctcaactattccactatcaattataagtggtcatttggcgataatacgggcctttttgtctccacaaatcataccgtcaaccatacatacgtccttaacggcacgttcagcctcaacttgacagtgaaagccgcggcacctggtccatgccctccccccccccctcctccgagacctagtaaacctaccccttctctggggcctgctggtgataatccactggagctcagccggattccagatgagaattgccagatcaaccgttacggtcacttccaggccacaattacaatcgtggagggtatcttggaagttaatatcattcagatgaccgatgtacttatgccggtcccctggccagaaagctccctcatcgactttgtagtcacctgtcagggcagcattccgacagaagtttgcactataattagcgacccaacctgtgaaattacacagaataccgtgtgctccccggtggacgtggacgagatgtgcctgctaaccgtccgcaggacattcaatggatccggaacctactgcgtgaaccttacgttgggcgatgatacaagtcttgcccttacatccacgctgatctccgtgccagaccgggatcctgcctcgccgcttcggatggccaacagtgccctcatctcggtaggatgtctggccattttcgtcaccgtgattagcctgctggtgtacaagaaacacaaagagtacaaccccatcgaaaacagtcccggaaacgtggtaaggagcaagggcctgtcagtttttctgaaccgtgctaaggccgttttttttccgggaaatcaggagaaggaccctttgctcaagaaccaggaatttaagggagtgtcatag

SEQ ID NO: 129364 - DNA, 1683 bp, Artificial Sequence
  derived and/or modified sequence
atggagtgcctgtactacttcctgggcttcctgctgctggccgcccggctgcccctggatgctgccaagcgcttccatgatgtgctgggcaatgaaagaccttctgcctacatgagggagcacaaccagctgaatggctggagcagtgatgaaaatgactggaatgagaagctgtaccctgtgtggaagagaggagacatgcgctggaagaacagctggaagggcggccgggtgcaggccgtgctgaccagtgacagccctgccctggtgggcagcaacatcacctttgctgtgaacctgatcttcccccgctgccagaaggaggatgccaatggaaacatcgtgtatgagaagaactgcagaaatgaggccggcctgtctgctgacccctacgtgtacaactggacagcctggagcgaggacagtgatggagaaaatggcaccggccagagccaccacaacgtgtttcctgatggcaagcccttcccccaccaccctggctggaggcgctggaacttcatctacgtgttccacaccctgggccagtacttccagaagctgggccgctgcagcgtgcgggtgtctgtgaacacagccaacgtgaccctgggcccccagctgatggaggtgacagtgtaccgccgccacggccgggcctacgtgcccatcgcccaggtgaaggatgtgtatgtggtgacagaccagatccctgtgtttgtgaccatgttccagaagaatgacaggaacagcagtgatgagaccttcctgaaggacctgcccatcatgtttgatgtgctgattcatgaccccagccacttcctgaactacagcaccatcaactacaagtggagctttggagacaacacaggcctgtttgtgtccaccaaccacacagtgaaccacacctacgtgctgaatggcaccttcagcctgaacctgactgtgaaggccgccgcccctggcccctgccccccacctcctcctccaccccggcccagcaagcccacccccagcctgggccctgctggggacaaccccctggagctgagccgcatcccagatgagaactgccagatcaacagatatggccacttccaggccaccatcaccatcgtggagggcatcctggaggtgaacatcatccagatgacagatgtgctgatgcctgtgccctggccagagagcagcctgattgactttgtggtgacctgccagggcagcatccccacagaggtgtgcaccatcatcagtgaccccacctgtgagatcacccagaacacagtgtgcagccctgtggatgtggatgagatgtgcctgctgactgtgcggaggaccttcaatggaagtggcacctactgtgtgaacctgaccctgggagatgacaccagcctggccctgaccagcaccctcatctctgtgcctgaccgggaccctgccagccccctgaggatggccaacagcgccctgatctctgtgggctgcctggccatctttgtgaccgtcatcagcctgctggtgtacaagaagcacaaggagtacaaccccatcgagaacagccctggaaatgtggtgcgcagcaagggcctgagcgtcttcctgaacagagccaaggctgtgttcttccctggcaaccaggagaaggaccccctgctgaagaaccaggagttcaagggcgtgtcctag

SEQ ID NO: 129365 - DNA, 1386 bp, Artificial Sequence
  derived and/or modified sequence
atggagtgcctgtactacttcctgggcttcctgctgctggccgcccggctgcccctggatgctgccaagcaggccggcctgtctgctgacccctacgtgtacaactggacagcctggagcgaagattctgatggagaaaatggaacaggccagagccaccacaacgtgtttcctgatggcaagcccttcccccaccaccctggctggaggcgctggaacttcatctacgtgttccacaccctgggccagtacttccagaagctgggccgctgcagcgtgcgggtgtctgtgaacacagccaacgtgaccctgggcccccagctgatggaggtgacagtgtacagaagacatggccgggcctacgtgcccatcgcccaggtgaaggatgtgtatgtggtgacagaccagatccctgtgtttgtgaccatgttccagaagaatgacaggaacagcagtgatgagaccttcctgaaggacctgcccatcatgtttgatgtgctgattcatgaccccagccacttcctgaactacagcaccatcaactacaagtggagctttggagacaacacaggcctgtttgtgtccaccaaccacacagtgaaccacacctacgtgctgaatggcaccttcagcctgaacctgactgtgaaggctgctgcccctggcccctgccccccacctcctcctccaccccggcccagcaagcccacccccagcctgggccctgctggggacaaccccctggagctgagccgcatcccagatgagaactgccagatcaacagatatggccacttccaggccaccatcaccatcgtggagggcatcctggaggtgaacatcatccagatgacagatgtgctgatgcctgtgccctggccagagagcagcctgattgactttgtggtgacctgccagggcagcatccccacagaggtgtgcaccatcatcagtgaccccacctgtgagatcacccagaacacagtgtgcagccctgtggatgtggatgagatgtgcctgctgactgtgcggaggaccttcaacggcagcggcacctactgtgtgaacctgaccctgggagatgacaccagcctggccctgaccagcaccctcatctctgtgcctgaccgggaccctgccagccccctgaggatggccaacagcgccctgatctctgtgggctgcctggccatctttgtgaccgtcatcagcctgctggtgtacaagaagcacaaggagtacaaccccatcgagaacagccctggaaatgtggtgcgcagcaagggcctgtctgtgttcctgaacagagccaaggctgtgttcttccctggcaaccaggagaaggaccccctgctgaagaaccaggagttcaagggcgtgtcctag

SEQ ID NO: 129366 - DNA, 1683 bp, Artificial Sequence
  derived and/or modified sequence
atggagtgcctgtactacttcctgggcttcctgctgctggccgccagattaccactggacgccgcgaaaaggttccatgatgtcttggggaacgagcgcccttcagcctacatgcgggaacataaccagctgaatggttggagttccgatgagaatgattggaacgagaagttataccccgtttggaaaaggggcgatatgcgttggaaaaatagctggaaaggtggcagagtgcaggccgttctgacaagcgattcaccagctctggtgggatccaacataacctttgctgtcaacctcatcttccccagatgtcaaaaggaagacgctaacggcaacattgtttatgaaaaaaattgtcggaatgaagctggtctgagcgctgatccctacgtgtacaactggactgcatggtctgaggacagcgatggagagaatggtacagggcagagccatcataacgtttttccagatggcaaacccttccctcaccacccagggtggaggcgatggaatttcatttacgttttccacacccttggtcaatacttccaaaagctcggccgctgctccgtgcgcgtgagcgtgaacaccgccaacgtcacgctgggcccgcagttaatggaggtaactgtgtatcgtcgacacggccgggcatatgtgccaatcgctcaggtgaaggacgtctatgtcgtgaccgaccagattcctgtcttcgtaaccatgtttcagaaaaacgaccgtaacagtagcgacgaaacgtttctaaaagacttaccaattatgttcgacgttctcatccatgacccctcccacttcttaaactatagtacaattaattacaaatggagtttcggcgataatactggcctgttcgtcagtactaaccacacggtgaaccacacatatgtactgaacgggacgttcagtctcaacctcacagtgaaggccgccgcaccaggcccttgtccacctccaccgcccccacctcgaccttccaaaccaacccctagtttgggcccagctggggataatccactggagttgtcgaggatccctgatgagaattgccagatcaaccgatacggacatttccaggccaccattacaatcgtcgaaggcattcttgaggtaaacatcatccagatgactgatgtgcttatgcctgtgccttggcctgaatcttcgcttatcgattttgtagtaacctgtcaggggtccattcctaccgaggtgtgcacaataataagcgatcccacgtgcgagataacccaaaacaccgtgtgcagtcccgtggacgtggatgaaatgtgtctgttgactgtacggcggaccttcaacggaagcggtacatactgcgtaaatctcacacttggtgacgacaccagtctggccctgacatccaccctcatcagcgtgcccgatagggaccctgcgtcgcctctgcggatggctaacagtgctcttattagtgtggggtgcctggccatctttgtgaccgtaatctccttgctggtatacaagaagcacaaggagtataaccccatcgaaaactcccccgggaacgtggtaaggtcaaagggtctgtcggtgtttttaaatagggccaaagcggtctttttcccaggcaaccaagaaaaggatcccctgctcaaaaatcaggagttcaaaggcgtaagttag

SEQ ID NO: 129367 - DNA, 1386 bp, Artificial Sequence
  derived and/or modified sequence
atggagtgcctgtactacttcctgggcttcctgctgctggccgcccgcctacccctagacgccgccaagcaagccggactctccgccgatccttacgtctataactggactgcatggagcgaggacagcgatggcgagaatgggacaggacagtcacatcacaacgtgtttcccgacgggaaacccttccctcaccacccaggctggcgtagatggaatttcatctatgtgtttcacacactggggcaatactttcaaaaactgggtcgctgctctgtgagggtctccgtcaacacagcaaatgttactctgggcccgcaattgatggaagttactgtgtaccgaagacatgggcgtgcctacgtgcctatcgcccaagtgaaggacgtctacgttgtgacggaccagatccctgtgttcgtgacaatgttccagaagaacgaccgcaatagcagcgatgagacatttttgaaggacctgcctatcatgttcgatgtgctcatccacgatccctcccattttttaaattacagcacaattaattataagtggtcctttggtgataacaccgggttgtttgtgagtacaaatcacaccgtgaatcacacatatgtgcttaacggcacgttcagtctgaacctgacagtcaaggcagccgcaccgggaccttgcccaccacctcctccacctccacgtccttcgaagccgaccccctctctcggccccgccggggataaccctctagaactctcacggatccctgacgagaattgtcagattaatcgctacggccactttcaggccacaatcaccatcgtggaaggaattctcgaggtgaatataattcagatgaccgacgtgcttatgccagtgccctggccagagagcagtttgatcgatttcgtggttacctgccaaggcagcattccaaccgaggtgtgtactatcatctcggaccctacgtgtgaaatcactcagaacactgtctgctctcccgtggacgtcgatgagatgtgcctgcttactgtacggcgaacctttaatggtagcggcacatattgtgtaaacttaacattgggcgatgacacgagtcttgctctgactagcactcttatctcagtgccggaccgagatcctgcctcacctctgaggatggccaattctgccctgatctctgttgggtgcttggcaatcttcgtcacagtgatttctcttttggtgtataagaagcacaaggagtataatccaattgaaaacagcccagggaatgtggtgaggtccaagggcctttccgttttcctgaaccgggccaaggctgtgttctttccaggcaaccaggagaaagaccctcttctgaagaatcaggagttcaagggggtctcatag

SEQ ID NO: 129368 - DNA, 1683 bp, Artificial Sequence
  derived and/or modified sequence
atggagtgtctttactactttttgggcttcctattactggcggcaaggttgcccctcgacgcagccaaacgctttcacgatgtgctcggcaatgaaaggccatccgcctatatgcgggaacataatcaattgaacggctggtcatcagatgagaacgattggaacgagaagctgtatcctgtatggaaacggggtgatatgcgctggaagaatagttggaagggcggaagggtgcaggcagtcctcacctcagacagcccagctctggttgggtcaaacattaccttcgccgtcaatctgatttttccaaggtgccagaaggaagatgctaatggtaacattgtctatgagaaaaactgccgcaatgaggccggtctttcagccgacccatacgtctataattggactgcgtggtccgaggactcagatggggagaatggtacgggccaatcccaccataacgttttccccgacgggaagccttttccccaccacccaggctggcgacgatggaatttcatctacgttttccatacgcttggccagtactttcaaaagcttgggagatgttccgttagagtaagcgtgaacacggcaaatgtcactcttggtccacagcttatggaggtcaccgtctatcgacgccacggtcgcgcatacgtccccatcgctcaggttaaggacgtttacgtagttactgaccagatcccggttttcgtgacgatgttccagaagaacgatcgaaatagcagcgatgagaccttcctgaaagatctgcctatcatgtttgacgtactgatacatgaccccagccactttctaaactattctacaataaattacaaatggtcattcggggataacactggcctcttcgtctctactaatcacactgtgaaccacacctacgtccttaacgggacattcagcctaaacctgaccgtcaaggccgctgctccagggccttgcccccctccacctccccctccccgtcccagcaagcccacaccgtcactcggtccagccggagataaccccctggaacttagtcgcattcctgacgagaactgccagattaataggtacggccatttccaagccactatcaccatagtggagggaatactggaagtgaacattatccagatgacagatgtcctgatgccagtaccgtggcccgaaagcagtctgattgatttcgttgtgacctgtcaaggctccattcccacggaggtgtgcacaattattagtgatcctacgtgcgaaattacccagaacacagtgtgctcccccgtggatgtggacgagatgtgtctcctgactgttcgcagaacattcaacggttccggaacatattgtgtaaatttgaccttgggtgatgataccagcctggccctcacttctaccctcatctccgttcccgatcgtgatcccgcttctcctctgcgtatggcaaacagcgccctgattagcgtgggctgtctcgcgatatttgttacggtgatatcactgctggtgtataaaaagcacaaggaatataatccgatagagaactctcctggcaatgtcgtgaggagcaaaggcctcagcgtgttcctcaaccgagccaaagctgtgtttttcccaggaaaccaagagaaggacccactactgaagaaccaggaatttaagggggtgagctag

SEQ ID NO: 129369 - DNA, 1386 bp, Artificial Sequence
  derived and/or modified sequence
atggagtgcttgtactactttcttggcttcttgttgctggctgcaagactccctctggatgccgctaagcaggctggattgtcagcggatccgtacgtctacaactggaccgcttggtcggaagatagcgacggtgagaacggcactggccagtcccaccacaacgtatttccggatgggaagccattcccgcaccatcctggctggcgacgctggaactttatttatgtattccataccctcggccagtatttccaaaagcttggaaggtgttccgttagagtaagtgtgaataccgccaatgtgactcttgggcctcagcttatggaggtgactgtatatagaaggcatggacgagcatacgtcccaatagcccaggtgaaagacgtatatgtggtaactgatcaaataccagtatttgtgacgatgtttcaaaagaacgacagaaactcttccgacgaaacattcttaaaagacttgccgatcatgtttgatgtgctgatccacgacccttcgcattttcttaattattcaaccatcaattacaagtggtccttcggcgataatacagggctatttgtctctactaaccatacagtcaatcacacatacgtgctcaatggcaccttctccctgaaccttacggtgaaggccgcagcccctgggccttgccctccgccaccaccccctccacggccatctaaaccaacgcctagcttgggaccggcaggcgacaacccactggaattgtcaagaattcctgatgagaactgccagatcaatcgctatggacattttcaggctacaatcacaatcgtggaggggatactggaggtgaacattatccagatgactgatgtgctgatgcccgtgccctggcctgagtcatccttaattgactttgtcgtgacatgccagggctccatacctacagaggtctgcaccataatctcggacccgacatgcgagattacccagaatacagtgtgctccccggttgatgtcgacgagatgtgtttactgacagtacgcaggactttcaacgggtcgggtacgtattgtgtgaatctgacactcggagacgacacttctctcgccctcacctccacgcttatttccgttcctgaccgggacccagcgagtcctttgcgaatggccaactcggccttgatctcggtcggctgtttggccattttcgtgaccgtgataagtctactggtctataaaaaacacaaggagtacaatcctatcgaaaactctcctgggaatgtggtgaggtcaaaaggactgtctgtcttcttgaaccgcgcaaaagctgtgttcttccctggaaaccaagagaaggacccactactcaagaatcaggaatttaagggcgtgagctag

SEQ ID NO: 129370 - protein, 390 aa, Artificial Sequence
  derived and/or modified sequence
MPSKSLSNLSVTTGANESGSVPEGWERDFLPASDGTTTELVIRCVIPSLYLLIITVGLLGNIMLVKIFITNSAMRSVPNIFISNLAAGDLLLLLTCVPVDASRYFFDEWMFGKVGCKLIPVIQLTSVGVSVFTLTALSADRYRAIVNPMDMQTSGALLRTCVKAMGIWVVSVLLAVPEAVFSEVARISSLDNSSFTACIPYPQTDELHPKIHSVLIFLVYFLIPLAIISIYYYHIAKTLIKSAHNLPGEYNEHTKKQMETRKRLAKIVLVFVGCFIFCWFPNHILYMYRSFNYNEIDPSLGHMIVTLVARVLSFGNSCVNPFALYLLSESFRRHFNSQLCCGRKSYQERGTSYLLSSSAVRMTSLKSNAKNMVTNSVLLNGHSMKQEMAL

SEQ ID NO: 129371 - DNA, 1173 bp, Artificial Sequence
  derived and/or modified sequence
atgccgtcaaagtctctcagcaatctgtccgtaacaactggcgcaaatgagagcggctctgtccccgaaggttgggaacgcgatttccttcccgccagtgacggcaccactacagagctggtcatcaggtgtgttattccctcactctacctgttgatcataacagtggggctgctcggaaacatcatgctagtcaagatttttattactaattcagccatgaggtcggtgccaaacatctttatctccaacctcgctgcgggcgatctgctgctgctcctaacctgcgtgccagtagacgcctctcggtacttctttgatgaatggatgttcggaaaggttggatgcaaactgatcccagtcatacaactcacctctgtgggagtgagtgtattcaccctgaccgctctgagcgcagatcggtacagagcgatcgtgaatccaatggatatgcagaccagcggcgcactgctgagaacatgcgtaaaggccatgggcatctgggtcgtatccgttttgttggcagtgcctgaagctgtgttctccgaagtggcccggatttcttccctcgataacagctctttcaccgcgtgtataccttacccccagactgatgaactgcaccccaagatacactctgtgttaattttccttgtgtactttctgatccctctggccatcatctccatttattactatcacatcgctaaaacactcatcaagagcgcacacaacctccctggagagtataacgagcacactaagaaacagatggaaacaagaaagcgattagcaaaaattgtgctggtgtttgtggggtgcttcattttttgttggttccccaatcacatcctgtatatgtatcgctcattcaattacaacgaaatcgacccttcactgggccatatgattgttaccttagtggcacgggtactcagctttggaaatagttgcgtaaatcctttcgccttgtaccttctctcagaaagctttaggcgccatttcaattctcagctgtgctgcggccgcaaatcgtatcaggaacgcggaacttcttacctcctgagctccagtgctgtgagaatgacttcactgaaatctaatgccaagaatatggtgactaatagcgtgctgctcaatgggcactcaatgaaacaggaaatggccctatag

SEQ ID NO: 129372 - DNA, 1173 bp, Artificial Sequence
  derived and/or modified sequence
atgcccagcaagagcctgagcaacctgtctgtgaccactggagccaatgaaagtggctctgtgcctgagggctgggagcgggacttcctgcctgccagtgatggcaccaccacagagctggtgatccgctgcgtcatccccagcctgtacctgctgatcatcaccgtgggcctgctgggcaacatcatgctggtgaagatcttcatcaccaacagcgccatgaggtctgtgcccaacatcttcatcagcaacctggccgccggggacctgctgctgctgctgacctgtgtgcctgtggatgccagccgctacttctttgatgagtggatgtttgggaaggtgggctgcaagctgatccctgtgatccagctgacctctgtgggcgtgtctgtgttcaccctgacagccctgtctgctgaccgctaccgggccatcgtgaaccccatggacatgcagaccagcggggccctgctgcggacctgtgtgaaggccatgggcatctgggtggtgtctgtgctgctggccgtgcctgaggccgtgttcagcgaggtggcccgcatcagcagcctggacaacagcagcttcaccgcctgcatcccctacccccagacagatgagctgcaccccaagatccacagcgtgctgatcttcctggtgtacttcctgatccccctggccatcatcagcatctactactaccacatcgccaagaccctcatcaagagcgcccacaacctgcctggagagtacaatgagcacaccaagaagcagatggagaccaggaagaggctggccaagatcgtgctggtgtttgtgggctgcttcatcttctgctggttccccaaccacatcctgtacatgtaccgctccttcaactacaatgaaattgaccccagcctgggccacatgattgtgaccctggtggcccgggtgctgagctttggaaacagctgtgtgaacccctttgccctgtacctgctgtctgagagcttccgccgccacttcaacagccagctgtgctgcggcaggaagagctaccaggagcggggcaccagctacctgctgagcagcagcgctgtgaggatgaccagcctgaagagcaatgccaagaacatggtgaccaacagcgtgctgctgaatggccacagcatgaagcaggagatggccctgtag

SEQ ID NO: 129373 - DNA, 1173 bp, Artificial Sequence
  derived and/or modified sequence
atgcccagcaagagcctgagcaacctgagcgtgaccaccggcgccaatgagagtgggagcgttcccgaaggatgggagcgggattttctgccagccagcgatggaactaccactgagctcgtgatcaggtgcgtgataccgtccctatatctattgataatcacagtaggactgttggggaatatcatgctcgtaaaaatctttatcaccaactcagcgatgagaagcgttcccaacatatttatcagtaatttggctgctggagatctcctcctcctcctgacgtgtgtccccgtggatgcctccagatactttttcgatgagtggatgttcggcaaggtcggctgtaaactgataccggtgatccagctgacctctgtcggagtgtccgtcttcaccctgaccgcactctctgctgaccggtaccgcgcaatcgtaaatccgatggacatgcaaacttcaggagcactgctgagaacatgtgttaaggcaatgggcatctgggttgtgagcgtgctgctggccgttccggaagccgtgttcagcgaggtggcccggatcagtagtctggataattctagcttcacagcttgcatcccatacccccaaaccgacgagcttcatcctaagatacactctgtgttgatatttctggtgtatttccttatcccgttggccattatctccatatattactaccacatagcaaaaaccctgatcaaatccgcgcataatctgccaggcgagtacaacgagcacactaaaaaacaaatggagacgcgcaaaagactggcaaaaatcgtgctagtttttgttggatgtttcatcttctgctggttccccaaccatatcttgtatatgtaccgcagctttaactacaacgagattgacccctccctagggcacatgatagtgaccctcgtggcgagagtgctcagcttcggaaattcttgtgttaacccctttgccttgtacctgctgagtgaatccttcaggaggcacttcaatagccagctgtgttgcggtcgcaaaagctaccaagagagaggcacctcatatctactgagcagcagcgccgtgaggatgacaagtctgaaatccaacgccaagaacatggtgaccaattcagtacttctcaacggacactccatgaagcaagagatggctctgtag

SEQ ID NO: 129374 - DNA, 1354 bp, Artificial Sequence
  derived and/or modified sequence
gtgctgtgaggcttgccccgcggacagtaaacttgcaggggcgagagggagggacatcgattaaacctaaatcgtgggcgttcagtcctcagggcaccggagcgcgtgaaaactccagcggactctgctggaaaggagatcatgccctctaagtctctttccaacctctcggtgaccaccggcgcgaatgagagcggttccgttcccgaggggtgggaaagggatttcctgccggcctcggacgggaccaccacggagttggtgatccgctgtgtgatcccgtccctctacctgctcatcatcaccgtgggcttgctgggcaacatcatgctggtgaagatcttcatcaccaacagcgccatgaggagcgtccccaacatcttcatctctaacctggcggccggggacttgctgctgctgctcacctgcgtcccggtggacgcctcgcgctacttcttcgacgagtggatgtttggcaaggtgggctgcaaactgatccctgtcatccagctcacttccgtgggggtttccgtgttcactctcactgccctcagcgccgacaggtacagagccatcgttaaccccatggacatgcagacgtcaggggcattgctgcggacctgtgtgaaggccatgggtatctgggtggtctccgtgttgctggcagttcccgaagcggtgttttcagaagtggctcgcatcagtagcttggataatagcagcttcacagcatgtatcccataccctcaaacagatgaattacatccaaagattcattcagtgctcattttcttggtctatttcctcataccacttgctattattagcatttattattatcatattgcaaagaccttaattaaaagcgcacacaatcttcctggagaatacaatgaacataccaaaaaacagatggaaacacggaaacgcctggctaaaattgtgcttgtctttgtgggctgtttcatcttctgttggtttccaaaccacatcctttacatgtatcggtctttcaactataatgagattgatccatctctaggccacatgattgtcaccttagttgcccgggttctcagttttggcaattcttgtgtcaacccatttgctctttacctactcagtgaaagcttcaggaggcatttcaacagccaactctgctgtgggaggaagtcctatcaagagagaggaaccagctacctactcagctcttcagcggtgcgtatgacatctctgaaaagcaatgctaagaacatggtgaccaattctgttttactaaatgggcacagcatgaagcaggaaatggcactgtgattttggccattcaactcactacctggagagaacttagtaa

SEQ ID NO: 129375 - DNA, 1173 bp, Artificial Sequence
  derived and/or modified sequence
atgccttctaagtcactgagtaatctgtcagttactacaggggcaaacgaatcaggttcagtgcccgaaggatgggagagagacttcttgccggcatcagatggcactaccaccgagttagttatcaggtgcgtcatcccctccctctatcttcttataattactgtaggcttgctgggcaacattatgttggtgaaaatctttattaccaattccgctatgagaagtgtgccgaatattttcatcagcaacctggctgctggcgatcttttgcttctgctgacatgtgttcccgtggacgcctcgcggtatttcttcgacgaatggatgttcggcaaagtcgggtgcaagctgattccagtaattcagctgactagtgttggggtgtcggtgtttacactgaccgcgctgagcgccgaccggtatcgcgctatagtaaaccccatggacatgcaaacttctggggctctgttgcggacttgtgttaaagctatgggaatttgggtggttagtgtattgctggccgtcccagaggcagtgttttcagaggtggcacggataagcagcttggacaactcctcatttacagcctgtatcccatatccccagacagacgaactgcatccaaaaatacacagcgtgttaattttcttagtttacttcttgatcccactcgccatcatctccatttactactaccacatagccaaaacactcattaagtccgcccataatctcccaggagaatacaacgagcatacaaagaagcagatggagaccagaaaacgtctggcaaaaatcgtgcttgtgtttgttggatgcttcatcttctgttggttccccaatcacattctgtatatgtaccgctcattcaattacaacgaaattgacccctcgctgggccacatgattgtgaccttagtcgccagggtgctgtcgttcggtaattcctgtgtcaacccttttgccctctacctgctgtcagaatcttttagaaggcacttcaactcccagctttgttgcgggcgtaagtcctatcaagaacgaggcaccagctatctgttgtcctcatcggcagtgagaatgaccagcctgaaaagcaatgcaaaaaacatggtcaccaactcagtgctcctcaatggacacagcatgaaacaagagatggccctgtag

SEQ ID NO: 129376 - DNA, 1173 bp, Artificial Sequence
  derived and/or modified sequence
atgcccagcaagagcctgagcaacctgagcgtgaccaccggcgccaacgagagcggcagcgtgcccgagggctgggagagagacttcctgcccgccagcgacggcaccaccaccgagctggtgatcagatgcgtgatccccagcctgtacctgctgatcatcaccgtgggcctgctgggcaacatcatgctggtgaagatcttcatcaccaacagcgccatgagaagcgtgcccaacatcttcatcagcaacctggccgccggcgacctgctgctgctgctgacctgcgtgcccgtggacgccagcagatacttcttcgacgagtggatgttcggcaaggtgggctgcaagctgatccccgtgatccagctgaccagcgtgggcgtgagcgtgttcaccctgaccgccctgagcgccgacagatacagagccatcgtgaaccccatggacatgcagaccagcggcgccctgctgagaacctgcgtgaaggccatgggcatctgggtggtgagcgtgctgctggccgtgcccgaggccgtgttcagcgaggtggccagaatcagcagcctggacaacagcagcttcaccgcctgcatcccctacccccagaccgacgagctgcaccccaagatccacagcgtgctgatcttcctggtgtacttcctgatccccctggccatcatcagcatctactactaccacatcgccaagaccctgatcaagagcgcccacaacctgcccggcgagtacaacgagcacaccaagaagcagatggagaccagaaagagactggccaagatcgtgctggtgttcgtgggctgcttcatcttctgctggttccccaaccacatcctgtacatgtacagaagcttcaactacaacgagatcgaccccagcctgggccacatgatcgtgaccctggtggccagagtgctgagcttcggcaacagctgcgtgaaccccttcgccctgtacctgctgagcgagagcttcagaagacacttcaacagccagctgtgctgcggcagaaagagctaccaggagagaggcaccagctacctgctgagcagcagcgccgtgagaatgaccagcctgaagagcaacgccaagaacatggtgaccaacagcgtgctgctgaacggccacagcatgaagcaggagatggccctgtag

SEQ ID NO: 129377 - protein, 169 aa, Artificial Sequence
  derived and/or modified sequence
MICLVLTIFANLFPAACTGAHERTFLAVKPDGVQRRLVGEIVRRFERKGFKLVALKLVQASEELLREHYAELRERPFYGRLVKYMASGPVVAMVWQGLDVVRTSRALIGATNPADAPPGTIRGDFCIEVGKNLIHGSDSVESARREIALWFRADELLCWEDSAGHWLYE

SEQ ID NO: 129378 - DNA, 510 bp, Artificial Sequence
  derived and/or modified sequence
atgatttgccttgttttgacaatctttgccaatctttttccagctgcgtgcacgggggcccacgaacgaactttcttggccgtcaaaccagacggagtacagcggcgcttggtgggagagatcgtgaggaggttcgaacgaaagggttttaaactcgtggcgttgaagctcgtgcaggcgagtgaggaactgttgcgcgagcactatgcagaactgagagagcggcctttttacggtcgcctggtcaaatacatggcttcaggacccgtagtggcgatggtctggcagggcctggatgtggtgcgcacgtccagggcactgatcggcgccacaaatcctgccgacgctcccccgggaacaattagaggcgacttctgtattgaagtgggcaagaacctcattcacgggagcgacagcgtcgaaagtgctaggagggaaatcgctctgtggtttcgcgcagacgagctgctgtgttgggaggattctgccggacactggctgtatgagtag

SEQ ID NO: 129379 - DNA, 510 bp, Artificial Sequence
  derived and/or modified sequence
atgatctgcctggtgctgaccatctttgccaacctcttccctgctgcctgcaccggggcccacgagaggaccttcctggccgtgaagccagatggagtgcagaggcggctggtgggggagatcgtgagaagatttgagaggaagggcttcaagctggtggccctgaagctggtgcaggccagcgaggagctgctgcgggagcactacgccgagctgcgggagcggcccttctacggccgcctggtgaagtacatggccagcggccctgtggtggccatggtgtggcagggcctggatgtggtgaggaccagccgggccctgattggagccaccaacccagcagatgcccctcctggcaccatccggggggacttctgcatcgaggtgggcaagaacctgattcatggcagtgacagcgtggagagcgcccggcgggagatcgccctgtggttccgggcagatgagctgctgtgctgggaggacagcgctggccactggctgtatgaatag

SEQ ID NO: 129380 - DNA, 510 bp, Artificial Sequence
  derived and/or modified sequence
atgatctgcctggtgctgaccatcttcgccaacctgttccccgccgcctgtacaggcgcccacgagcgcacatttttggccgtgaagcctgatggagtgcagcgtcggctggtgggggagatcgtacggcgcttcgaacgaaaaggctttaaacttgttgccctgaagctcgtccaggcaagcgaggagctgttgcgagagcactatgcagagctaagagagcgtcccttttacgggcgtctagtaaaatatatggccagtgggcccgtggtcgccatggtgtggcagggactggatgtggtgcgtacgagtcgcgccctgattggtgccacgaacccggccgacgcgccccctggaaccattcgcggggatttctgcattgaggtgggcaagaatctgatccatgggtcagattccgtagaatccgctcgtagggagatcgccctgtggttcagagctgacgagcttctgtgctgggaggattccgctggccactggctatatgaatag

SEQ ID NO: 129381 - DNA, 1014 bp, Artificial Sequence
  derived and/or modified sequence
aggagacttggcctccgcagctgccctccggccccccacggctgccgggttccggggtgcaagtgaagcagcctccccgcggaggccgcagcgccccgaccaggcctctttaagcgcaggccccgccccgggcgccaccgccccgccccgcggatcccgctcccgcaccgccatcatgatctgcctggtgctgaccatcttcgctaacctcttccccgcggcctgcaccggcgcacacgaacgcaccttcctggccgtgaagccggacggcgtgcagcggcggctggtgggcgagattgtgcggcgcttcgagaggaagggcttcaagttggtggcgctgaagctggtgcaggcctccgaggagctgctgcgtgagcactacgccgagctgcgtgaacgcccgttctacggccgccttgtcaagtatatggcctccgggccggtggtggccatggtatggcaggggctggacgtggtgcgcacctcgcgggcgctcatcggagccacgaacccggccgacgccccgcccggcaccatccgcggggatttctgcatcgaggttggcaagaacctgattcacggcagcgactcggtggagagtgcccgccgcgagatcgctctctggttccgcgcagacgagctcctctgctgggaggacagcgctgggcactggctgtatgagtagcccggcagatgcgcgtcacagaggctctcacactccagcctcctccagggcccaggtgggcgggcttctggccccaccccacagcgcttggagcatccctttggacgggctgctgaacatccacctgtctggacgttgcatggagggtggcgcaggcctctccaatccctggcgtacagggtttcctgcccgaggagctgctccaggagcctgcgcggctcgcctggaaacgtgccaggacactgtcctggtgcccagcccaacgtggtccaacgtttttttataataaagtcctcgttttcgtttcgatttgggcccaggaacaggca

SEQ ID NO: 129382 - DNA, 510 bp, Artificial Sequence
  derived and/or modified sequence
atgatttgcctggtgctgacaatctttgccaatctctttcctgcagcttgcacgggtgctcacgagcgtacctttctggctgttaagccagatggggtgcagaggcgcctggtgggtgagatcgtcagacggtttgagcggaaaggatttaaactagtggccttgaagttggtacaggcttccgaagagctgcttcgggagcactacgccgaactgagagagcgcccattctacgggaggctggtaaaatacatggcaagtggaccagtagttgccatggtgtggcaagggctcgatgttgtgcgcacttcacgggctttaataggtgccaccaatcctgcagatgctcctccgggtacgataaggggcgatttctgcatcgaggtggggaagaaccttattcatgggtccgactctgttgagagcgcccgtcgagagatagcattatggtttcgagctgacgaactcctatgttgggaggactccgcaggccactggctgtacgagtag

SEQ ID NO: 129383 - DNA, 510 bp, Artificial Sequence
  derived and/or modified sequence
atgatctgcctggtgctgaccatcttcgccaacctgttccccgccgcctgcaccggcgcccacgagagaaccttcctggccgtgaagcccgacggcgtgcagagaagactggtgggcgagatcgtgagaagattcgagagaaagggcttcaagctggtggccctgaagctggtgcaggccagcgaggagctgctgagagagcactacgccgagctgagagagagacccttctacggcagactggtgaagtacatggccagcggccccgtggtggccatggtgtggcagggcctggacgtggtgagaaccagcagagccctgatcggcgccaccaaccccgccgacgccccccccggcaccatcagaggcgacttctgcatcgaggtgggcaagaacctgatccacggcagcgacagcgtggagagcgccagaagagagatcgccctgtggttcagagccgacgagctgctgtgctgggaggacagcgccggccactggctgtacgagtag

SEQ ID NO: 129384 - protein, 357 aa, Artificial Sequence
  derived and/or modified sequence
MQSVQSTSFCLRKQCLCLTFLLLHLLGQVAATQRCPPQCPGRCPATPPTCAPGVRAVLDGCSCCLVCARQRGESCSDLEPCDESSGLYCDRSADPSNQTGICTAVEGDNCVFDGVIYRSGEKFQPSCKFQCTCRDGQIGCVPRCQLDVLLPEPNCPAPRKVEVPGECCEKWICGPDEEDSLGGLTLAAYRPEATLGVEVSDSSVNCIEQTTEWTACSKSCGMGFSTRVTNRNRQCEMLKQTRLCMVRPCEQEPEQPTDKKGKKCLRTKKSLKAIHLQFKNCTSLHTYKPRFCGVCSDGRCCTPHNTKTIQAEFQCSPGQIVKKPVMVIGTCTCHTNCPKNNEAFLQELELKTTRGKM

SEQ ID NO: 129385 - DNA, 1074 bp, Artificial Sequence
  derived and/or modified sequence
atgcagtccgttcagtccacatccttctgcctcagaaaacagtgtctgtgtcttacctttctgctcctccacttactcggccaggtggcagccacgcaaagatgtcccccacagtgtcctggtagatgcccggccacccctcccacctgcgcacccggtgtgcgagcagtcttagacggttgcagctgttgtcttgtttgtgcacgtcagcgtggcgaaagctgcagtgaccttgaaccctgcgatgagagttctgggctgtactgtgaccgcagtgccgacccctcaaaccagacaggcatttgtactgccgtggagggtgacaattgcgtatttgatggggtgatttacaggtcaggggagaagtttcagccctcttgtaagttccagtgcacatgcagagatggacagataggatgtgttcctcgatgtcaattagatgtcctgctgcccgaacccaattgtccagccccccggaaggtggaagttccaggggagtgttgtgagaaatggatttgcggtcccgacgaggaggactccctgggcgggttaacattggctgcctatcgcccggaggcgacattgggcgtggaggtgagtgactcctccgttaactgtattgaacaaacgaccgaatggaccgcctgcagcaagagttgtgggatggggttttccactcgcgtgacaaaccgcaaccgtcagtgtgagatgctgaagcagaccagactgtgtatggtcagaccttgcgaacaggagcccgaacagcctacagataagaaaggcaaaaagtgtctaaggaccaagaagagcctaaaggccattcatctgcagttcaaaaactgtacatctcttcatacctataaacctcgcttttgcggcgtctgctccgacggtaggtgttgtactccgcacaacactaaaaccatccaggccgaattccagtgctcccctgggcagatcgtgaagaaacctgttatggtgatcggcacttgcacatgtcatactaattgtccaaagaataatgaggctttcctgcaagagttggagcttaagacaacccgaggcaagatgtag

SEQ ID NO: 129386 - DNA, 1074 bp, Artificial Sequence
  derived and/or modified sequence
atgcagagcgtgcagagcaccagcttctgcctgaggaagcagtgcctgtgcctgaccttcctgctgctgcacctgctgggccaggtggccgccacccagcgctgccccccccagtgccccggccgctgcccagccaccccacccacctgtgcccctggggtgcgggctgtgctggatggctgcagctgctgcctggtgtgtgcccggcagagaggagagagctgcagcgacctggagccctgtgatgagagcagcggcctgtactgtgacagatctgctgaccccagcaaccagacaggcatctgcacagctgtggagggggacaactgtgtgtttgatggagtcatctacagaagtggagagaagttccagcccagctgcaagttccagtgcacctgcagagatggccagatcggctgtgtgccccgctgccagctggatgtgctgctgcctgagcccaactgcccagcccccaggaaggtggaggtgcctggagagtgctgtgagaagtggatctgtggcccagatgaggaggacagcctgggcggcctgaccctggccgcctacagacctgaggccaccctgggcgtggaggtgtctgacagctctgtgaactgcatcgagcagaccacagagtggacagcctgcagcaagagctgtggcatgggcttcagcaccagggtgaccaacagaaaccggcagtgtgagatgctgaagcagacccggctgtgcatggtgcggccctgtgagcaggagcctgagcagcccacagacaagaagggcaagaagtgcctgcggaccaagaagagcctgaaggccatccacctgcagttcaagaactgcaccagcctgcacacctacaagccccgcttctgtggggtgtgcagtgatggccgctgctgcaccccccacaacaccaagaccatccaggccgagttccagtgcagccctggccagatcgtgaagaagcctgtgatggtgattggcacctgcacctgccacaccaactgccccaagaacaatgaggccttcctgcaggagctggagctgaagaccacccggggcaagatgtag

SEQ ID NO: 129387 - DNA, 1074 bp, Artificial Sequence
  derived and/or modified sequence
atgcagagcgtgcagagcaccagcttctgcctgcggaagcagtgcctatgtctcacctttctgctgctgcatctgctcggccaggtcgccgccacacagcggtgtcccccgcaatgtccagggcgttgtccagctacacctccaacatgcgcgccaggggttcgcgctgttctcgatggctgctcatgctgcctagtatgcgcccggcagagaggagagagctgcagcgacctggagccttgcgacgagtccagcggcctgtactgcgatcggagtgccgacccctctaatcaaaccggcatctgcacagcagtggagggagataattgcgtgtttgatggcgtgatctatcgttctggcgaaaagtttcagcccagttgtaagtttcaatgtacttgccgcgacggacagatcgggtgcgtgcccaggtgccagctcgatgttttgctgcccgaacctaactgcccggcgccccgcaaggtggaagtgcccggggaatgctgtgagaaatggatttgcggtccagacgaggaagactctttggggggccttactctggctgcctatcgacctgaagccactcttggcgtcgaagtctctgattcctccgttaattgtatcgagcagaccaccgaatggactgcctgttctaaaagctgcggaatgggctttagtactcgagtgaccaacagaaaccgccagtgtgagatgttgaagcagacacgactctgcatggtaaggccgtgtgaacaggaaccagaacagcctacagataagaagggtaagaaatgcctgcgaacgaagaagtcactgaaggcgatacatctgcagtttaaaaactgtacctcattacatacttataaaccgcgcttctgcggcgtgtgttctgatggacggtgttgtactccacacaacactaagactatccaggccgagttccagtgttctcccggccaaatcgtaaagaagcccgtcatggtgatcggaacctgcacgtgtcatactaattgccctaaaaacaatgaggccttcctgcaggaactagagctcaaaacaactcgcggaaagatgtag

SEQ ID NO: 129388 - DNA, 2522 bp, Artificial Sequence
  derived and/or modified sequence
acagccaattgccatggcaaccccggggttcgttccacttccccacccagccgatctcccccctcctccctgcactgcagccaaccggcttgtgcgcgtcccaggagcgcgctataaaacctgtgctgggcgtgatcggcaagcaccggaccagggggaaggcgagcagtgccaatctacagcgaagaaagtctcgtttggtaaaagcgagaggggaaagcctgagcatgcagagtgtgcagagcacgagcttttgtctccgaaagcagtgcctttgcctgaccttcctgcttctccatctcctgggacaggtcgctgcgactcagcgctgccctccccagtgcccgggccggtgccctgcgacgccgccgacctgcgcccccggggtgcgcgcggtgctggacggctgctcatgctgtctggtgtgtgcccgccagcgtggcgagagctgctcagatctggagccatgcgacgagagcagtggcctctactgtgatcgcagcgcggaccccagcaaccagactggcatctgcacggcggtagagggagataactgtgtgttcgatggggtcatctaccgcagtggagagaaatttcagccaagctgcaaattccagtgcacctgcagagatgggcagattggctgtgtgccccgctgtcagctggatgtgctactgcctgagcctaactgcccagctccaagaaaagttgaggtgcctggagagtgctgtgaaaagtggatctgtggcccagatgaggaggattcactgggaggccttacccttgcagcttacaggccagaagccaccctaggagtagaagtctctgactcaagtgtcaactgcattgaacagaccacagagtggacagcatgctccaagagctgtggtatggggttctccacccgggtcaccaataggaaccgtcaatgtgagatgctgaaacagactcggctctgcatggtgcggccctgtgaacaagagccagagcagccaacagataagaaaggaaaaaagtgtctccgcaccaagaagtcactcaaagccatccacctgcagttcaagaactgcaccagcctgcacacctacaagcccaggttctgtggggtctgcagtgatggccgctgctgcactccccacaataccaaaaccatccaggcagagtttcagtgctccccagggcaaatagtcaagaagccagtgatggtcattgggacctgcacctgtcacaccaactgtcctaagaacaatgaggccttcctccaggagctggagctgaagactaccagagggaaaatgtaacctgtcactcaagaagcacacctacagagcacctgtagctgctgcgccacccaccatcaaaggaatataagaaaagtaatgaagaatcacgatttcatccttgaatcctatgtattttcctaatgtgatcatatgaggacctttatatctgtcttttatttaacaaaaaatgtaattaactgtaaacttggaatcaaggtaagctcaggatatggcttaggaatgacttactttcctgtggttttattacaaatgcaaatttctataaatttaagaaaacaagtatataatttactttgtagactgtttcacattgcactcatcatattttgttgtgcactagtgcaattccaagaaaatatcactgtaatgagtcagtgaagtctagaatcatacttaacatttcattgtacaagtattacaaccatatattgaggttcattgggaagattctctattggctccctttttgggtaaaccagctctgaacttccaagctccaaatccaaggaaacatgcagctcttcaacatgacatccagagatgactattacttttctgtttagttttacactaggaaacgtgttgtatctacagtaatgaaatgtttactaagtggactggtgtcataaactttctccatttaagacacattgactcctttccaatagaaagaaactaaacagaaaactcccaatacaaagatgactggtccctcatagccctcagacatttatatattggaagctgctgaggcccccaagttttttaattaagcagaaacagcatattagcagggattctctcatctaactgatgagtaaactgaggcccaaagcacttgcttacatcctctgatagctgtttcaaatgtgcattttgtggaattttgagaaaaatagagcaaaatcaacatgactggtggtgagagaccacacattttatgagagtttggaattattgtagacatgcccaaaacttatccttgggccataattatgaaaactcatgatcaagatatatgtgtatacatacatgtatctggtttgtcaggctacaaggtaggctgcaaaattaaatctagacattcttttaatgccaccacacgtgttccgcttctctcttttaaagtatttataaaaatataaattgtacattttgtaaaatattatgtttgatttctctacttgtcatatcactaaataaacacgattttattgc

SEQ ID NO: 129389 - DNA, 1074 bp, Artificial Sequence
  derived and/or modified sequence
atgcaatccgtccaatcaacttcattctgccttcggaagcagtgcctctgcctgacattcctgttgctgcatctgctcggacaggtggcggctacccagcgctgtcctccccaatgtcctggcagatgccccgcaacaccccctacttgtgctcctggagtgcgggctgtgctcgatggttgttcttgctgtctggtgtgcgctcggcagcgtggggagagttgtagcgacctggaaccttgtgacgagagtagcgggctttactgcgaccggagtgcagatccttcaaaccagaccggcatttgtaccgctgtggaaggagacaactgtgtgttcgatggagtgatttacagatctggagaaaaattccagccatcatgcaaatttcaatgcacttgccgggacggccagatcggctgtgtgcctaggtgccagctggacgtgctgctccccgagcctaattgcccggctccacgtaaggtcgaagttcccggagaatgctgtgagaagtggatctgtggccctgatgaggaagacagtctcggagggttgactctcgcggcttacagaccagaagccactctcggggttgaagtctcagattcatcagtgaactgtatcgagcaaacaacagagtggactgcttgcagtaagtcgtgtggcatgggctttagcacgcgagtcaccaaccgaaatcggcaatgcgaaatgctcaaacagacgaggctgtgcatggtccggccatgcgaacaagagcccgagcagcccacagacaagaaagggaaaaagtgtctgcggacgaagaagtctctcaaagctatccatcttcagtttaaaaactgcacgtccctgcatacttataaaccgagattctgcggggtctgctcagacgggagatgttgtactcctcataataccaaaaccatccaggctgaattccaatgttctccaggacagatcgtgaaaaaaccagtgatggtgattggcacctgtacatgccacaccaactgcccgaagaataacgaagctttcctacaggaactagaattaaagacaacaagaggtaaaatgtag

SEQ ID NO: 129390 - DNA, 1074 bp, Artificial Sequence
  derived and/or modified sequence
atgcagagcgtgcagagcaccagcttctgcctgagaaagcagtgcctgtgcctgaccttcctgctgctgcacctgctgggccaggtggccgccacccagagatgccccccccagtgccccggcagatgccccgccaccccccccacctgcgcccccggcgtgagagccgtgctggacggctgcagctgctgcctggtgtgcgccagacagagaggcgagagctgcagcgacctggagccctgcgacgagagcagcggcctgtactgcgacagaagcgccgaccccagcaaccagaccggcatctgcaccgccgtggagggcgacaactgcgtgttcgacggcgtgatctacagaagcggcgagaagttccagcccagctgcaagttccagtgcacctgcagagacggccagatcggctgcgtgcccagatgccagctggacgtgctgctgcccgagcccaactgccccgcccccagaaaggtggaggtgcccggcgagtgctgcgagaagtggatctgcggccccgacgaggaggacagcctgggcggcctgaccctggccgcctacagacccgaggccaccctgggcgtggaggtgagcgacagcagcgtgaactgcatcgagcagaccaccgagtggaccgcctgcagcaagagctgcggcatgggcttcagcaccagagtgaccaacagaaacagacagtgcgagatgctgaagcagaccagactgtgcatggtgagaccctgcgagcaggagcccgagcagcccaccgacaagaagggcaagaagtgcctgagaaccaagaagagcctgaaggccatccacctgcagttcaagaactgcaccagcctgcacacctacaagcccagattctgcggcgtgtgcagcgacggcagatgctgcaccccccacaacaccaagaccatccaggccgagttccagtgcagccccggccagatcgtgaagaagcccgtgatggtgatcggcacctgcacctgccacaccaactgccccaagaacaacgaggccttcctgcaggagctggagctgaagaccaccagaggcaagatgtag

SEQ ID NO: 129391 - protein, 385 aa, Artificial Sequence
  derived and/or modified sequence
MPQNVAKTEPVSILQPQTTVNPDRIKQTLPSSPTTTKSSPSDPMTTSRANQVKIIVPNSTAGLIIGKGGATVKAVMEQSGAWVQLSQKPDGINLQERVVTVSGEPEQNRKAVELIIQKIQEDPQSGSCLNISYANVTGPVANSNPTGSPYANTAEVLPTAAAAAGLLGHANLAGVAAFPAVLSGFTGNDLVAITSALNTLASYGYNLNTLGLGLSQAAATGALAAAAASANPAAAAANLLATYASEASASGSTAGGTAGTFALGSLAAATAATNGYFGAASPLAASAILGTEKSTDGSKDVVEIAVPENLVGAILGKGGKTLVEYQELTGARIQISKKGEFVPGTRNRKVTITGTPAATQAAQYLITQRITYEQGVRAANPQKVG

SEQ ID NO: 129392 - protein, 507 aa, Artificial Sequence
  derived and/or modified sequence
MMAAAPIQQNGTHTGVPIDLDPPDSRKRPLEAPPEAGSTKRTNTGEDGQYFLKVLIPSYAAGSIIGKGGQTIVQLQKETGATIKLSKSKDFYPGTTERVCLIQGTVEALNAVHGFIAEKIREMPQNVAKTEPVSILQPQTTVNPDRIKQTLPSSPTTTKSSPSDPMTTSRANQVKIIVPNSTAGLIIGKGGATVKAVMEQSGAWVQLSQKPDGINLQERVVTVSGEPEQNRKAVELIIQKIQEDPQSGSCLNISYANVTGPVANSNPTGSPYANTAEVLPTAAAAAGLLGHANLAGVAAFPAVLSGFTGNDLVAITSALNTLASYGYNLNTLGLGLSQAAATGALAAAAASANPAAAAANLLATYASEASASGSTAGGTAGTFALGSLAAATAATNGYFGAASPLAASAILGTEKSTDGSKDVVEIAVPENLVGAILGKGGKTLVEYQELTGARIQISKKGEFVPGTRNRKVTITGTPAATQAAQYLITQRITYEQGVRAANPQKVG

SEQ ID NO: 129393 - DNA, 1158 bp, Artificial Sequence
  derived and/or modified sequence
atgcctcagaatgttgccaaaacagagcctgtatctattctgcagccgcaaaccacggttaatcccgatagaataaagcagaccctgccaagttcaccaacaactacgaagtcaagccccagtgacccaatgaccacgagccgggcaaaccaggtgaagataatagtgcccaactccactgcaggactcattataggaaaagggggagccaccgtcaaggcggtaatggagcaatctggggcttgggtccagctctcccagaaacctgacggcatcaatctgcaggagagagtggtgaccgtgagcggggagcccgagcagaaccgcaaagcggtcgagctgataatccaaaagatacaggaagatccccaaagcggcagctgtctaaacatctcttacgcaaatgtgacaggccccgtggctaatagtaaccccaccggaagtccctatgccaataccgcagaagtgctgcccaccgcagccgccgctgccggactgcttgggcacgccaatttggcgggggtggccgcctttccagccgtcctgagtgggttcaccgggaacgacttggtggctataacgagcgctcttaataccctggcttcctacggctataatctgaataccctcgggctagggctgagtcaagccgccgccacaggcgcattggctgccgccgctgccagcgccaatccagcagcagccgccgcaaatttgctggctacttatgcttccgaggcttcagcctccggatcaacagcaggcgggactgccgggactttcgcactcggctcccttgcagctgccaccgccgctaccaatggctatttcggagccgccagccccctggccgcttcggctatactcggaactgagaagtccactgacggttctaaggatgtcgtcgaaatcgctgttccggagaatcttgtgggcgcaatacttggcaagggtggcaagacactggtagagtatcaggagctcaccggcgcccggatccaaataagtaagaagggggaattcgtgcctggaaccagaaatagaaaggtgacaatcacaggaacgccggccgctacccaggctgctcaatatctaattacccaacgaataacttatgagcagggcgtccgtgccgctaatcctcagaaggtcgggtag

SEQ ID NO: 129394 - DNA, 1524 bp, Artificial Sequence
  derived and/or modified sequence
atgatggcggccgctccaatccaacagaatggcacacacactggagtaccaatcgatctcgacccacctgactctcggaaaagacctctagaggccccccccgaagccggatcgaccaagcgcaccaacaccggcgaggatggccagtactttctgaaggtgctaataccatcgtatgcagctggctctatcattgggaaaggaggccagactatagtccagcttcagaaagagaccggtgccacgatcaaattgtccaagtcaaaggacttttacccaggtacgacggaacgagtgtgcttgattcaagggaccgtcgaagcgcttaacgccgtgcacggatttattgccgagaaaattcgagaaatgccgcagaatgtggctaagactgaaccggtttccatactgcagccacagaccaccgtgaatccagatcggatcaaacaaacgttacctagtagccctacaacaacaaaatctagtcccagcgaccctatgacgacgtctcgcgccaaccaagtgaaaatcatcgtgccgaacagcacagcgggcttgattattggaaaggggggggcaacagttaaagctgtcatggagcagtcaggcgcatgggttcaattgtcccaaaaacccgacgggattaatctgcaggaaagagtcgtgacagtgtcaggcgaacccgaacagaacaggaaagccgttgagctgataatacagaaaattcaggaagatccacagtcgggctcttgtcttaatatttcatacgcaaacgtcaccggcccagtggctaactctaacccaacagggagcccctacgccaatactgcggaagtgctccctacagctgctgcagccgctggcctgctaggccatgctaatctggctggcgtcgctgcttttccagccgtgctaagcgggtttactgggaacgacctggtagcaattacaagcgcacttaatactctagcctcatacgggtacaatctcaacacacttggcctcggtctttcacaagcagcggccacgggcgccctggcagcggccgcagccagcgcaaatcccgcagcagccgccgctaacctgctggcaacctatgcctccgaggctagcgcttctggaagcacagcaggggggacagccggtacattcgctctgggttcgctcgcagcagcaacggccgctaccaacggatacttcggggccgccagccccctagctgccagcgctattcttgggactgagaaatcaacggatggtagtaaagacgtggttgagatcgctgtgcccgaaaatctggtcggcgccattcttgggaagggaggcaagactctcgtggagtaccaagagctgaccggagcacgaatccagatcagcaagaaaggcgaattcgtgcccgggactaggaatagaaaggtgacaattacaggcaccccagccgcaacacaagctgcacaatacttgatcacccaaagaatcacatatgagcagggagtcagagcagctaatccccaaaaggtcgggtag

SEQ ID NO: 129395 - DNA, 2021 bp, Artificial Sequence
  derived and/or modified sequence
atgatggcggcagctcccatccagcagaacgggacccacactggggttcccatagacctggacccgccggactcgcggaaaaggccgctggaagccccccctgaagccggcagcaccaagaggaccaatacgggcgaagacggccagtattttctaaaggttctcatacctagttatgctgctggatctataattgggaagggaggacagacaattgttcagttgcaaaaagaaactggagccaccatcaagctgtctaagtccaaagatttttacccaggtgctgacagctgcagaagaaattgtacatggtgctgtacagaaggtatttctccactgtgccatctgcagagtgaaactgactaggagtactacatagactgtactactgagcgagtgtgcttgatccagggaacggttgaagcactgaatgcagttcatggattcattgcagaaaaaattcgagaaatgccccaaaatgtggccaagacagaaccagtcagcattctacaaccccagaccaccgttaatccagatcgcatcaaacaaacattgccatcttccccaactaccaccaagtcctctccatctgatcccatgaccacctccagagctaatcaggtaaagattatagttcccaacagcacagcaggtctgataatagggaagggaggtgctactgtgaaggctgtaatggagcagtcaggggcttgggtgcagctttcccagaaacctgatgggatcaacttgcaagagagggttgtcactgtgagtggagaacctgaacaaaaccgaaaagctgttgaacttatcatccagaagatacaagaggatccacaaagtggcagctgtctcaatatcagttatgccaatgtgacaggtccagtggcaaattccaatccaaccggatctccttatgcaaacactgctgaagtgttaccaactgctgcagcagctgcagggctattaggacatgctaaccttgctggcgttgcagcctttccagcagttttatctggcttcacaggcaatgacctggtggccatcacctctgcacttaatacattagccagctatggatataatctcaacactttaggtttaggtctcagtcaagcagcagcaacaggggctttggctgcagcagctgccagtgccaacccagcagcagcagcagccaatttattggccacctatgccagtgaagcctcagccagtggcagcacagctggtggtacggcggggacatttgcattaggtagcctggctgctgctactgctgcaaccaatggatattttggagctgcttctcccctagctgccagtgccattctaggaacagaaaagtccacagatggatccaaggatgtagttgaaatagcagtgccagaaaacttagttggtgcaatacttggcaaaggagggaaaacattagtggaataccaggagttgactggtgcaaggatacagatctccaaaaaaggagaattcgtacctggcacaaggaatcggaaggtaaccattactggaacaccagctgcaacacaggctgctcaatatttaattacacaaaggatcacatatgagcaaggagttcgggctgccaatcctcagaaagtgggttgagtgccccagttacacatcagattgttttaacccctcctttaccccattttcaagaaggatgtactgtactttgcagaagtgaagtttttctgttattaatatataattatgcaaatgaatgcgactatgttgacaatgtgtatatgtaaataatatgtgttttaccagatgtttcatagaaagaattttttcttgatctgttttgttctctatactttgcttgtgtatatttgtcagaggtgtttctagtgtaagatttaagcctgccattttaccagcattattgtagtttaatgattgaatgtagacagggatatgcgtatagttttcagtattagttctagataacactaaattaactactgttaggttgagtatggtggggtcagtgacct

SEQ ID NO: 129396 - DNA, 3912 bp, Artificial Sequence
  derived and/or modified sequence
ctctcccttctccactctctccccctgtctcctttcttcttcttctttcaccctccgtctctcacaccccctccattcccctgtctcctttctgacactgcactgcagctgctcctcagccctgccccctccccagtgagaacaaaccagcaacattgctttttttcctaaagagatttatattgatccgattaaaaaaaaaaaaccttaagaaaccccaaacgcaaaaaaaaaaaaaaaaaaaaaagaaaaaagaaaagaaaaagccaaaacaaaagggagaaccttctcccggtagcagcggcaggaactgcaaacatgatggcggcagctcccatccagcagaacgggacccacactggggttcccatagacctggacccgccggactcgcggaaaaggccgctggaagccccccctgaagccggcagcaccaagaggaccaatacgggcgaagacggccagtattttctaaaggttctcatacctagttatgctgctggatctataattgggaagggaggacagacaattgttcagttgcaaaaagaaactggagccaccatcaagctgtctaagtccaaagatttttacccaggtactactgagcgagtgtgcttgatccagggaacggttgaagcactgaatgcagttcatggattcattgcagaaaaaattcgagaaatgccccaaaatgtggccaagacagaaccagtcagcattctacaaccccagaccaccgttaatccagatcgcatcaaacaaacattgccatcttccccaactaccaccaagtcctctccatctgatcccatgaccacctccagagctaatcaggtaaagattatagttcccaacagcacagcaggtctgataatagggaagggaggtgctactgtgaaggctgtaatggagcagtcaggggcttgggtgcagctttcccagaaacctgatgggatcaacttgcaagagagggttgtcactgtgagtggagaacctgaacaaaaccgaaaagctgttgaacttatcatccagaagatacaagaggatccacaaagtggcagctgtctcaatatcagttatgccaatgtgacaggtccagtggcaaattccaatccaaccggatctccttatgcaaacactgctgaagtgttaccaactgctgcagcagctgcagggctattaggacatgctaaccttgctggcgttgcagcctttccagcagttttatctggcttcacaggcaatgacctggtggccatcacctctgcacttaatacattagccagctatggatataatctcaacactttaggtttaggtctcagtcaagcagcagcaacaggggctttggctgcagcagctgccagtgccaacccagcagcagcagcagccaatttattggccacctatgccagtgaagcctcagccagtggcagcacagctggtggtacggcggggacatttgcattaggtagcctggctgctgctactgctgcaaccaatggatattttggagctgcttctcccctagctgccagtgccattctaggaacagaaaagtccacagatggatccaaggatgtagttgaaatagcagtgccagaaaacttagttggtgcaatacttggcaaaggagggaaaacattagtggaataccaggagttgactggtgcaaggatacagatctccaaaaaaggagaattcgtacctggcacaaggaatcggaaggtaaccattactggaacaccagctgcaacacaggctgctcaatatttaattacacaaaggatcacatatgagcaaggagttcgggctgccaatcctcagaaagtgggttgagtgccccagttacacatcagattgttttaacccctcctttaccccattttcaagaaggatgtactgtactttgcagaagtgaagtttttctgttattaatatataattatgcaaatgaatgcgactatgttgacaatgtgtatatgtaaataatatgtgttttaccagatgtttcatagaaagaattttttcttgatctgttttgttctctatactttgcttgtgtatatttgtcagaggtgtttctagtgtaagatttaagcctgccattttaccagcattattgtagtttaatgattgaatgtagacagggatatgcgtatagttttcagtattagttctagataacactaaattaactactgttaggttgagtatggtggggtcagtgacctaaaatggagtgaggccaaagcactgtcctgtaagtcttacttcctgcttagggcacagtgaagtaggaaacaatattttgaaaataagttttaaatttaaaatgatcaaaaagcaatatagttgcataaaagcactgtaaaatatttaaaaggttaaaactgtggaaaattatattggtaagtttacagatcaataaaagcacctgttctccatctgaactagacaatggaaataatgctgcatgctggccatggcccattcttcatcatttgtaagttcaacaaaagttctcacatggagtcccacctcttcagaggtttgtacatttgtttttaagcactgaattcactactgatcccatcgcctggccagtagaacagtcattactccattaacatcctcactgtttagacacataactgtggtacagtgtattggaaattttataaacaaaagtgaaagtgccaacaaattattgatagctgataatgtttcattatctgcaactgcttgataagtatgttgcattttaagagcttataattgtgtataatttgttaacactagaaacctattagtattgtgaatgtagattttactgtgaagctatctgtgatttagctgtttgctcccatgatggagtctttgcagcatggcgctagcagccaatgcagtttctaatactcggtaatttgcatgttttgtggagcatttttatgtcaccaaccagacagtatttcctgcatgcttatttagaagaggcagcttatcttgagaggtagtgttatctacctttgtcaggctttttgacaggtcatttcagagtaagcctttgttcccaagacccaacaactgtcaccctcttctgtacctctcctgagtgccaactgtccaggccatttgacacaccatctgttaacctctgagtttgcccactcaaggccactcataggggcatccatccccaagcacctcctcatgctgtgcatgcagtcttaaattcaatggacaaaaataaaatgctggctacctctggatcatctggctgagcaactgaattacaaaagagaattacttccatctcaacttcaacccattgattacgtccatcctagcaagctaaatggcatcccagctgctcctttctgtgcaaccaattaaagaacaatgagtgtgatgctccatgtctgaatttcgtccagcctctctctgaactgtgatctttgtcctcatgaactttcccttttgttcattgaactatatggactcttcatttcatattgatttactgtgcaatttacttttggacattgagaacttgaaattatttcctgatcccttccccttccactattaataattcatttctgtcaaactgtaagagtagactcatttttttttttttagtttttaacattggactgttatttcatttagagttctctatctctaaatatttatttagagaatgattttaaaagggaatgatatgcttgtttaaatgaaagagaaaagctgtagtaaactgtgttaattggtaatgactatttatcgtcgatactctgtagctgtgtaagttttgacaaatagtgtatctcgtggaatcagtggttagcattgccgctattatatttactcattttatcattataaatgtgcttagttcatcatgta

SEQ ID NO: 129397 - DNA, 1158 bp, Artificial Sequence
  derived and/or modified sequence
atgccccagaatgtggccaagacagagcctgtgtccatcctgcagccccagaccaccgtgaacccagaccgcatcaagcagaccctgcccagcagccccaccaccaccaagagcagccccagcgaccccatgaccaccagccgggccaaccaggtgaagatcatcgtgcccaacagcacagctggcctcatcattggaaaaggaggagccaccgtgaaggctgtgatggagcagagcggggcctgggtgcagctgagccagaagccagatggcatcaacctgcaggagcgggtggtgacagtgtctggagagcctgagcagaacaggaaggctgtggagctgatcatccagaagatccaggaggacccccagagcggcagctgcctgaacatctcctatgccaacgtgactggacctgtggccaacagcaaccccaccggcagcccctatgccaacacagctgaggtgctgcccacagctgctgctgctgctggcctgctgggccacgccaacctggccggcgtggccgccttccctgctgtgctgagcggcttcaccggaaatgacctggtggccatcaccagcgccctgaacaccctggccagctatggctacaacctgaacaccctgggcctgggcctgagccaggccgccgccaccggggccctggccgctgctgctgccagcgccaacccagctgctgctgctgccaacctgctggccacctacgccagcgaggccagcgccagcggcagcacagctgggggcacagctggcacctttgccctgggcagcctggccgccgccacagctgccaccaacggctactttggagctgccagccccctggccgccagcgccatcctgggcacagagaagagcacagatggcagcaaggatgtggtggagattgctgtgcctgagaacctggtgggcgccatcctgggcaaaggaggcaagaccctggtggagtaccaggagctgactggagcccgcatccagatcagcaagaagggggagtttgtgcccggcaccaggaacaggaaggtgaccatcaccggcaccccagctgccacccaggccgcccagtacctgatcacccagaggatcacctatgagcagggcgtgcgggccgccaacccccagaaggtgggctag

SEQ ID NO: 129398 - DNA, 1524 bp, Artificial Sequence
  derived and/or modified sequence
atgatggccgccgcccccatccagcagaatggcacccacactggagtgcccatcgacctggaccccccagacagcaggaagaggcccctggaggcccctcctgaggccggcagcaccaagaggaccaacacaggagaagatggccagtacttcctgaaggtgctgatccccagctatgctgctggcagcatcattggaaaaggaggccagaccatcgtgcagctgcagaaggagactggagccaccatcaagctgagcaagagcaaggacttctacccaggcaccacagagcgggtgtgcctgatccagggcaccgtggaggccctgaatgctgtgcacggcttcatcgccgagaagatccgggagatgccccagaatgtggccaagacagagcctgtgtccatcctgcagccccagaccaccgtgaacccagaccgcatcaagcagaccctgcccagcagccccaccaccaccaagagcagccccagcgaccccatgaccaccagccgggccaaccaggtgaagatcatcgtgcccaacagcacagctggcctcatcattggaaaaggaggagccaccgtgaaggctgtgatggagcagagcggggcctgggtgcagctgagccagaagccagatggcatcaacctgcaggagcgggtggtgacagtgtctggagagcctgagcagaacaggaaggctgtggagctgatcatccagaagatccaggaggacccccagagcggcagctgcctgaacatctcctatgccaacgtgactggacctgtggccaacagcaaccccaccggcagcccctatgccaacacagctgaggtgctgcccacagctgctgctgctgctggcctgctgggccacgccaacctggccggcgtggccgccttccctgctgtgctgagcggcttcaccggaaatgacctggtggccatcaccagcgccctgaacaccctggccagctatggctacaacctgaacaccctgggcctgggcctgagccaggccgccgccaccggggccctggccgctgctgctgccagcgccaacccagctgctgctgctgccaacctgctggccacctacgccagcgaggccagcgccagcggcagcacagctgggggcacagctggcacctttgccctgggcagcctggccgccgccacagctgccaccaacggctactttggagctgccagccccctggccgccagcgccatcctgggcacagagaagagcacagatggcagcaaggatgtggtggagattgctgtgcctgagaacctggtgggcgccatcctgggcaaaggaggcaagaccctggtggagtaccaggagctgactggagcccgcatccagatcagcaagaagggggagtttgtgcccggcaccaggaacaggaaggtgaccatcaccggcaccccagctgccacccaggccgcccagtacctgatcacccagaggatcacctatgagcagggcgtgcgggccgccaacccccagaaggtgggctag

SEQ ID NO: 129399 - DNA, 1158 bp, Artificial Sequence
  derived and/or modified sequence
atgccccagaacgtggccaagaccgagcccgtgagcatcctgcagcctcagacaacagtcaatcctgatcgtattaagcaaactctgcccagttctccaactacaacaaagagctctccgtcagaccccatgaccaccagccgagcgaaccaggttaaaatcatcgtgcctaatagcactgccggactaatcatcggcaagggaggcgccaccgtgaaagccgttatggaacagtctggtgcgtgggtccagctgtcacagaagcctgatggaatcaatttacaggaacgcgtcgtgactgtcagcggcgagcccgagcaaaatcggaaggcggtggagctgatcattcagaagattcaggaggaccctcaatctggatcttgcttgaacatctcttacgctaacgtgactgggcctgtggccaattccaatccaactggatctccatacgctaataccgccgaggttctgcccaccgctgccgccgccgcaggacttttgggacatgccaatctggccggcgtggcagcctttccagcggtattgagcggtttcactgggaatgacctggtagctattacctctgcacttaacacactggcgagctacggttataacctcaataccctggggctcggtctctcacaggcagcggccaccggagcgctggccgcagcagccgccagtgctaacccagctgctgctgccgccaatttacttgctacctatgcctcagaagcatcagcttctggatctacagctggtggaactgcaggaacgtttgccttggggtcactggctgccgcaactgcggctaccaacggatatttcggggctgctagccccctggccgcctccgccatcctaggcacagagaagagtaccgacggttccaaagacgttgttgaaatagctgtccctgagaatttggtaggcgccattctgggtaaggggggtaaaaccctggtcgagtatcaagaattgacaggcgcacggattcagatctcgaagaagggggaattcgttccaggcacaaggaaccgaaaggttactattacggggacacctgctgccacacaggcagctcagtatctgattacacagagaatcacgtacgaacagggtgtgagagctgcgaatccacagaaagtcggatag

SEQ ID NO: 129400 - DNA, 1524 bp, Artificial Sequence
  derived and/or modified sequence
atgatggccgccgcccccatccagcagaacggcacccacaccggcgtgcctattgacctcgaccccccagattcacgcaaaaggccactggaagcaccacccgaagctggatcaaccaagcggacgaacacgggagaggacggccagtacttcttgaaggttctaatcccatcctatgctgctggcagcatcattgggaagggcggccagacaattgtgcagttgcagaaggaaaccggggccactataaagctctcgaaatccaaggacttctaccccggaaccacagagagagtgtgtctaatacaggggaccgtagaggcattaaacgccgtgcatgggtttatagctgaaaaaataagagaaatgccacagaacgttgcaaaaacagagccagtcagtatcctccagcctcagaccaccgttaaccctgaccgtatcaagcagactctgcctagcagccctactaccactaaatcttcgccctcagacccaatgaccacaagcagagcaaaccaggtaaagatcatcgtgccaaacagtaccgctggactgataatcggcaagggtggggctacggttaaagccgttatggagcagagtggcgcttgggtgcaactctcacagaagcccgacggcataaatctccaggaacgagttgtaaccgtcagcggggagcccgagcagaatcgcaaagccgtggagcttatcatccaaaaaatccaggaggacccgcagagcgggagttgcctgaatatctcctacgctaacgtgactgggccggtggctaattcgaatccaacaggctccccatacgccaacaccgcagaggtcctgccgacagccgccgcggctgctggtcttttaggacacgctaacctggccggtgtcgctgccttccccgccgtgctcagcgggtttaccggcaatgatctggtagctatcacctctgccctgaatacccttgcgagctatggatataacctgaacactctgggtctcggcctgagccaggcggccgccaccggggccctggccgctgcagcagccagtgccaatcccgctgcggctgccgcgaacctgctggcaacatatgcatctgaagcaagcgctagtgggagtaccgccggcggtactgctggcacatttgccttagggagcctggccgccgctacagcagccactaacggatactttggggcagcctcacctctggctgcctcagctatattgggcactgagaaaagcacagacggttcaaaggacgtagttgaaattgcggtgcctgagaatctcgtcggcgcgatacttggcaagggcgggaaaactctcgttgagtatcaggaactcaccggcgctagaatacagatcagtaagaaaggggagttcgtgccaggcacacgtaatagaaaggtgacaattacgggaacaccagcggcgacccaagctgctcagtacctcattacacagagaattacgtacgagcagggcgtgagggccgcgaaccctcagaaggtcggctag

SEQ ID NO: 129401 - DNA, 1158 bp, Artificial Sequence
  derived and/or modified sequence
atgccacagaacgtggcaaagacagaacccgtgtctatcctgcagcctcagaccacagtcaaccccgatcgcataaaacagaccctcccctctagcccaacgaccaccaagtcatcaccatccgacccaatgaccactagcagggccaatcaggtgaagattattgtgccaaattccactgcaggcctgattattgggaaggggggagcgacagtgaaagctgttatggagcaatcgggcgcatgggtccagctgtctcagaagcccgacggaataaacctacaagagcgggtcgtgaccgtttcgggggagccagaacagaaccgtaaggcagtcgaactgattatccagaagatacaagaagacccacagagcggctcgtgtcttaacattagctacgccaatgtgactgggcctgtggcgaattcaaatcctaccggaagcccctacgccaataccgccgaagtcctaccaacagcagccgctgcagccggactcctgggccacgccaacttggccggagtggctgcatttcctgcagtgctttcaggattcaccggaaacgacctagtggccattaccagtgcacttaacaccctggcaagttatggttacaatcttaatacactgggactggggctaagtcaggctgcagccacgggggcactggccgctgcggcagcttcagcaaacccagccgcagccgcagcgaatcttctggctacctatgccagtgaagcgtccgcctcaggcagtacggcaggaggaacggccggaactttcgctctcgggtctttagcagccgcaaccgcagcgactaacggatactttggagctgcgtcccctctcgctgccagtgctattctcggcacagaaaaatccactgacggatctaaggatgtggtcgagatcgctgtgcctgaaaatttggttggagctatcttgggcaaaggcggtaaaactctcgtggagtaccaggagcttaccggtgcccgaattcaaattagtaagaagggcgaatttgtgccagggactcgcaaccggaaagttaccatcaccggcacacctgccgctacacaggctgctcagtatctgattacgcagcgtattacatacgaacaaggagttcgagccgctaatccgcaaaaagtcggctag

SEQ ID NO: 129402 - DNA, 1524 bp, Artificial Sequence
  derived and/or modified sequence
atgatggctgctgctcccatccagcaaaacggcacgcacacaggagtccctatcgacctggatcctccagattcacgcaagaggccactggaggcccctcctgaggccggaagcacgaagcgcactaacaccggagaggacgggcagtatttcctgaaagtcctgatcccgagttacgcagcgggaagcatcatcgggaagggagggcaaacaattgtgcagctccagaaggagacgggggctacaattaagctatccaagagcaaggatttctaccctgggacaactgagcgggtgtgtctgatccaagggacggtggaggccctcaatgccgtccatgggtttatcgccgagaaaatccgggagatgccgcaaaatgttgcgaagacggaaccagtgtcgattctccagcctcagacgactgtgaatccagacagaatcaagcagaccttgccaagttctccaaccacaactaaatcttctcctagtgaccccatgaccacatccagggctaaccaggtaaaaatcatcgtgccaaattcaaccgcaggactcattattggaaaaggcggtgctacagtgaaagccgtcatggagcagtccggggcatgggtccagttatcacagaaacctgatggaataaacctgcaggagcgggttgtaacggtcagcggtgaacctgagcagaaccgcaaagcggttgagctcattatccaaaagatccaagaagacccgcagtccggttcatgcctgaatataagctatgccaacgtgactggtccagtggccaacagtaaccctaccggcagcccctatgctaataccgccgaggtactgcctaccgctgcagccgctgccggtctactcggccacgcaaaccttgctggtgttgccgctttcccagcagtcctcagtggcttcaccggcaacgacctcgtggcaataacgagcgctctgaacaccctggcgtcttacggttacaacctcaacactctgggtctgggactttcccaagccgctgctacaggggctctggccgctgccgctgctagcgctaatccggctgctgccgcagcgaaccttctcgcgacatatgcaagcgaagccagcgcatcgggatccacagccggtggtaccgccggaactttcgcactgggctcactagctgcagcaactgcagcaaccaatgggtatttcggggcagcatctccccttgcagcctccgccattctgggaacggaaaaatctacggatggctccaaggatgttgtggaaatagccgtgcccgaaaatttagtgggcgcaatcctcggcaagggtgggaagacactggtggaataccaggagttgactggcgctcggatccagatcagtaaaaagggggagttcgtgcctggtacaagaaaccggaaggtgaccataaccgggacacccgcagctacacaggcagcccagtatctgattacacaacgcattacctatgagcagggggtcagggctgctaatccccagaaggttgggtag

SEQ ID NO: 129403 - DNA, 1158 bp, Artificial Sequence
  derived and/or modified sequence
atgccccagaacgtggccaagaccgagcccgtgagcatcctgcagccccagaccaccgtgaaccccgacagaatcaagcagaccctgcccagcagccccaccaccaccaagagcagccccagcgaccccatgaccaccagcagagccaaccaggtgaagatcatcgtgcccaacagcaccgccggcctgatcatcggcaagggcggcgccaccgtgaaggccgtgatggagcagagcggcgcctgggtgcagctgagccagaagcccgacggcatcaacctgcaggagagagtggtgaccgtgagcggcgagcccgagcagaacagaaaggccgtggagctgatcatccagaagatccaggaggacccccagagcggcagctgcctgaacatcagctacgccaacgtgaccggccccgtggccaacagcaaccccaccggcagcccctacgccaacaccgccgaggtgctgcccaccgccgccgccgccgccggcctgctgggccacgccaacctggccggcgtggccgccttccccgccgtgctgagcggcttcaccggcaacgacctggtggccatcaccagcgccctgaacaccctggccagctacggctacaacctgaacaccctgggcctgggcctgagccaggccgccgccaccggcgccctggccgccgccgccgccagcgccaaccccgccgccgccgccgccaacctgctggccacctacgccagcgaggccagcgccagcggcagcaccgccggcggcaccgccggcaccttcgccctgggcagcctggccgccgccaccgccgccaccaacggctacttcggcgccgccagccccctggccgccagcgccatcctgggcaccgagaagagcaccgacggcagcaaggacgtggtggagatcgccgtgcccgagaacctggtgggcgccatcctgggcaagggcggcaagaccctggtggagtaccaggagctgaccggcgccagaatccagatcagcaagaagggcgagttcgtgcccggcaccagaaacagaaaggtgaccatcaccggcacccccgccgccacccaggccgcccagtacctgatcacccagagaatcacctacgagcagggcgtgagagccgccaacccccagaaggtgggctag

SEQ ID NO: 129404 - DNA, 1524 bp, Artificial Sequence
  derived and/or modified sequence
atgatggccgccgcccccatccagcagaacggcacccacaccggcgtgcccatcgacctggacccccccgacagcagaaagagacccctggaggccccccccgaggccggcagcaccaagagaaccaacaccggcgaggacggccagtacttcctgaaggtgctgatccccagctacgccgccggcagcatcatcggcaagggcggccagaccatcgtgcagctgcagaaggagaccggcgccaccatcaagctgagcaagagcaaggacttctaccccggcaccaccgagagagtgtgcctgatccagggcaccgtggaggccctgaacgccgtgcacggcttcatcgccgagaagatcagagagatgccccagaacgtggccaagaccgagcccgtgagcatcctgcagccccagaccaccgtgaaccccgacagaatcaagcagaccctgcccagcagccccaccaccaccaagagcagccccagcgaccccatgaccaccagcagagccaaccaggtgaagatcatcgtgcccaacagcaccgccggcctgatcatcggcaagggcggcgccaccgtgaaggccgtgatggagcagagcggcgcctgggtgcagctgagccagaagcccgacggcatcaacctgcaggagagagtggtgaccgtgagcggcgagcccgagcagaacagaaaggccgtggagctgatcatccagaagatccaggaggacccccagagcggcagctgcctgaacatcagctacgccaacgtgaccggccccgtggccaacagcaaccccaccggcagcccctacgccaacaccgccgaggtgctgcccaccgccgccgccgccgccggcctgctgggccacgccaacctggccggcgtggccgccttccccgccgtgctgagcggcttcaccggcaacgacctggtggccatcaccagcgccctgaacaccctggccagctacggctacaacctgaacaccctgggcctgggcctgagccaggccgccgccaccggcgccctggccgccgccgccgccagcgccaaccccgccgccgccgccgccaacctgctggccacctacgccagcgaggccagcgccagcggcagcaccgccggcggcaccgccggcaccttcgccctgggcagcctggccgccgccaccgccgccaccaacggctacttcggcgccgccagccccctggccgccagcgccatcctgggcaccgagaagagcaccgacggcagcaaggacgtggtggagatcgccgtgcccgagaacctggtgggcgccatcctgggcaagggcggcaagaccctggtggagtaccaggagctgaccggcgccagaatccagatcagcaagaagggcgagttcgtgcccggcaccagaaacagaaaggtgaccatcaccggcacccccgccgccacccaggccgcccagtacctgatcacccagagaatcacctacgagcagggcgtgagagccgccaacccccagaaggtgggctag

SEQ ID NO: 129405 - protein, 492 aa, Artificial Sequence
  derived and/or modified sequence
MEPEAPDSRKRPLETPPEVVCTKRSNTGEEGEYFLKVLIPSYAAGSIIGKGGQTIVQLQKETGATIKLSKSKDFYPGTTERVCLVQGTAEALNAVHSFIAEKVREIPQAMTKPEVVNILQPQTTMNPDRAKQAKLIVPNSTAGLIIGKGGATVKAVMEQSGAWVQLSQKPEGINLQERVVTVSGEPEQVHKAVSAIVQKVQEDPQSSSCLNISYANVAGPVANSNPTGSPYASPADVLPAAAAASAAAASGLLGPAGLAGVGAFPAALPAFSGTDLLAISTALNTLASYGYNTNSLGLGLNSAAASGVLAAVAAGANPAAAAAANLLASYAGEAGAGPAGGAAPPPPPPPGALGSFALAAAANGYLGAGAGGGAGGGGGPLVAAAAAAGAAGGFLTAEKLAAESAKELVEIAVPENLVGAILGKGGKTLVEYQELTGARIQISKKGEFLPGTRNRRVTITGSPAATQAAQYLISQRVTYEQGVRASNPQKVG

SEQ ID NO: 129406 - DNA, 1479 bp, Artificial Sequence
  derived and/or modified sequence
atggaacctgaggctcccgatagtcggaagcgtcccctggagacacctccagaagtggtctgtacaaaacgatctaacactggagaagagggtgagtatttcctgaaggtgttaataccctcatatgccgccgggtccatcatcggtaagggtggccaaacaattgtgcagctccaaaaagaaactggcgctactattaagctttcaaagagcaaggacttctaccctgggaccacagaaagggtttgcctcgtgcagggaacggcggaggccctgaacgccgtgcattcttttatcgccgagaaggtgcgggagataccgcaggctatgactaaaccggaggtggtgaatatcctccagcctcaaaccactatgaaccctgatagagctaagcaggcgaaactgattgttcctaatagtacggctgggcttatcatcgggaagggcggtgccacagttaaggccgtgatggaacagtcaggagcctgggtccagttatctcagaagcctgagggaattaacctccaggaacgcgtggtgactgtctctggcgagcccgagcaggtgcataaagcagtttcagccattgtccagaaagtgcaggaggatcctcaatcctcttcttgcctgaacatctcctacgccaatgtagctggcccagtggctaacagtaatccaaccggttcaccctacgcaagtccggctgatgttctccctgcagcggctgcagcatccgctgcggccgcctctggactgctgggccccgctggcctagccggagtcggggcttttccagctgcgctgcccgccttttcaggaacggacttactggcaatatctacggcactgaatactctagcttcctatggctataatacaaacagcttaggcctcggattaaattccgccgcggcatcgggagtgctggccgccgttgctgcaggcgccaaccctgcggccgccgcagctgccaacctgctcgcatcctacgccggcgaggcaggcgccgggccggcaggcggagccgccccccctcccccccctccacctggtgccctcgggagcttcgctttagcggccgcagcaaacggttacctgggtgcaggtgccggcggcggtgccggtggtggcggcggtcccctggtggcagcagctgctgccgcaggtgcggcgggagggtttctaacggcggaaaagcttgccgcagagtcagctaaggaactggtggagatcgccgtgcctgagaatttggttggggctattctgggcaagggagggaaaacgttggtagagtaccaagagctcacgggagcacgaatccagatctcaaaaaagggcgaattccttccaggaacaaggaacaggcgcgtcactatcacgggaagccctgctgccacccaggcagcacagtaccttatatcccagcgtgtcacttatgaacagggagtccgcgcgtccaacccacaaaaggtaggctag

SEQ ID NO: 129407 - DNA, 1877 bp, Artificial Sequence
  derived and/or modified sequence
ccgccgcagccgccgcagcagcagcagccgccgccccaggccccccccatggagcccgaggccccggattcccgcaagaggcccctcgaaacgccccccgaggtggtctgcaccaagcgcagcaacacgggagaggaaggcgaatacttcctgaaggtgctgatccccagctacgcggcgggctccatcattggcaagggcgggcagaccatcgtgcagctgcagaaggagaccggagccaccatcaagctctccaagtccaaagacttctaccccggaaccacagagcgggtatgcctagtacagggcacggcagaggccttgaatgctgtgcacagctttattgccgagaaggtccgagaaatcccacaagcgatgaccaagcctgaggtggtcaacatccttcaaccccaaaccacgatgaaccccgacagagccaagcaggccaagctgatcgtccccaacagcacggcgggcctgatcatcggcaagggaggcgccacggtgaaagccgtgatggaacagtcaggagcatgggtgcagctgtcccagaagccggagggcatcaacctgcaggagcgcgtggtgacggtcagcggcgagcccgagcaggtgcacaaggccgtgagcgccatcgtgcagaaggtacaagaagacccccagagcagcagctgcctcaacatcagctacgccaacgtggcaggccccgtggccaactccaaccccaccggctctccgtacgccagccccgcggatgtgctgccagccgcggccgcagcgtcggccgccgccgcctccggcctgctgggccccgccgggctggctggcgtgggggcctttcccgccgcgctgcccgccttctcaggcaccgacctgctggccatcagcacggcgcttaacacgctggcaagttacggctacaacaccaactccctgggcctgggcctcaactcggccgcagcttccggcgtcctggccgccgtggccgccggggccaacccagcagccgccgccgccgccaacctcctggcatcctacgcgggcgaggccggggccgggccagccggaggggccgccccgccgccgcccccgcctcccggagccctggggtcctttgcgttggccgcagccgccaacggctacctcggggccggggcgggcggcggggcgggcggagggggcggcccgctggtggccgctgcagccgcggccggggcggccgggggcttcctgacggcggagaagctggcggctgagagtgccaaggagctggtggagattgcggtgcctgagaacctggtgggagccatcctggggaaggggggcaagacgttggtggagtaccaggagctgacgggcgctcgcatccagatctccaagaagggcgagttcctgccaggcacgcggaaccggcgggtcaccatcacgggcagccccgcggccacgcaagccgctcaatacctcatcagtcagcgggtcacctacgagcagggagtgagggcctcaaacccccagaaagtgggatgaggcctgtggtgtgtgctcccacccttttctctcctcccatctcctcctcttccctctcctcctcccccccaactcctgacctcagcttggtgtagtcctgctcctcttgggatggggctggggtaggcccgactgcaccctccccttctggtagtcataggcaggattgagtgacggttgggaagggggctcagaagccccctccccagcccggaactgacccctccttcctccctccctgtgcttggctgggcctgacccttcctgtcccagggcccaggtctgtgtgatatctgtatatattgcattttgttgattttaatagaaaacaaagcgttattttctctttc

SEQ ID NO: 129408 - DNA, 1479 bp, Artificial Sequence
  derived and/or modified sequence
atggagcctgaggccccagacagcaggaagaggcccctggagaccccacctgaggtggtgtgcaccaagaggagcaacacaggagaggagggggagtacttcctgaaggtgctgatccccagctatgctgctggcagcatcatcggcaagggcggccagaccatcgtgcagctgcagaaggagaccggggccaccatcaagctgagcaagagcaaggacttctacccaggcaccacagagcgggtgtgcctggtgcagggcacagctgaggccctgaatgctgtgcacagcttcatcgccgagaaggtgcgggagatcccccaggccatgaccaagccagaggtggtgaacatcctgcagccccagaccaccatgaacccagaccgggccaagcaggccaagctgattgtgcccaacagcacagctggcctcatcatcggcaagggcggggccaccgtgaaggctgtgatggagcagagcggggcctgggtgcagctgagccagaagccagagggcatcaacctgcaggagcgggtggtgacagtgtctggagagcctgagcaggtgcacaaggctgtgtctgccatcgtgcagaaggtgcaggaggacccccagagcagcagctgcctgaacatctcctatgccaacgtggccggccctgtggccaacagcaaccccaccggcagcccctatgccagccctgcagatgtgctgcctgctgctgctgctgccagcgctgctgctgccagcggcctgctgggccctgctggcctggccggcgtgggcgccttccctgctgccctgcctgccttcagcggcacagacctgctggccatcagcacagccctgaacaccctggccagctatggctacaacaccaacagcctgggcctgggcctgaacagcgctgctgccagcggcgtgctggccgctgtggccgccggggccaacccagctgctgctgctgctgccaacctgctggccagctatgctggggaggccggggccggccctgctggaggagctgcccctcctcctcctcctcctcctggggccctgggcagctttgccctggccgctgctgccaacggctacctgggcgctggggccggcggcggggccggcggcggcggcggccccctggtggccgctgctgctgctgctggagctgctgggggcttcctgacagctgagaagctggccgctgagagcgccaaggagctggtggagattgctgtgcctgagaacctggtgggcgccatcctgggcaagggcggcaagaccctggtggagtaccaggagctgaccggggcccgcatccagatcagcaagaagggggagttcctgcccggcaccaggaacagaagagtgaccatcaccggcagccctgctgccacccaggccgcccagtacctgatcagccagagggtgacctatgagcagggcgtgcgggccagcaacccccagaaggtgggctag

SEQ ID NO: 129409 - DNA, 1479 bp, Artificial Sequence
  derived and/or modified sequence
atggagcccgaggcccccgacagccggaagcggcccctggagaccccacccgaggtggtatgcactaagaggagcaacaccggtgaagagggcgaatacttccttaaggtgctgatacctagctacgcagccgggtctatcatcggaaaagggggtcagaccatcgtccagctccagaaggaaactggggctactattaagctgagtaagtcaaaagatttttatcctgggaccacggaacgcgtgtgcctggtgcaagggacggctgaggcactgaacgctgtgcacagtttcatcgctgagaaagtgcgggaaatcccacaggccatgactaagcccgaggtggtgaatatcctgcaaccccaaacaaccatgaatccggatagagccaaacaggctaaactaattgtgccaaacagcaccgcaggacttattatcgggaaaggaggagctactgtgaaagctgttatggaacaatccggagcttgggtgcagctcagccagaaaccggaaggaattaacctgcaggagagggtggtgacagtaagcggtgagccagaacaggtgcacaaagccgtttctgctatcgtgcagaaggttcaagaggatcctcaatcaagctcgtgcctgaatattagctacgccaatgtagcaggccctgtggccaacagcaatcccaccggctctccatacgccagccctgccgacgtgcttcccgcggcagctgccgcctccgccgcagcggcctctggcctgctgggcccagcagggctggctggtgtgggcgcttttcctgctgctttacccgcgttctctggtacagacctgttggccatctctacagcactgaacaccctggcttcatacggctacaataccaattctctggggctcggtctgaacagcgcagccgcctcaggcgttctagcagctgtggccgcaggggcaaacccggcagccgcggctgccgcgaatctcctggcctcatatgccggggaggccggagccggccccgcggggggcgcagcaccaccgccaccaccgcctccgggcgctttaggttcattcgctttggccgcggctgccaatgggtacctgggcgcaggcgcgggaggcggcgcaggcggaggtggcgggcccttggtagctgccgcagctgcggcaggagcagccggtggtttcttgaccgccgaaaaactcgctgctgagagcgctaaagagctggtggaaatcgccgtgccagagaacttagtaggggcaatcttgggaaaaggaggcaagaccctagtagagtatcaggaactgaccggagctcgcatccaaatctcaaagaaaggggagtttttgcctggaactcgaaacaggcgagtgactattacgggctccccggcggccacccaggccgcgcagtacctgattagccaaagggtgacatatgaacagggtgtgagagcttccaacccgcagaaagtgggttag

SEQ ID NO: 129410 - DNA, 1479 bp, Artificial Sequence
  derived and/or modified sequence
atggagccagaggccccagattcacgaaaacgccctctagaaactcccccagaagtggtgtgcacaaagaggagcaatacaggcgaagagggcgaatatttcttgaaggtattaatcccatcatacgccgctggaagcattatcggcaaggggggacagacaattgttcagcttcaaaaggaaaccggcgcaaccatcaagctgagcaaaagtaaagacttctatcctggcaccacagagagggtttgccttgtgcagggcactgccgaggcactaaacgcagttcattcttttatagcagagaaagtccgtgagatcccccaggctatgacaaaacccgaagtggtgaacatcctccaaccccagacgacaatgaatccggaccgggctaagcaggccaagctcatcgtgccgaacagcaccgctggcctcataatcgggaaaggaggcgctacagttaaagcagtgatggagcagtccggcgcttgggtgcagctcagccaaaagcccgaggggattaatctgcaagaaagggtcgtaacggtttctggcgaacctgagcaggttcacaaggccgtgtccgccattgtacagaaggtgcaggaagacccccagtcctcaagttgcttgaacatctcttatgctaatgtggccggtcctgtcgctaactctaaccctactgggtccccctatgcctctcctgctgacgtcctgccggcagccgctgcggcttccgcagccgcagcttctggactgctgggccctgcaggactggccggagtgggagccttcccagccgctcttcctgcgtttagtggtactgatctgttagctatctctacagctttaaacacactggctagttatgggtataacaccaattcgctcgggctgggcctgaattcggcagcagcatccggagttttggccgcagtggctgccggagccaatccggcagccgctgctgccgcaaatcttctggctagttatgccggagaagccggagctgggcctgctggaggggcagctccccctcccccaccaccaccaggcgcattggggtcctttgccctggccgctgctgccaacgggtatctcggtgccggtgccggtggcggtgctggtggcggagggggaccactggtggcagccgcagctgctgccggtgccgctggcggattcctaaccgcggagaaacttgctgcagagtccgccaaagagctcgtcgagatcgccgtccctgaaaacctcgtcggcgcaattttgggaaaaggaggaaaaacgctggtggagtatcaggagctgacaggggctcgtatccaaatctccaagaaaggagagttcctgccagggaccaggaatcggagggtcacaataactgggtctccagccgcaacgcaggctgcccaatacctcatcagccagcgtgtcacttacgaacagggtgtgagagccagcaatccacagaaagtggggtag

SEQ ID NO: 129411 - DNA, 1479 bp, Artificial Sequence
  derived and/or modified sequence
atggagcccgaggcccccgacagcagaaagagacccctggagaccccccccgaggtggtgtgcaccaagagaagcaacaccggcgaggagggcgagtacttcctgaaggtgctgatccccagctacgccgccggcagcatcatcggcaagggcggccagaccatcgtgcagctgcagaaggagaccggcgccaccatcaagctgagcaagagcaaggacttctaccccggcaccaccgagagagtgtgcctggtgcagggcaccgccgaggccctgaacgccgtgcacagcttcatcgccgagaaggtgagagagatcccccaggccatgaccaagcccgaggtggtgaacatcctgcagccccagaccaccatgaaccccgacagagccaagcaggccaagctgatcgtgcccaacagcaccgccggcctgatcatcggcaagggcggcgccaccgtgaaggccgtgatggagcagagcggcgcctgggtgcagctgagccagaagcccgagggcatcaacctgcaggagagagtggtgaccgtgagcggcgagcccgagcaggtgcacaaggccgtgagcgccatcgtgcagaaggtgcaggaggacccccagagcagcagctgcctgaacatcagctacgccaacgtggccggccccgtggccaacagcaaccccaccggcagcccctacgccagccccgccgacgtgctgcccgccgccgccgccgccagcgccgccgccgccagcggcctgctgggccccgccggcctggccggcgtgggcgccttccccgccgccctgcccgccttcagcggcaccgacctgctggccatcagcaccgccctgaacaccctggccagctacggctacaacaccaacagcctgggcctgggcctgaacagcgccgccgccagcggcgtgctggccgccgtggccgccggcgccaaccccgccgccgccgccgccgccaacctgctggccagctacgccggcgaggccggcgccggccccgccggcggcgccgcccccccccccccccccccccccggcgccctgggcagcttcgccctggccgccgccgccaacggctacctgggcgccggcgccggcggcggcgccggcggcggcggcggccccctggtggccgccgccgccgccgccggcgccgccggcggcttcctgaccgccgagaagctggccgccgagagcgccaaggagctggtggagatcgccgtgcccgagaacctggtgggcgccatcctgggcaagggcggcaagaccctggtggagtaccaggagctgaccggcgccagaatccagatcagcaagaagggcgagttcctgcccggcaccagaaacagaagagtgaccatcaccggcagccccgccgccacccaggccgcccagtacctgatcagccagagagtgacctacgagcagggcgtgagagccagcaacccccagaaggtgggctag

SEQ ID NO: 129412 - protein, 824 aa, Artificial Sequence
  derived and/or modified sequence
MDEDEKDRAKRASRNKSEKKRRDQFNVLIKELSSMLPGNTRKMDKTTVLEKVIGFLQKHNEVSAQTEICDIQQDWKPSFLSNEEFTQLMLEALDGFIIAVTTDGSIIYVSDSITPLLGHLPSDVMDQNLLNFLPEQEHSEVYKILSSHMLVTDSPSPEYLKSDSDLEFYCHLLRGSLNPKEFPTYEYIKFVGNFRSYNNVPSPSCNGFDNTLSRPCRVPLGKEVCFIATVRLATPQFLKEMCIVDEPLEEFTSRHSLEWKFLFLDHRAPPIIGYLPFEVLGTSGYDYYHIDDLELLARCHQHLMQFGKGKSCCYRFLTKGQQWIWLQTHYYITYHQWNSKPEFIVCTHSVVSYADVRVERRQELALEDPPSEALHSSALKDKGSSLEPRQHFNTLDVGASGLNTSHSPSASSRSSHKSSHTAMSEPTSTPTKLMAEASTPALPRSATLPQELPVPGLSQAATMPAPLPSPSSCDLTQQLLPQTVLQSTPAPMAQFSAQFSMFQTIKDQLEQRTRILQANIRWQQEELHKIQEQLCLVQDSNVQMFLQQPAVSLSFSSTQRPEAQQQLQQRSAAVTQPQLGAGPQLPGQISSAQVTSQHLLRESSVISTQGPKPMRSSQLMQSSGRSGSSLVSPFSSATAALPPSLNLTTPASTSQDASQCQPSPDFSHDRQLRLLLSQPIQPMMPGSCDARQPSEVSRTGRQVKYAQSQTVFQNPDAHPANSSSAPMPVLLMGQAVLHPSFPASQPSPLQPAQARQQPPQHYLQVQAPTSLHSEQQDSLLLSTYSQQPGTLGYPQPPPAQPQPLRPPRRVSSLSESSGLQQPPR

SEQ ID NO: 129413 - DNA, 2475 bp, Artificial Sequence
  derived and/or modified sequence
atggacgaggatgaaaaggatcgagcaaagcgcgcctccaggaataagtctgagaagaaaaggcgcgatcaattcaacgtcctcattaaagagttgtcttccatgctgccgggcaacaccaggaagatggacaagacaaccgttctggagaaggtgatcgggttcttgcagaagcacaacgaggtttcggcccagactgagatttgtgacatccagcaagattggaaaccatcctttctgtcaaatgaagaatttactcagctgatgctggaagcgctcgatgggttcatcatcgccgttactacagacggctcgatcatctacgtgagtgactccataaccccattgctggggcatttgccttcagacgtgatggatcaaaacttacttaatttcctgcctgaacaggaacatagcgaggtatataaaattctctcaagccatatgctagtcaccgattccccatcccccgaataccttaaaagcgatagcgacctggagttttattgtcatctcctgcgaggctccctgaacccaaaggagtttcccacctacgaatacatcaaatttgttgggaatttcaggtcatataataacgtcccaagcccgagttgtaacggtttcgacaatacactgagcagaccatgtagagtgcccttaggtaaagaagtgtgtttcatcgccacagtgagactggccacaccccaatttctcaaggagatgtgtatcgtggacgagcctttggaggagttcacctcacggcactctctagagtggaagttcctcttcctggaccatagagccccacctatcatcggatacttgccattcgaagtactcggcacaagcggatacgactattaccacattgacgatctcgagctccttgccaggtgccaccagcaccttatgcagtttgggaaaggtaaatcctgctgttataggtttctgaccaaaggccagcagtggatctggctccagacccactattatataacttaccatcagtggaatagcaagcccgagttcattgtctgcacgcatagcgtggtgtcttacgcggacgtccgtgtcgaaaggcgccaggagcttgccctggaagatccaccctcagaagccttgcactcctccgccctgaaggataaaggatcctcccttgagccccgccagcattttaacaccctcgacgttggggcctccggcctcaacacatcacactctccttctgcttcttctagaagcagtcataagtcatcccatacggctatgtccgaacctacttctacccctacaaaattaatggccgaagcctcgaccccagccttaccacggagtgccacattacctcaggagctccccgtgccgggtctctcacaggcagccacaatgcccgcccctttgccatctccaagcagttgcgatttgacacagcagttgctgcctcagaccgtacttcagtccactccggccccaatggcgcagttttcagctcaattttcaatgttccagaccataaaagaccagctcgagcagagaacccggatccttcaggctaatattcgctggcaacaagaggagcttcataaaatccaagagcagctgtgtctcgttcaggactccaacgtgcagatgttcttgcagcagccagcggtatcactaagttttagttcaactcagcggcctgaggctcagcaacaacttcagcaaagaagtgcagccgtaacccagcctcagctaggcgcaggacctcagctgcctggccagatctcctcagctcaggtcacaagtcagcacttgctgagagaaagcagcgtgatttcaacccagggacctaaacctatgcggtcaagccagctgatgcaaagttctgggagaagcggctcatctttggtgagcccgttttctagcgccaccgccgcactcccgcccagtctaaacctgaccacccccgcctctaccagccaggacgcgagccagtgtcagccatctcccgatttttcgcacgaccggcagctgaggttactgctcagtcagcccattcagcccatgatgccaggaagttgtgacgcacgtcagcctagtgaggtctcgcggacaggcaggcaggtaaaatatgcacagtcacagaccgtgtttcagaatcctgatgcccacccagctaattccagctccgccccgatgcccgtgcttctaatgggacaggccgtcctacaccccagcttccccgcttcacaacccagccctcttcagccggcccaagccaggcaacagccgccacagcattatctacaagtgcaagcacctactagcctgcacagcgagcagcaggatagcctgttactatccacttactcccagcagccggggacacttggttatccccagccaccccctgcacagccacagccccttaggccacctagaagagttagtagcctctccgagagcagcgggctgcagcagccgcccagatag

SEQ ID NO: 129414 - DNA, 2475 bp, Artificial Sequence
  derived and/or modified sequence
atggatgaagatgagaaggaccgggccaagagggccagcaggaacaagtctgagaagaagagaagagaccagttcaacgtgctgatcaaggagctgagctccatgctgcccggcaacaccaggaagatggacaagaccaccgtgctggagaaggtgattggcttcctgcagaagcacaatgaggtgtctgcccagacagagatctgtgacatccagcaggactggaagcccagcttcctgagcaatgaggagttcacccagctgatgctggaggccctggatggcttcatcatcgctgtgaccacagatggcagcatcatctacgtgtctgacagcatcacccccctgctgggccacctgcccagtgatgtgatggaccagaacctgctgaacttcctgcctgagcaggagcacagcgaggtgtacaagatcctgagcagccacatgctggtgacagacagccccagccctgagtacctgaagagtgacagcgacctggagttctactgccacctgctgcggggcagcctgaaccccaaggagttccccacctatgagtacatcaagtttgtgggcaacttccgcagctacaacaacgtgcccagccccagctgcaatggatttgacaacaccctgagccggccctgccgggtgcccctgggcaaggaggtgtgcttcatcgccaccgtgcggctggccaccccccagttcctgaaggagatgtgcatcgtggatgagcccctggaggagttcaccagccgccacagcctggagtggaagttcctgttcctggaccaccgggccccacccatcatcggctacctgccctttgaggtgctgggcaccagcggctatgactactaccacattgatgacctggagctgctggcccgctgccaccagcacctgatgcagtttgggaagggcaagagctgctgctaccgcttcctgaccaagggccagcagtggatctggctgcagacccactactacatcacctaccaccagtggaacagcaagccagagttcatcgtgtgcacccacagcgtggtgtcctatgcagatgtgcgggtggagcggcggcaggagctggccctggaggaccccccatctgaggccctgcacagcagcgccctgaaggacaagggcagcagcctggagccccggcagcacttcaacaccctggatgtgggcgccagcggcctgaacaccagccacagccccagcgccagcagccgcagcagccacaagagcagccacacagccatgtctgagcccaccagcacccccaccaagctgatggccgaggccagcaccccagccctgcccaggtctgccaccctgccccaggagctgcctgtgcccggcctgagccaggccgccaccatgcctgcccccctgcccagccccagcagctgtgacctgacccagcagctgctgccccagacagtgctgcagagcaccccagcccccatggcccagttcagcgcccagttctccatgttccagaccatcaaggaccagctggagcagaggacccgcatcctgcaggccaacatccgctggcagcaggaggagctgcacaagatccaggagcagctgtgcctggtgcaggacagcaatgtgcagatgttcctgcagcagcctgctgtgtccctgtccttcagcagcacccagaggcctgaggcccagcagcagctgcagcagaggtctgctgctgtgacccagccccagctgggcgccggcccccagctgcccggccagatcagcagcgcccaggtgaccagccagcacctgctgcgggagagcagcgtcatcagcacccagggccccaagcccatgaggagcagccagctgatgcagagcagcggccgcagcggcagcagcctggtgagccccttcagcagcgccacagctgccctgccccccagcctgaacctgaccaccccagccagcaccagccaggatgccagccagtgccagcccagcccagacttcagccatgaccggcagctgcggctgctgctgagccagcccatccagcccatgatgcctggcagctgtgatgcccggcagcccagcgaggtgtccaggacaggccggcaggtgaagtatgcccagagccagaccgtcttccagaacccagatgcccacccagccaacagcagcagcgcccccatgcctgtgctgctgatgggccaggccgtgctgcaccccagcttccctgccagccagcccagccccctgcagcctgcccaggcccggcagcagcccccccagcactacctgcaggtgcaggcccccaccagcctgcacagcgagcagcaggacagcctgctgctgagcacctacagccagcagcccggcaccctgggctacccccagcccccaccagcccagccccagcccctgcggcccccccggcgggtgagcagcctgtctgagagcagcggcctgcagcagccccccaggtag

SEQ ID NO: 129415 - DNA, 2475 bp, Artificial Sequence
  derived and/or modified sequence
atggacgaggacgagaaggaccgggccaagcgggccagccggaacaagtcagagaagaaaaggcgcgaccagttcaatgttctgatcaaggaactatcttccatgcttcctggaaacacgaggaaaatggataaaaccactgttctcgagaaagtgatcggattccttcagaaacacaatgaagtatctgctcagacagagatttgcgacattcagcaggactggaaaccaagctttttatcaaatgaagaattcacccagctgatgctggaggcccttgacggcttcattattgcagtcacaacagacggctccattatatatgtcagcgacagtatcacaccactgctaggacaccttcccagcgatgtcatggatcagaacctgctgaattttctgcccgagcaagagcactcagaagtgtacaagatcctttcaagccatatgttggtgaccgatagcccttctccagagtatctgaagagtgatagcgatttagaattttactgccatctgttacgggggagtctgaaccccaaagaattcccaacatacgaatatattaagtttgtggggaacttcaggagctacaacaatgtccctagcccaagctgtaacggcttcgataacacattatctcgtccctgccgggtgcccctgggtaaagaagtgtgcttcatagccactgttagactggctacacctcagttcctcaaggaaatgtgtattgtagacgagcccctggaggagttcacaagcagacacagccttgagtggaagttcttgttcttagaccaccgggcaccacccataataggatacctgccatttgaagtgcttggcacgagtggttacgattactaccacatcgacgacctggagctcttggcaagatgccaccagcacctaatgcaattcggtaagggcaaatcttgttgttacagatttttgacaaaaggacagcaatggatctggctgcagacgcactattacattacctaccatcagtggaattccaagcctgaatttattgtctgcacccacagcgtcgttagttacgccgacgtgcgagtcgagcgtcgtcaggagctcgcgctcgaagaccccccatctgaggcccttcactcctcggcactcaaggataaaggtagctctcttgagccaaggcagcacttcaatactctcgacgtgggggcctcgggtctcaatacaagtcacagtccatctgcttcctcaagatcaagtcataagtcatcccacacggcgatgtcggaaccgaccagcacaccaactaagctaatggctgaggcaagcacccctgccctcccccgctctgctacactgccgcaggaattaccagtgccgggcctgtcccaggcagccacgatgcctgcgccattgccaagtccctcatcatgcgacctgacacaacagcttctgccacagactgtgctgcagtccacaccagcgcccatggctcagtttagcgcacagttcagtatgtttcaaaccattaaagaccagctggagcaacggaccagaatcctgcaagcaaatatacgctggcagcaggaagagttacataagatccaggagcaactgtgtctggtccaagatagtaatgtgcaaatgttcctccagcagcccgccgttagcttgtctttttcatcaacccagcgccccgaagctcagcagcagttacagcagcgctccgccgcagtgacacagccccagctaggcgccggacctcagcttccaggccagatatcttccgcccaggtgacatctcagcacttattaagagagtcctctgtgatctcaacacaaggtcctaaaccaatgcgatcatcccagctcatgcagagctctggtaggagcggttcttctttagtgtctcctttctcttccgctaccgccgctcttccccctagtctcaatctgactactcccgcgtcaacgtcacaagacgccagtcaatgtcagccatcacctgactttagtcatgaccggcagttacgcctgcttctaagtcaacccattcagccaatgatgcccggatcctgtgatgctcgacaaccttcagaagtctcaagaaccggacgacaggtgaagtatgctcagtcgcaaaccgtcttccagaatcctgacgctcatcctgccaattcctcctccgcccccatgccagtgttgctgatggggcaagcagtgctccacccatcttttccagcctctcaaccctcccccctgcagcctgcacaggcccgacaacaaccaccgcagcactacctgcaggtgcaggcgccaacgagtctgcacagcgagcagcaggatagcctgcttctgtctacttactcacagcagcccgggacgctgggctacccccaacctcccccagcccagccccagcctctccggcccccaaggcgcgtgtcctcactcagtgagtcatccgggttgcagcagccacctcggtag

SEQ ID NO: 129416 - DNA, 2475 bp, Artificial Sequence
  derived and/or modified sequence
atggatgaggatgaaaaggatcgcgcaaaacgtgccagtcgcaacaaatctgagaagaagcggagagatcaatttaacgttttaataaaagagctctccagcatgctccccggaaatacccggaagatggacaagaccaccgttctggaaaaggtgattggtttcctgcagaagcataatgaggtctccgcacagactgagatttgcgatattcagcaggattggaaacctagcttcttgagcaacgaggagtttacccagctaatgttggaggccttggatgggttcataatcgcagttaccaccgacggtagcataatctacgtcagcgattctatcacaccactgctggggcacctgcccagtgacgtgatggaccagaatctcctgaactttctgcctgagcaagagcacagcgaagtgtataagatattgagttcccatatgcttgtgacagattctccgtcgccagaatacctgaaatccgactcagaccttgagttttattgccatttactgagagggagcctgaacccaaaggaattcccgacttatgaatacataaagttcgtgggcaacttcagatcctataataacgtaccaagtcctagctgcaatggtttcgacaataccctgtcaagaccctgcagggtgcctctcgggaaggaagtgtgcttcatcgccaccgtccggctcgctactccgcagtttttgaaggagatgtgtattgtagatgagcctctcgaggagtttacctcgagacattccttagagtggaaattcctgttcctcgatcaccgcgctcctccaatcatcggctatttgcccttcgaagtgctggggacatccggttacgactactaccacattgacgacctggagctgctggctcggtgtcaccagcacctcatgcagttcgggaagggcaagtcttgctgttacaggtttcttaccaagggacagcagtggatttggctgcaaacccactactatatcacgtaccatcagtggaacagtaaaccagagtttatcgtatgcactcatagtgtagtctcctatgctgatgtgcgagtggaacgcagacaggaacttgctctggaggaccctccttcggaggctctgcactccagcgccctgaaggataaagggtctagccttgagcctagacaacattttaacacactcgacgtaggcgcaagcggcctgaacacttctcactcccccagcgccagttccaggtctagtcacaagagttcccataccgctatgtccgaacccacttcgacgcccacgaagttgatggcagaggcaagcacaccggcattaccaagaagcgctacgctacctcaggagttgcctgtgcccggtttgagtcaggcagccacaatgcctgccccactgcccagtccctccagctgtgatctaacgcagcagcttctgccccagacagttctccagagcacccctgcaccaatggcccagttttccgcacaattctccatgttccagacaatcaaagatcagctggaacagcggacccgtattctgcaggccaatattcgttggcagcaggaggaactccacaaaatccaagaacagttatgcctggtgcaggatagtaatgtgcagatgttcttgcagcagcctgcagtctctttatccttttcatctacacagaggccagaggctcagcagcaactacagcagagatccgctgccgtgacacagccgcagctgggtgcgggacctcagctgccgggacagatcagtagcgctcaggtgacaagccaacatttattgcgagaaagctcagtcatcagcactcaaggcccaaaacccatgaggagctcccaattaatgcagtctagtggacgctccggctcctccctggtctcaccattttcctcagcaacggccgcactccccccatctctgaatttgactactccagcatcaacaagtcaagatgccagtcagtgtcagcctagccccgatttctctcacgaccggcagctgaggctgctgctcagccagcccatccagccgatgatgcctgggtcctgtgacgcccgacagcccagcgaggtttcacgcaccggcaggcaggttaaatatgcccagagtcaaaccgtatttcagaatccagacgctcatccagccaacagtagttcagcgccaatgcccgtgctgctaatgggccaggcagtcctgcacccttcttttccggcaagccaacccagtccactgcagcctgctcaggcccgacagcagccaccacagcactacctccaagtacaagcgccaacgagcctgcactcagagcagcaagacagccttctgctgagcacctatagccagcagcctggaacacttggctacccacagccccctccagctcaaccccaacccctgagaccaccaagacgtgtatcatcactgagtgagagttcaggcctccagcagccgccaaggtag

SEQ ID NO: 129417 - DNA, 2475 bp, Artificial Sequence
  derived and/or modified sequence
atggacgaggacgagaaggacagagccaagagagccagcagaaacaagagcgagaagaagagaagagaccagttcaacgtgctgatcaaggagctgagcagcatgctgcccggcaacaccagaaagatggacaagaccaccgtgctggagaaggtgatcggcttcctgcagaagcacaacgaggtgagcgcccagaccgagatctgcgacatccagcaggactggaagcccagcttcctgagcaacgaggagttcacccagctgatgctggaggccctggacggcttcatcatcgccgtgaccaccgacggcagcatcatctacgtgagcgacagcatcacccccctgctgggccacctgcccagcgacgtgatggaccagaacctgctgaacttcctgcccgagcaggagcacagcgaggtgtacaagatcctgagcagccacatgctggtgaccgacagccccagccccgagtacctgaagagcgacagcgacctggagttctactgccacctgctgagaggcagcctgaaccccaaggagttccccacctacgagtacatcaagttcgtgggcaacttcagaagctacaacaacgtgcccagccccagctgcaacggcttcgacaacaccctgagcagaccctgcagagtgcccctgggcaaggaggtgtgcttcatcgccaccgtgagactggccaccccccagttcctgaaggagatgtgcatcgtggacgagcccctggaggagttcaccagcagacacagcctggagtggaagttcctgttcctggaccacagagccccccccatcatcggctacctgcccttcgaggtgctgggcaccagcggctacgactactaccacatcgacgacctggagctgctggccagatgccaccagcacctgatgcagttcggcaagggcaagagctgctgctacagattcctgaccaagggccagcagtggatctggctgcagacccactactacatcacctaccaccagtggaacagcaagcccgagttcatcgtgtgcacccacagcgtggtgagctacgccgacgtgagagtggagagaagacaggagctggccctggaggacccccccagcgaggccctgcacagcagcgccctgaaggacaagggcagcagcctggagcccagacagcacttcaacaccctggacgtgggcgccagcggcctgaacaccagccacagccccagcgccagcagcagaagcagccacaagagcagccacaccgccatgagcgagcccaccagcacccccaccaagctgatggccgaggccagcacccccgccctgcccagaagcgccaccctgccccaggagctgcccgtgcccggcctgagccaggccgccaccatgcccgcccccctgcccagccccagcagctgcgacctgacccagcagctgctgccccagaccgtgctgcagagcacccccgcccccatggcccagttcagcgcccagttcagcatgttccagaccatcaaggaccagctggagcagagaaccagaatcctgcaggccaacatcagatggcagcaggaggagctgcacaagatccaggagcagctgtgcctggtgcaggacagcaacgtgcagatgttcctgcagcagcccgccgtgagcctgagcttcagcagcacccagagacccgaggcccagcagcagctgcagcagagaagcgccgccgtgacccagccccagctgggcgccggcccccagctgcccggccagatcagcagcgcccaggtgaccagccagcacctgctgagagagagcagcgtgatcagcacccagggccccaagcccatgagaagcagccagctgatgcagagcagcggcagaagcggcagcagcctggtgagccccttcagcagcgccaccgccgccctgccccccagcctgaacctgaccacccccgccagcaccagccaggacgccagccagtgccagcccagccccgacttcagccacgacagacagctgagactgctgctgagccagcccatccagcccatgatgcccggcagctgcgacgccagacagcccagcgaggtgagcagaaccggcagacaggtgaagtacgcccagagccagaccgtgttccagaaccccgacgcccaccccgccaacagcagcagcgcccccatgcccgtgctgctgatgggccaggccgtgctgcaccccagcttccccgccagccagcccagccccctgcagcccgcccaggccagacagcagcccccccagcactacctgcaggtgcaggcccccaccagcctgcacagcgagcagcaggacagcctgctgctgagcacctacagccagcagcccggcaccctgggctacccccagcccccccccgcccagccccagcccctgagaccccccagaagagtgagcagcctgagcgagagcagcggcctgcagcagccccccagatag

SEQ ID NO: 129418 - protein, 1427 aa, Artificial Sequence
  derived and/or modified sequence
MLLPSDVARLVLGYLQQENLISTCQTFILESSDLKEYAEHCTDEGFIPACLLSLFGKNLTTILNEYVAMKTKETSNNVPAIMSSLWKKLDHTLSQIRSMQSSPRFAGSQRARTRTGIAEIKRQRKLASQTAPASAELLTLPYLSGQFTTPPSTGTQVTRPSGQISDPSRSYFVVVNHSQSQDTVTTGEALNVIPGAQEKKAHASLMSPGRRKSESQRKSTTLSGPHSTIRNFQDPNAFAVEKQMVIENAREKILSNKSLQEKLAENINKFLTSDNNIAQVPKQTDNNPTEPETSIDEFLGLPSEIHMSEEAIQDILEQTESDPAFQALFDLFDYGKTKNNKNISQSISSQPMESNPSIVLADETNLAVKGSFETEESDGQSGQPAFCTSYQNDDPLNALKNSNNHDVLRQEDQENFSQISTSIQKKAFKTAVPTEQKCDIDITFESVPNLNDFNQRGNSNAECNPHCAELYTNQMSTETEMAIGIEKNSLSSNVPSESQLQPDQPDIPITSFVSLGCEANNENLILSGKSSQLLSQDTSLTGKPSKKSQFCENSNDTVKLKINFHGSKSSDSSEVHKSKIEINVLEPVMSQLSNCQDNSCLQSEILPVSVESSHLNVSGQVEIHLGDSLSSTKQPSNDSASVELNHTENEAQASKSENSQEPSSSVKEENTIFLSLGGNANCEKVALTPPEGTPVENSHSLPPESVCSSVGDSHPESQNTDDKPSSNNSAEIDASNIVSLKVIISDDPFVSSDTELTSAVSSINGENLPTIILSSPTKSPTKNAELVKCLSSEETVGAVVYAEVGDSASMEQSLLTFKSEDSAVNNTQNEDGIAFSANVTPCVSKDGGYIQLMPATSTAFGNSNNILIATCVTDPTALGTSVSQSNVVVLPGNSAPMTAQPLPPQLQTPPRSNSVFAVNQAVSPNFSQGSAIIIASPVQPVLQGMVGMIPVSVVGQNGNNFSTPPRQVLHMPLTAPVCNRSIPQFPVPPKSQKAQGLRNKPCIGKQVNNLVDSSGHSVGCHAQKTEVSDKSIATDLGKKSEETTVPFPEESIVPAAKPCHRRVLCFDSTTAPVANTQGPNHKMVSQNKERNAVSFPNLDSPNVSSTLKPPSNNAIKREKEKPPLPKILSKSESAISRHTTIRETQSEKKVSPTEIVLESFHKATANKENELCSDVERQKNPENSKLSIGQQNGGLRSEKSIASLQEMTKKQGTSSNNKNVLSVGTAVKDLKQEQTKSASSLITTEMLQDIQRHSSVSRLADSSDLPVPRTPGSGAGEKHKEEPIDIIKAPSSRRFSEDSSTSKVMVPPVTPDLPACSPASETGSENSVNMAAHTLMILSRAAISRTTSATPLKDNTQQFRASSRSTTKKRKIEELDERERNSRPSSKNLTNSSIPMKKKKIKKKKLPSSFPAGMDVDKFLLSLHYDE

SEQ ID NO: 129419 - DNA, 4284 bp, Artificial Sequence
  derived and/or modified sequence
atgctccttcccagcgacgtagccagactcgttctgggctatctccagcaggagaacctcatctccacttgtcagaccttcattctggaatcaagtgatctgaaagaatacgcagaacactgtaccgacgagggctttatcccagcgtgcctcctttctttatttggaaagaacttaacaactattcttaacgaatacgttgctatgaaaactaaggagacttctaacaacgtacctgcaatcatgtcctccctctggaagaagctcgatcacacattgtcgcagattcggtctatgcagagcagcccccgctttgccggctcccagcgcgcccgtacccgtaccgggattgccgagatcaagcgccagcggaaacttgcatctcagactgccccagcgtccgccgagctactcaccctgccctatctgagtggtcagttcactaccccaccaagcactgggactcaagttacaaggcccagcgggcaaatcagtgatcccagtcgcagctatttcgtggtggttaaccactcacagtctcaggataccgttacaacaggtgaggccctcaacgtgatccctggcgcacaggaaaagaaggcgcacgcctcattaatgagccccgggcgaagaaagagcgagtcacagaggaagagcacaactttgtctggaccgcactcgaccatcaggaatttccaggaccctaacgcgttcgctgtggagaaacagatggtgatcgagaacgcgagagaaaaaattttgtccaacaaatccctgcaggaaaagctcgccgagaatatcaacaaatttctgactagtgacaataacatcgcccaggtgcctaagcaaaccgacaataatccgaccgaacccgaaaccagcatagacgaatttctcgggctgccatcggagatccatatgtccgaggaggctatccaagacatcctagaacagaccgagtccgacccggcattccaggccctgttcgacctctttgattatggcaagacgaagaacaacaagaacatttcccagagtatatcgagccagccaatggagagtaacccgagcatcgttttggccgacgaaacaaatcttgcggtaaaaggcagtttcgagaccgaagaaagtgacgggcagtcaggccagcctgcattctgcacatcataccagaatgatgaccccctcaatgccttaaagaattcaaataaccacgacgtcctacgacaggaagatcaagagaacttctctcagatctctacttctatccagaaaaaggctttcaagacggcggttccaacggagcagaaatgtgatatcgatatcacttttgagtccgtaccaaacctgaatgacttcaaccagagagggaactccaacgcagaatgtaatcctcactgtgctgagctgtacacgaaccagatgtcaacggagacagagatggccatcggtatagaaaagaactctctatccagcaatgtgccctccgagagtcaacttcagcccgaccagccggatatccctataacctcattcgtatctttgggctgtgaggctaataatgagaatttaattctgagcggcaagtcttctcagctgctgagtcaagataccagcctgaccgggaagccttctaagaagtcccagttttgcgaaaatagtaatgataccgtgaagctcaagatcaactttcatggttctaagtcttcggattcgtcagaagtacataaaagcaaaatcgagattaacgtgctggaacccgtgatgagtcagttgtccaactgtcaggataatagttgcctccagtcagagatcttgcctgtgagcgtcgaaagctcccacttgaatgtatctggtcaggtcgagattcacctaggcgatagcctatcctccacaaaacaaccatctaacgatagcgccagtgtcgagctgaaccacaccgagaacgaggcacaggccagtaaaagcgagaattcccaggaacccagttcctccgtcaaagaggagaacactatattcctctcactgggcgggaatgcaaattgtgaaaaagtggcgctcactccacctgagggcactccagttgagaacagtcacagcttgccccccgaaagcgtttgtagctctgtcggcgactcccaccccgagtcacaaaacaccgacgacaaacccagtagtaataacagcgctgagattgacgcatccaacatcgtgagcctgaaggtcattatctcagatgaccctttcgttagttctgataccgaacttacatccgccgtgtcttcgattaacggcgagaacctccctacaattatactgtcctccccaaccaaatcgcccactaaaaacgccgagctagttaaatgcctgtcgtccgaagagacagtcggagctgtggtctacgcggaggtgggcgactcagcttcaatggagcagagcctgctcacattcaaatctgaggatagtgcagtgaacaatacccagaatgaggatgggatcgctttctcggctaatgtaaccccctgtgtctccaaggatggtgggtatatccagctgatgcctgccaccagcacagccttcggcaatagcaacaacatattgatcgccacttgcgtgacggatcctacagccctcgggacatccgtgagtcagtccaacgtagtggttctgcctggcaattccgctcccatgactgctcagccactgccacctcaactgcagacaccgccccggtctaactcggtctttgccgttaatcaggccgtctcgccaaacttttcccagggatcagccatcatcatcgcctctcctgtgcaaccagttctgcaggggatggtcggtatgatcccggtgagcgttgtgggacaaaacgggaacaacttctctacgcctccccggcaagtacttcacatgcccctgacagctcctgtctgcaacagatccatcccccagtttcctgttccacccaaatctcagaaagcccaggggctgaggaataaaccttgtatcggaaaacaggtaaataatctggttgatagcagtggtcacagtgttggctgtcatgcccaaaaaactgaggtgtccgataaatccatcgcgacagatctgggcaaaaaaagcgaggagaccacggttccatttcctgaagagagcatcgtgcctgccgcaaagccatgccacaggcgagtcctatgtttcgactccactacagcaccggtggcgaacactcaggggccaaaccataaaatggtgtctcaaaataaagagcggaatgccgtgtcgtttccgaatctggatagcccaaatgtgtcatcaaccttgaaacccccaagtaacaatgcgatcaagagagagaaagaaaagcctccactccctaaaattctgagcaaatctgagagcgccattagcagacataccacgatacgggaaacccagtccgaaaagaaagtcagtccaaccgaaattgtgctggagtcgtttcacaaggccacagctaataaggaaaatgagctttgctccgacgtggagaggcagaaaaaccccgaaaatagtaagctgagcatcgggcagcagaacggaggactgcggtcagaaaagtccatagcctccctccaggagatgacgaaaaaacagggtaccagcagcaacaataaaaatgtgctgagcgtggggaccgccgtgaaagatctcaagcaagagcagactaaaagtgcatcttccctgattacgacagagatgcttcaggacatacaaagacacagttcagtttcccgcctggccgattcttcggatcttcctgttcccagaacgcctggttccggcgctggagaaaaacataaagaggaacctattgacatcataaaggcacccagtagtaggagattctcagaggactcatctactagcaaagtcatggtgccaccagtgacccctgaccttcccgcttgcagtcctgcctctgaaaccggatctgaaaattccgtgaacatggcggctcacaccctaatgatcctgagccgcgcagccatctcccgaacgacatccgccacgccacttaaagataacacacagcagtttcgggcttcctcgaggtccacaacaaagaagcgcaagattgaggaacttgacgagcgagaacgtaactccagacctagctccaaaaacttaaccaattccagcatcccaatgaaaaaaaaaaaaattaaaaaaaaaaagttgccttctagcttcccagctggcatggatgtggataaattccttttgagtctgcactacgacgagtag

SEQ ID NO: 129420 - DNA, 4284 bp, Artificial Sequence
  derived and/or modified sequence
atgctgctgcccagtgatgtggcccggctggtgctgggctacctgcagcaggagaacctgatcagcacctgccagaccttcatcctggagagcagtgacctgaaggagtatgcagagcactgcacagatgagggcttcatcccagcctgcctgctgagcctgtttgggaagaacctgaccaccatcctgaatgaatatgtggccatgaagaccaaggagaccagcaacaacgtgcctgccatcatgagcagcctgtggaagaagctggaccacaccctgagccagatccgctccatgcagagcagccccaggtttgctggcagccagagggcccggaccaggactggaattgctgagatcaagaggcagaggaagctggccagccagacagccccagccagcgctgagctgctgaccctgccctacctgagcggccagttcaccaccccacccagcacaggcacccaggtgacccggcccagcggccagatcagtgaccccagccgcagctactttgtggtggtgaaccacagccagagccaggacacagtgaccaccggggaggccctgaatgtcatccctggggcccaggagaagaaggcccacgccagcctgatgagccctggccgcaggaagtctgagagccagaggaagagcaccaccctgagcggcccccacagcaccatccggaacttccaggaccccaatgcctttgctgtggagaagcagatggtgattgaaaatgcccgggagaagatcctgagcaacaagagcctgcaggagaagctggccgagaacatcaacaagttcctgaccagtgacaacaacatcgcccaggtgcccaagcagacagacaacaaccccacagagcctgagaccagcattgatgagttcctgggcctgcccagcgagatccacatgtctgaggaggccatccaggacatcctggagcagacagaaagtgaccctgccttccaggccctgtttgacctgtttgattatggcaagaccaagaacaacaagaacatcagccagagcatcagcagccagcccatggagagcaaccccagcatcgtgctggctgatgagaccaacctggccgtgaagggcagctttgaaacagaggagagtgatggccagagcggccagcctgccttctgcaccagctaccagaatgatgaccccctgaatgccctgaagaacagcaacaaccatgatgtgctgcggcaggaggaccaggagaacttcagccagatcagcaccagcatccagaagaaggccttcaagacagctgtgcccacagagcagaagtgtgacatcgacatcacctttgagagcgtgcccaacctgaatgacttcaaccagaggggcaacagcaatgctgagtgcaacccccactgtgccgagctgtacaccaaccagatgagcacagaaacagagatggccatcggcatcgagaagaacagcctgagcagcaatgtgcccagcgagagccagctgcagcctgaccagcctgacatccccatcaccagctttgtgtccctgggctgtgaggccaacaatgaaaacctgatcctgagcggcaagagcagccagctgctgagccaggacaccagcctgaccgggaagcccagcaagaagagccagttctgtgagaacagcaatgacacagtgaagctgaagatcaacttccacggcagcaagagcagtgacagcagcgaggtgcacaagagcaagattgagatcaacgtgctggagcctgtgatgagccagctgagcaactgccaggacaacagctgcctgcagagcgagatcctgcctgtgtctgtggagagcagccacctgaatgtgtctggccaggtggagatccacctgggggacagcctgagcagcaccaagcagcccagcaatgattctgcctctgtggagctgaaccacacagaaaatgaggcccaggccagcaagtctgagaacagccaggagcccagcagctctgtgaaggaggagaacaccatcttcctgagcctgggcggcaatgccaactgtgagaaggtggccctgaccccacctgagggcacccctgtggagaacagccacagcctgcccccagagagcgtgtgcagctctgtgggggacagccaccctgagagccagaacacagatgacaagcccagcagcaacaacagcgctgagattgatgccagcaacatcgtgtccctgaaggtgatcatcagtgatgacccctttgtgtccagtgacacagagctgaccagcgctgtgagcagcatcaacggggagaacctgcccaccatcatcctgagcagccccaccaagagccccaccaagaatgctgagctggtgaagtgcctgagcagcgaggagaccgtgggcgctgtggtgtatgcagaggtgggggacagcgcctccatggagcagagcctgctgaccttcaagtctgaggacagcgctgtgaacaacacccagaatgaagatggcatcgccttcagcgccaacgtgaccccctgtgtgtccaaggatggcggctacatccagctgatgcctgccaccagcacagccttcggcaacagcaacaacatcctgattgccacctgtgtgacagaccccacagccctgggcacctctgtgtcccagagcaatgtggtggtgctgcccggcaacagcgcccccatgacagcccagcccctgcccccccagctgcagaccccacccaggagcaacagcgtgtttgctgtgaaccaggccgtgagccccaacttcagccagggcagcgccatcatcatcgccagccctgtgcagcctgtgctgcagggcatggtgggcatgatccctgtgtctgtggtgggccagaatggaaacaacttcagcaccccaccccggcaggtgctgcacatgcccctgacagcccctgtgtgcaacagaagcatcccccagtttcctgtgccccccaagagccagaaggcccagggcctgaggaacaagccctgcatcggcaagcaggtgaacaacctggtggacagcagcggccacagcgtgggctgccacgcccagaagacagaggtgtctgacaagagcatcgccacagacctgggcaagaagtctgaggagaccaccgtgcccttccctgaggagagcatcgtgcctgctgccaagccctgccacagaagagtgctgtgctttgacagcaccacagcccctgtggccaacacccagggccccaaccacaagatggtgtcccagaacaaggagagaaatgctgtgtccttccccaacctggacagccccaacgtgagcagcaccctgaagccacccagcaacaatgccatcaagcgggagaaggagaagccacccctgcccaagatcctgagcaagtctgagagcgccatcagccgccacaccaccatccgggagacccagagcgagaagaaggtgagccccacagaaattgtgctggagagcttccacaaggccacagccaacaaggaaaatgagctgtgcagtgatgtggagcggcagaagaaccctgagaacagcaagctgagcatcggccagcagaatggaggcctgcggtctgagaagagcatcgccagcctgcaggagatgaccaagaagcagggcaccagcagcaacaacaagaatgtgctgtctgtgggcacagctgtgaaggacctgaagcaggagcagaccaagagcgccagcagcctcatcaccacagagatgctgcaggacatccagaggcacagctctgtgtcccggctggccgacagcagtgacctgcctgtgcccaggaccccaggcagcggggccggggagaagcacaaggaggagcccatcgacatcatcaaggcccccagcagccgccgcttcagcgaggacagcagcaccagcaaggtgatggtgccccctgtgaccccagacctgcctgcctgcagccctgccagcgagaccggctctgaaaattctgtgaacatggccgcccacaccctgatgatcctgagcagagctgccatcagcaggaccaccagcgccacccccctgaaggacaacacccagcagttccgggccagcagccgcagcaccaccaagaagaggaagattgaggagctggatgagcgggagaggaacagccggcccagcagcaagaacctgaccaacagcagcatccccatgaagaagaagaagatcaagaagaagaagctgcccagcagcttccctgctggcatggatgtggacaagttcctgctgagcctgcactatgatgaatag

SEQ ID NO: 129421 - DNA, 4284 bp, Artificial Sequence
  derived and/or modified sequence
atgctgctgcccagcgacgtggcccggctggtgctgggctacctgcagcaggaaaatctcatcagtacatgccaaacatttattcttgagtccagtgatctcaaggagtacgccgaacactgcactgatgagggtttcatcccagcctgtctgctgtcgttattcggcaagaatcttacaaccattctgaacgagtatgtcgcgatgaaaacaaaagagacttccaacaatgtgccagcaataatgagctctctgtggaagaaactggaccacacactatcccaaatccgttccatgcaaagtagccctcggttcgctggttcccagcgggcaagaaccaggaccggcatcgctgagatcaagcgccagcgcaaactcgcgagtcagactgctcctgcctccgcggaactgcttaccttgccatacctgtcaggacagttcacgacccccccttccacgggaacccaggtgactaggcccagcggccagattagcgacccctccagaagttatttcgtggttgttaaccactctcagagccaagatactgttaccaccggcgaggcactcaatgttatccctggagcccaggagaagaaagctcacgcatccctaatgtcgccagggaggagaaaaagcgagagtcagcgcaaaagcacaacgctgtctggcccacattctaccattcgcaatttccaggatcccaacgcgttcgccgtagagaagcagatggtaatcgagaatgcaagggagaaaatcttatctaacaaatccctgcaagagaaactggctgagaacattaataaatttcttaccagtgataataatatagctcaagtccccaagcaaaccgataacaatcctacagagcccgaaacatcaatagacgagttcctgggattgccgtctgagattcacatgagcgaagaggctatccaagacattctggaacaaaccgaatcggaccctgcatttcaggccttgttcgacttatttgattatgggaaaacaaagaacaacaaaaatataagccagagtattagcagccagcccatggagtccaatcctagcatcgtattggccgacgaaactaacctggcagtcaagggctcctttgagactgaggagtctgacggacagtcagggcaaccggcattctgcacgagttaccaaaatgatgacccgctgaacgcacttaaaaatagcaataatcacgacgtcctgcggcaggaggaccaggagaatttttctcagattagcacttctatccaaaagaaagcttttaaaacggctgtgcccactgaacagaagtgcgacattgacattacattcgagtcggttcctaaccttaatgatttcaaccaaagaggcaatagcaacgctgagtgcaatccacattgcgcagaactctataccaaccagatgagtacggagacagagatggccataggcatcgaaaagaatagcctctcttctaatgtgccaagcgagtctcaactccagccagatcagcccgatataccaattacaagttttgtgagtcttggctgcgaagcgaacaacgaaaatctgattctgtccggtaaatccagtcagcttctctctcaggacaccagcctaacaggcaagccatctaagaaaagccagttttgcgagaactcaaatgataccgtgaaactcaagattaatttccacggaagcaaatcttctgattctagtgaggtgcataagagcaaaatcgaaataaacgtgcttgaacccgttatgtcacaactctccaactgtcaggacaattcctgcttacagtccgagatactacctgtgtcggtagagtcttctcatttgaatgtgagcggccaagtggagatccacctaggagactcactttcaagtaccaagcagccgtcgaacgattccgctagcgtggagctcaatcacacagagaatgaggcccaggccagcaagtccgagaactctcaggagccgtcaagcagcgtgaaagaggaaaataccatcttcctgtctttgggcggaaatgcaaattgcgagaaggtcgccttgactccaccagaaggcacccctgtagaaaactcacatagtctgcctccagaatccgtctgtagtagtgtaggcgactctcaccctgagtcccagaataccgacgacaaaccgtcatctaataattccgcggaaattgatgcaagtaacatcgtgtcacttaaggtaatcatcagcgacgatccattcgtgagcagcgatacagagctgaccagtgcagtgtcctctatcaacggagaaaacctgcctaccataattctctcttcacccactaagagtcctaccaaaaacgctgagctcgttaaatgcttgtccagcgaagaaacagtgggcgccgtggtttacgctgaggtgggcgatagtgctagtatggagcagtctctgctgaccttcaagtcagaagactccgcggtaaataatacacagaacgaagacggcatcgcctttagcgccaacgttacaccctgtgtttcaaaagacggtggctatattcaactcatgcccgcaacttccacagcgttcggcaattccaataacatcctgatcgccacttgcgtgaccgaccctaccgctctagggacgtcggtctcccagtccaacgtcgttgtccttccaggtaattctgcgccgatgaccgctcagcccctcccacctcagctgcagacaccacccagaagcaatagtgtatttgccgtgaatcaggctgtgagccctaacttctcccagggctccgctattattatcgcctctcctgttcagccagttctacaggggatggtcggtatgatcccagtctctgtagtgggtcaaaacgggaataacttttctacccctccccgccaggtgcttcatatgcccctgacagccccagtgtgcaatcggagtattccacaattccccgtgccccccaaatcccagaaggcccaggggcttcgtaataaaccctgcatcggcaaacaggtaaataatttggtagacagctcaggacattccgtggggtgccacgcccaaaaaaccgaggttagcgataaaagtattgcgaccgacttaggcaagaagagcgaggagaccaccgtcccattcccggaggaaagcattgtgccagctgcgaagccgtgccacaggagggtactctgctttgactcaactaccgcgcctgttgctaatacacaaggtcccaaccataagatggtgagtcaaaacaaagagagaaacgcagtaagctttcccaatcttgacagtccgaatgtcagcagcaccctgaaaccaccatccaacaatgcaatcaagcgcgagaaggagaagccacccctgcctaagatcctttccaaatcagagtccgcaataagccgccacactacgattagagaaacacagtctgagaaaaaggtctcacctactgagatcgtcctggagagcttccacaaagccactgccaataaagagaacgagctctgtagtgacgtggagagacagaagaatcccgagaattccaaattgagcattggccagcagaacggaggactgcggtctgagaagagcattgcttctttgcaagagatgacaaaaaagcagggcacatccagcaacaataagaacgtgctctctgtcgggaccgccgtgaaggatctgaagcaggagcagaccaagtcagcttcatcactgataaccaccgagatgctacaggatattcagagacatagcagcgtctccagactggcagacagcagcgacctacctgtcccaaggacgcctggaagtggtgccggagagaagcataaggaagagccgatcgatatcatcaaagccccctcatcccggagattttctgaggatagttctacctcaaaagttatggtaccgcctgtaactccagatctgcccgcctgctcaccagcctccgaaaccggctctgaaaacagcgtgaacatggcagcacacaccctaatgatcctgagtagagcggccatcagccggactacctcagctaccccactgaaagacaatactcagcagttccgggcgtccagcagatcaaccacaaaaaaaaggaaaattgaagagttagacgagcgagagcgaaactcaagaccctccagcaaaaatctcacgaatagttcaattccaatgaaaaagaagaaaattaagaagaaaaagctgccaagttcctttccagctggtatggatgttgataaattcctactttcactgcactacgacgagtag

SEQ ID NO: 129422 - DNA, 6117 bp, Artificial Sequence
  derived and/or modified sequence
gttcagtgccgccactggaaccaggagatgcggcgcaggagctgtcgctgtgtttgctttaacctgagtcttgttccttattgtggttcctgctgtggttttgatcatgttgttaccctcggacgtagcccggcttgtattgggttacttacagcaagaaaacctcatttctacctgccagacttttattttggaaagttcagatttaaaagaatatgcagaacattgtacagatgaagggtttattccagcctgcttactgtccttatttggaaaaaacttgacaacaattttaaatgagtatgtagctatgaaaacaaaagaaacatcaaataatgtcccagcaataatgtcatctctatggaagaaattggaccatacactttctcagatcaggagcatgcaaagttccccaaggtttgctggcagtcagagagcccgaacgagaactggaattgcagaaatcaaacggcagagaaagcttgcatctcaaacagctccagccagtgcagagttgctcactttaccttacctttcaggacagtttaccactcctccttccacaggtacacaggttactcgaccaagtggccaaatttcagatccatcgaggtcatattttgtagtggtcaaccactcacagtcacaagatactgtaaccactggagaagctttaaatgtcattcctggtgctcaggaaaagaaagcacatgccagtttaatgtctcccggtagacgcaaaagtgaatctcagagaaaaagtaccactttgtctggccctcattcaacaatacggaatttccaagatccaaacgcttttgcagtagaaaaacaaatggttattgaaaatgcacgagaaaaaatactaagcaacaaatctcttcaagaaaagctagcagaaaacataaataaatttttaactagtgataacaatattgcccaagtacctaagcaaacagataacaaccctacggagccagagacttcaattgatgaattcctaggacttccgagtgaaattcacatgtctgaagaagctatacaggacatattggaacagacagaatcagacccagcatttcaggcactctttgatctctttgactatggcaaaacaaagaataataaaaatatatcacaaagtatttccagtcaacctatggaatccaatcccagtatagtcttagcagatgaaactaatctagcagttaaaggttcttttgaaacagaagaatctgatggtcagtctggtcagcccgctttttgtacatcctatcagaatgatgacccattaaatgctttgaagaatagcaacaaccatgatgtgcttagacaagaagaccaggaaaatttttcccaaataagtaccagcatacagaaaaaggcctttaaaacagctgtacccactgaacagaagtgtgacattgacattacctttgagtccgtgcctaatttgaatgactttaaccaaagagggaattctaatgctgaatgtaatccacattgtgctgaattatacaccaatcagatgtccactgaaactgaaatggctatagggattgaaaagaactctttgtcttcaaatgtaccgagtgaatctcagttacagcctgatcagcctgatataccaataacttcatttgtttcacttggttgtgaagctaacaatgaaaacttaattctctctgggaagagttctcaacttttatcccaagatacttcattaactggaaagccatctaaaaaaagtcaattttgtgaaaattctaatgatacagtaaaacttaaaattaattttcatggttccaagtcatcagattctagtgaagttcacaagagtaaaatagaaattaatgtgttagaaccagttatgtcacagctatcaaattgccaagataattcttgtcttcaaagtgaaatactacctgtgtctgttgaaagttcacatttaaatgtatctggacaagtagaaattcatcttggagattcgctgtcttctactaaacaaccatctaatgattcagcatctgttgagttaaatcatacagaaaatgaagctcaggcatccaagtctgagaattcacaggagccttcatcttctgtaaaagaagagaatactatttttctctctttaggtggaaatgctaactgtgagaaagttgcactgacgcctccagaaggcactcctgtagaaaacagtcactctcttcctccagaatctgtgtgttcttcagtgggagattctcaccctgagtcccaaaatactgatgataaaccttctagcaacaactcagcagagatagatgcatcaaatatcgtctctctcaaagttatcattagtgatgatccatttgtttcctcagatactgaacttaccagtgctgtttctagtattaatggagaaaacctgccaactataatcttgtcttctcctactaaatcacctactaaaaatgcagaactagttaaatgcctatcttcagaagaaactgtaggtgctgttgtatatgccgaagtaggggattcagcctcaatggaacagagtcttttaacattcaaatctgaagactctgcagtaaacaatactcagaatgaagatggcattgctttttcagctaatgttacaccatgtgtttccaaggatggaggatatatacagttgatgccagccacaagcacagcttttggcaattcaaataacattctgatagctacctgtgtgactgatccaacagcgttaggaacatctgtaagtcagtctaatgtagtggtgttgcctggaaattctgcacctatgactgctcaacctctaccacctcagttacagacaccaccaaggtcaaacagtgtatttgctgtcaaccaagctgtgtcaccaaacttttcacaaggatctgccataataattgcctctccagtccagcctgtactccaaggaatggtagggatgatcccagtatctgtggttggacagaatggaaataacttttctactcctcctcggcaggttcttcatatgcctttgacagcacctgtatgcaatagaagtatccctcaattccccgtccctccaaaatctcagaaggctcagggactaagaaacaagccttgtataggaaaacaagtaaataatttggtggattcgtcaggtcattcagttggatgtcatgcacaaaaaactgaagtttctgacaaaagtattgccacagatcttgggaaaaaatcagaagaaaccacagttcccttcccagaagagagtatagttccagctgctaaaccatgccacagacgtgtactctgtttcgacagcactactgctcctgtggcaaatacgcaggggccaaaccataagatggtgtcccaaaacaaagaaaggaatgcagtctcttttcctaatcttgactcacccaatgtgtcctccaccttaaaacccccttctaataatgctatcaaaagagagaaagagaagcctcctctgcctaagattttatctaaatcggaaagtgccattagccggcataccaccataagagaaactcaatcagaaaagaaagtttcaccaacagaaattgtgcttgaatctttccataaagcaacagctaataaggagaatgaattatgcagcgatgtagaaagacagaaaaatccagaaaattcaaaactatctattgggcagcaaaatgggggtttgcgaagtgagaaatctatagcttcactgcaagaaatgaccaaaaaacaaggcacatcttcaaacaataaaaatgtactttcagtaggtacagctgtgaaggatctaaaacaagaacaaactaaatccgccagttctttgattaccacagaaatgttacaggatatacagaggcacagctcagtaagtaggcttgctgatagtagtgatttacctgtgccccggacacctggctcaggggcaggggaaaaacataaagaagaacctatagatattatcaaggccccctctagtaggcgtttcagtgaagacagtagtacatcaaaagtaatggtccctcctgtcaccccagacttgcctgcctgcagccctgccagtgaaacaggaagtgaaaacagtgtaaatatggctgcccacacattaatgattctctccagggcagccatttctaggactacttcagcaactcctctgaaagataacacacaacagtttagagcatcttcaaggagcaccacaaaaaagcggaaaattgaggaattagatgaacgtgagcgaaactctcgtccttctagtaaaaatcttacaaattcatcaataccaatgaaaaagaagaaaattaagaaaaagaagcttcccagttcatttccagcaggaatggatgtagacaaatttttgttatcattgcattatgatgagtaaacattctggacacataagaacagtaggtgttaaaaactcatatcccttaaactgagtgtagggaatgggatattgacagaatctgaaagcatgacctgcactttcattgtactgaaacttcactttatatctaaatcatgctgtttctgaaacagcttcctagtttgtaaatagacttacttggtatatttttattttgggaaaaacgtttgcagaaatgtaagtaaagccaatctgcaaaactgtatagctttgacaattccatattgtaaatactgtgtaaatcttgttgaaatagaggttaaatcaacctaatgttcttacactgtgttttttgacttcttatgatccctaattctgagacttactcatctggaatagtttctcacttgttttggaggaaaatgatgcttattcttataaattaccttcagtaactattcaataagacatttaaatacacaatcactaagtactacaaaataataaccacctcaactgatagcaaaatatctaattagaaatcaacagtttgatgagtttttttcctagagtgaatactacccctttcttataattgctgtaagtattatatttctggaatttcacactttacctactctgatcactctgttctctttgttttaaagagagaattttgtaaaccatttattgaatgttctgatctttcatttataacttaagattttttacagaactttaagtggttagactattgagccataaaattttggtttgtagtagagatttctcggtatgtacttttcccctaaatgctggggatttaaagaattgcactaattcatagaactctttacattgtagtgaccaatgcacatataatttaaatcttgtgttctatgtgagagtttatgtggaggattatcttctggtgttgtgtccatcataagatgtaaaaagagaaatcatagttttatattttagtttctcctacaatgggtatgttaaataactatatctatacttagatatagtgcattgtctgtgtcccttaaagtgttacaaagagtttctctcaaaaggtccttaaggagagtgagagatgagagaggtgccttctctgtattagactcacacacatcagtccagttgaagaattggtttaaacttttaaatgagaacagaaattataattagtacctgaccaattgtgcctagatattaaagtatgttctctttagtactttccgttcaattaaatatcagtatattagggatttttttctacaggtgtatattttgttgaagagtcactttcctcaaccatttttttgtactgggcctttaaaaaaataaatccatccaactttaacacaacatttctcagtgtagaaatcatgtcttcttaattgctgaaccttactgcaaaaacttgtgatgtaagaaatttgtatggtgtggcagtggtctattcctaaggaactaaatatcatatagttaatgtttatttaactcagcttgagactgtactacagttaggtttgaataaatattttcattaacttcaaaagtttgaattactttacattggcagtcttgtttagaaactgattaaattcctttgcaagtcagttctttttgggagtttgtacaatgctgaaaatcacagttttcttcttattcaattcatagttgtatgtactaagcactgaaaattcatatacaaataaaataagtttactttc

SEQ ID NO: 129423 - DNA, 4284 bp, Artificial Sequence
  derived and/or modified sequence
atgcttctacccagcgatgtggcccgacttgttctgggttaccttcagcaggagaaccttatctctacgtgccaaactttcattctggaatcctccgacctcaaggagtatgctgaacactgtacagatgagggtttcatacctgcctgcctcctctcacttttcggcaaaaatctgacaacaatcctgaatgaatacgtcgctatgaaaaccaaagagacgtcaaataacgttccagctataatgtcctcactctggaagaagctcgatcacactctctcccaaatcagatcaatgcaatcttccccgagattcgccggttcccaacgagccaggaccagaactggtattgctgagattaaacgccagcgcaaactggcctcccagaccgcaccagccagtgccgagctgctgacactgccgtatctaagcggccagttcacgacccccccttctactggaacacaggtcaccagaccgtccggacagatctctgaccctagccgcagctatttcgtggtcgtgaatcatagtcaaagtcaggacaccgtcacgacgggagaagctctaaacgttatccccggagcgcaggaaaagaaagcccacgccagtctcatgtcccctgggagaaggaagagcgaaagccagcgcaagagcaccactctctctggtccacacagtaccatccggaactttcaggaccctaacgcctttgcggtggagaagcaaatggtcatcgaaaatgctcgcgagaagatcctgtctaataaatcacttcaggagaagctggccgagaacatcaacaaatttctgacttctgataataacatcgctcaggtgcctaaacagactgacaacaatcctacagagcctgaaacatccattgatgagttcctgggccttccttccgaaattcacatgagtgaagaggcaatacaggatatcctggagcagacggaatctgatcccgcattccaggccctgtttgacctctttgactatggcaagacgaaaaataacaagaatatttcccaatctattagcagccagcccatggaaagtaatcccagtatagtgctagccgatgagacaaatcttgctgtgaaaggctccttcgaaacagaggagtcagatggtcagagtgggcaaccagccttctgcaccagctatcaaaatgacgacccactgaacgctctcaagaactctaacaatcatgatgtcttgagacaagaggaccaggagaatttttcccagatcagcacatctattcagaaaaaagcctttaaaacagcagttcctacagagcaaaaatgtgatattgacataacttttgaatctgtgccgaatctgaatgacttcaatcagaggggcaattccaatgctgagtgtaatcctcattgcgccgaactttacaccaaccagatgtccacagagaccgaaatggcaatcggaattgagaaaaattctcttagctccaacgtcccctccgagtcccaactgcagcctgaccagcctgatatcccaataacctcattcgtctccctcggctgcgaggctaataatgaaaatctaattctgagcggcaaatctagccagctgctttcacaagacacctcattgaccggcaaaccatccaaaaaatcgcaattctgcgaaaattctaacgataccgttaaactgaaaatcaacttccacggaagtaagtccagcgacagctctgaggtgcacaaaagcaaaatcgaaatcaatgtgctggagccagtaatgagtcagctaagtaattgccaggacaactcctgcctgcagagcgagattcttcccgtgagtgttgaaagtagtcacctgaatgtgagtggtcaggttgagatccaccttggtgattcactgagctcaaccaagcagccttccaatgactccgctagcgtggaactcaaccacactgaaaatgaagcccaggcctctaagagcgaaaactcccaggaaccttcctcttccgtgaaggaggaaaacactatcttcctaagcctcgggggtaacgcgaattgtgagaaggttgccctgacaccaccagaggggactccggtagagaacagtcactctcttccccctgaatcagtgtgctcatccgttggtgacagccacccagaaagccagaacacagacgacaagccgtccagtaataattctgccgagatcgatgcgtcaaatattgttagcttgaaggttattatctccgatgatcctttcgtttcctctgataccgagcttacgagcgccgtatctagcattaacggggagaacctgcctaccataatcctatcaagtcccacgaagtctccaactaaaaacgccgagctcgtgaaatgcctgagctctgaggagaccgtgggagccgtggtgtatgcagaagtgggcgattcggccagcatggagcagtctctacttacgtttaagtccgaggattcagctgtcaataacacccaaaacgaagatggaatcgcattcagcgccaacgtgaccccctgcgtgtccaaagacgggggatatatccaattgatgcccgctacctctaccgctttcgggaacagcaacaatatcttgatcgccacctgcgtgactgaccccaccgccttggggaccagcgtgtcccagtctaatgtggtcgttctcccaggcaacagcgctccaatgaccgcacagcccctacctccacagttgcaaactccaccccgatctaactccgttttcgctgtgaatcaagctgtgtctcctaatttcagccaggggtccgcaatcattatcgcgtccccagtgcaaccggttctccagggaatggtcggaatgatcccagtgtcggtagtaggccagaacggaaataacttctccacccctcctcgccaggtgctccacatgcctcttacggctccagtgtgcaacaggagcataccgcaattccctgtgcctcctaagtcacaaaaagctcaagggctgcgaaacaaaccctgcatcggaaagcaggtgaacaatttagttgatagctctggtcatagcgtcgggtgtcatgcccaaaagaccgaagtgtctgacaaaagcatcgctaccgatctgggcaaaaagagcgaggagacgactgtcccttttcctgaagagagcattgttcctgctgcaaagccttgtcataggagggttctctgctttgatagtaccacggcccctgtcgccaacactcagggacccaatcacaaaatggttagtcagaataaggagcgaaacgcagtgtccttccctaacctggactcaccaaatgtgtccagcacactgaagccaccgagtaacaatgctatcaaaagagaaaaggagaagccccctctccccaagatcttgagcaagagtgagtctgccatcagcaggcatactacaatccgggaaacgcagtccgagaagaaggtctcccccacagagatcgtgttggaaagctttcacaaggccaccgcgaacaaagaaaacgaactttgctcggacgtggagcgccaaaaaaacccagaaaactcgaagttgtcgataggtcaacagaatggcggattacggtctgagaagtcaatagcatctcttcaagagatgacgaagaagcagggaacaagttcaaacaataagaacgtgctgtccgtggggacggcagtcaaggacctaaagcaagagcaaactaaatcggcttcttccctgattaccacagaaatgttacaggatatccaaagacattctagtgtgtctcggctggccgacagttccgacttgccagttcccaggacgcctggaagcggggctggcgaaaagcacaaagaagagccaattgacatcataaaagcgcctagttctcgtcgcttcagcgaggactcatcaacctccaaggtgatggtgccacctgtaacccctgacctgcccgcttgctcgccagcgtcggaaactggaagtgaaaatagcgtgaatatggctgctcatacacttatgattttgtcacgcgcagccatctccagaaccaccagcgccaccccattgaaagacaatacacagcagtttagggccagcagccgctccaccactaaaaagagaaagatagaggaactcgacgaaagagaaagaaattctcggccatcctcaaagaatctgaccaatagcagcataccaatgaaaaagaagaaaattaaaaaaaagaagctcccgtccagcttcccggcagggatggacgtggataagttcttgctgagcctgcattacgacgaatag

SEQ ID NO: 129424 - DNA, 4284 bp, Artificial Sequence
  derived and/or modified sequence
atgctgctgcccagcgacgtggccagactggtgctgggctacctgcagcaggagaacctgatcagcacctgccagaccttcatcctggagagcagcgacctgaaggagtacgccgagcactgcaccgacgagggcttcatccccgcctgcctgctgagcctgttcggcaagaacctgaccaccatcctgaacgagtacgtggccatgaagaccaaggagaccagcaacaacgtgcccgccatcatgagcagcctgtggaagaagctggaccacaccctgagccagatcagaagcatgcagagcagccccagattcgccggcagccagagagccagaaccagaaccggcatcgccgagatcaagagacagagaaagctggccagccagaccgcccccgccagcgccgagctgctgaccctgccctacctgagcggccagttcaccaccccccccagcaccggcacccaggtgaccagacccagcggccagatcagcgaccccagcagaagctacttcgtggtggtgaaccacagccagagccaggacaccgtgaccaccggcgaggccctgaacgtgatccccggcgcccaggagaagaaggcccacgccagcctgatgagccccggcagaagaaagagcgagagccagagaaagagcaccaccctgagcggcccccacagcaccatcagaaacttccaggaccccaacgccttcgccgtggagaagcagatggtgatcgagaacgccagagagaagatcctgagcaacaagagcctgcaggagaagctggccgagaacatcaacaagttcctgaccagcgacaacaacatcgcccaggtgcccaagcagaccgacaacaaccccaccgagcccgagaccagcatcgacgagttcctgggcctgcccagcgagatccacatgagcgaggaggccatccaggacatcctggagcagaccgagagcgaccccgccttccaggccctgttcgacctgttcgactacggcaagaccaagaacaacaagaacatcagccagagcatcagcagccagcccatggagagcaaccccagcatcgtgctggccgacgagaccaacctggccgtgaagggcagcttcgagaccgaggagagcgacggccagagcggccagcccgccttctgcaccagctaccagaacgacgaccccctgaacgccctgaagaacagcaacaaccacgacgtgctgagacaggaggaccaggagaacttcagccagatcagcaccagcatccagaagaaggccttcaagaccgccgtgcccaccgagcagaagtgcgacatcgacatcaccttcgagagcgtgcccaacctgaacgacttcaaccagagaggcaacagcaacgccgagtgcaacccccactgcgccgagctgtacaccaaccagatgagcaccgagaccgagatggccatcggcatcgagaagaacagcctgagcagcaacgtgcccagcgagagccagctgcagcccgaccagcccgacatccccatcaccagcttcgtgagcctgggctgcgaggccaacaacgagaacctgatcctgagcggcaagagcagccagctgctgagccaggacaccagcctgaccggcaagcccagcaagaagagccagttctgcgagaacagcaacgacaccgtgaagctgaagatcaacttccacggcagcaagagcagcgacagcagcgaggtgcacaagagcaagatcgagatcaacgtgctggagcccgtgatgagccagctgagcaactgccaggacaacagctgcctgcagagcgagatcctgcccgtgagcgtggagagcagccacctgaacgtgagcggccaggtggagatccacctgggcgacagcctgagcagcaccaagcagcccagcaacgacagcgccagcgtggagctgaaccacaccgagaacgaggcccaggccagcaagagcgagaacagccaggagcccagcagcagcgtgaaggaggagaacaccatcttcctgagcctgggcggcaacgccaactgcgagaaggtggccctgaccccccccgagggcacccccgtggagaacagccacagcctgccccccgagagcgtgtgcagcagcgtgggcgacagccaccccgagagccagaacaccgacgacaagcccagcagcaacaacagcgccgagatcgacgccagcaacatcgtgagcctgaaggtgatcatcagcgacgaccccttcgtgagcagcgacaccgagctgaccagcgccgtgagcagcatcaacggcgagaacctgcccaccatcatcctgagcagccccaccaagagccccaccaagaacgccgagctggtgaagtgcctgagcagcgaggagaccgtgggcgccgtggtgtacgccgaggtgggcgacagcgccagcatggagcagagcctgctgaccttcaagagcgaggacagcgccgtgaacaacacccagaacgaggacggcatcgccttcagcgccaacgtgaccccctgcgtgagcaaggacggcggctacatccagctgatgcccgccaccagcaccgccttcggcaacagcaacaacatcctgatcgccacctgcgtgaccgaccccaccgccctgggcaccagcgtgagccagagcaacgtggtggtgctgcccggcaacagcgcccccatgaccgcccagcccctgcccccccagctgcagaccccccccagaagcaacagcgtgttcgccgtgaaccaggccgtgagccccaacttcagccagggcagcgccatcatcatcgccagccccgtgcagcccgtgctgcagggcatggtgggcatgatccccgtgagcgtggtgggccagaacggcaacaacttcagcaccccccccagacaggtgctgcacatgcccctgaccgcccccgtgtgcaacagaagcatcccccagttccccgtgccccccaagagccagaaggcccagggcctgagaaacaagccctgcatcggcaagcaggtgaacaacctggtggacagcagcggccacagcgtgggctgccacgcccagaagaccgaggtgagcgacaagagcatcgccaccgacctgggcaagaagagcgaggagaccaccgtgcccttccccgaggagagcatcgtgcccgccgccaagccctgccacagaagagtgctgtgcttcgacagcaccaccgcccccgtggccaacacccagggccccaaccacaagatggtgagccagaacaaggagagaaacgccgtgagcttccccaacctggacagccccaacgtgagcagcaccctgaagccccccagcaacaacgccatcaagagagagaaggagaagccccccctgcccaagatcctgagcaagagcgagagcgccatcagcagacacaccaccatcagagagacccagagcgagaagaaggtgagccccaccgagatcgtgctggagagcttccacaaggccaccgccaacaaggagaacgagctgtgcagcgacgtggagagacagaagaaccccgagaacagcaagctgagcatcggccagcagaacggcggcctgagaagcgagaagagcatcgccagcctgcaggagatgaccaagaagcagggcaccagcagcaacaacaagaacgtgctgagcgtgggcaccgccgtgaaggacctgaagcaggagcagaccaagagcgccagcagcctgatcaccaccgagatgctgcaggacatccagagacacagcagcgtgagcagactggccgacagcagcgacctgcccgtgcccagaacccccggcagcggcgccggcgagaagcacaaggaggagcccatcgacatcatcaaggcccccagcagcagaagattcagcgaggacagcagcaccagcaaggtgatggtgccccccgtgacccccgacctgcccgcctgcagccccgccagcgagaccggcagcgagaacagcgtgaacatggccgcccacaccctgatgatcctgagcagagccgccatcagcagaaccaccagcgccacccccctgaaggacaacacccagcagttcagagccagcagcagaagcaccaccaagaagagaaagatcgaggagctggacgagagagagagaaacagcagacccagcagcaagaacctgaccaacagcagcatccccatgaagaagaagaagatcaagaagaagaagctgcccagcagcttccccgccggcatggacgtggacaagttcctgctgagcctgcactacgacgagtag

SEQ ID NO: 129425 - protein, 294 aa, Artificial Sequence
  derived and/or modified sequence
MEDSMDMDMSPLRPQNYLFGCELKADKDYHFKVDNDENEHQLSLRTVSLGAGAKDELHIVEAEAMNYEGSPIKVTLATLKMSVQPTVSLGGFEITPPVVLRLKCGSGPVHISGQHLVAVEEDAESEDEEEEDVKLLSISGKRSAPGGGSKVPQKKVKLAADEDDDDDDEEDDDEDDDDDDFDDEEAEEKAPVKKSIRDTPAKNAQKSNQNGKDSKPSSTPRSKGQESFKKQEKTPKTPKGPSSVEDIKAKMQASIEKGGSLPKVEAKFINYVKNCFRMTDQEAIQDLWQWRKSL

SEQ ID NO: 129426 - DNA, 885 bp, Artificial Sequence
  derived and/or modified sequence
atggaggacagcatggacatggacatgagccccctgagaccccagaactacctgttcggctgcgagctgaaggccgacaaggactaccacttcaaggtggacaacgacgagaacgagcaccagctgagcctgagaaccgtgagcctgggcgccggcgccaaggacgagctgcacatcgtggaggccgaggccatgaactacgagggcagccccatcaaggtgaccctggccaccctgaagatgagcgtgcagcccaccgtgagcctgggcggcttcgagatcaccccccccgtggtgctgagactgaagtgcggcagcggccccgtgcacatcagcggccagcacctggtggccgtggaggaggacgccgagagcgaggacgaggaggaggaggacgtgaagctgctgagcatcagcggcaagagaagcgcccccggcggcggcagcaaggtgccccagaagaaggtgaagctggccgccgacgaggacgacgacgacgacgacgaggaggacgacgacgaggacgacgacgacgacgacttcgacgacgaggaggccgaggagaaggcccccgtgaagaagagcatcagagacacccccgccaagaacgcccagaagagcaaccagaacggcaaggacagcaagcccagcagcacccccagaagcaagggccaggagagcttcaagaagcaggagaagacccccaagacccccaagggccccagcagcgtggaggacatcaaggccaagatgcaggccagcatcgagaagggcggcagcctgcccaaggtggaggccaagttcatcaactacgtgaagaactgcttcagaatgaccgaccaggaggccatccaggacctgtggcagtggagaaagagcctgtag

SEQ ID NO: 129427 - DNA, 885 bp, Artificial Sequence
  derived and/or modified sequence
atggaggatagtatggatatggacatgtccccattgcgcccgcagaattacctttttggatgcgagctgaaggccgacaaagactatcactttaaagtggacaacgatgaaaacgaacaccagttgagcttaagaacagtgtccctcggggctggagcaaaagacgagctgcacattgtggaggccgaggcgatgaactatgaaggctccccgatcaaagtgactctcgccaccctcaagatgagtgtgcagcctacagtttcactgggagggtttgaaattactccccctgtagtcctgcgactgaagtgcggctctggaccagtccatatttccggccagcacctggttgccgtggaagaagacgccgagagcgaggacgaggaagaggaagacgtgaagctcctctctatctccggcaaacgcagcgcccctggaggaggatcgaaagtgccacaaaagaaggtgaagctggccgctgacgaggatgatgatgacgatgatgaggaggacgatgatgaggatgatgacgacgacgattttgacgacgaggaggctgaggagaaagctcccgttaagaagagcatcagggacacaccagctaaaaatgcccagaaatctaatcagaatgggaaggattccaagccttcttccacaccgagatccaagggacaggagtcctttaagaagcaggaaaaaaccccgaaaacgcctaaaggtccatcttcagtcgaggatatcaaagccaagatgcaggccagcatcgagaaggggggctctctccctaaagtggaggcaaagttcatcaactacgtgaagaactgttttcggatgactgaccaagaggcaatccaagatctgtggcaatggcgcaagagcctgtag

SEQ ID NO: 129428 - DNA, 885 bp, Artificial Sequence
  derived and/or modified sequence
atggaagattccatggacatggatatgagccccctccggccccagaactatctcttcggttgcgagctgaaagccgacaaggattaccattttaaagtggacaacgacgagaatgagcatcagctgtcattaaggacagtgagtctaggagccggagctaaggatgagctccacatcgtcgaggccgaggcaatgaactacgaaggctcacctattaaagtaactcttgccaccctgaagatgtccgtccagcccaccgtctctctcggcgggttcgaaatcacccctcccgtcgtgctccgcctgaagtgtggctcgggacccgtgcacatttccggacagcacttggtcgctgttgaggaggacgctgagagcgaggacgaagaggaggaagacgtaaagctgctgtctatctcggggaagagatcagcccccggcgggggatccaaggtgccccagaagaaagtgaagctggccgcggacgaggatgacgacgatgatgatgaagaggacgatgacgaagatgacgatgacgacgatttcgatgatgaagaagccgaggaaaaggcacccgttaaaaaaagcatacgggatacccctgccaaaaatgcacaaaaatccaatcagaatgggaaggacagcaagccaagtagcacccctcggagtaagggccaggagagctttaagaagcaagagaaaacccccaaaacaccaaagggcccttcgtctgtggaggacattaaggctaaaatgcaggccagcatagagaaaggggggtcacttccgaaggtcgaggcaaagtttatcaattacgtcaagaactgtttccggatgactgaccaggaggcgattcaggacttgtggcagtggcgcaagtcgctctag

SEQ ID NO: 129429 - DNA, 885 bp, Artificial Sequence
  derived and/or modified sequence
atggaggacagcatggacatggacatgagccccctgcggccccagaactacctgtttggctgtgagctgaaggctgacaaggactaccacttcaaggtggacaatgatgaaaatgagcaccagctgagcctgaggacagtgtccctgggcgctggggccaaggatgagctgcacatcgtggaggccgaggccatgaactatgagggcagccccatcaaggtgaccctggccaccctgaagatgtctgtgcagcccaccgtgtccctgggcggctttgagatcaccccacctgtggtgctgcggctgaagtgtggcagcggccctgtgcacatcagcggccagcacctggtggccgtggaggaggatgctgagagtgaagatgaggaggaggaggatgtgaagctgctgagcatcagcggcaagaggtctgcccctgggggcggcagcaaggtgccccagaagaaggtgaagctggccgcagatgaagatgatgatgatgatgatgaggaggatgatgatgaagatgatgatgatgatgactttgatgatgaggaggccgaggagaaggcccctgtgaagaagagcatccgggacaccccagccaagaatgcccagaagagcaaccagaatggcaaggacagcaagcccagcagcacccccaggagcaagggccaggagagcttcaagaagcaggagaagacccccaagacccccaagggccccagctctgtggaggacatcaaggccaagatgcaggccagcattgaaaaaggaggcagcctgcccaaggtggaggccaagttcatcaactacgtgaagaactgcttcaggatgacagaccaggaggccatccaggacctgtggcagtggaggaagagcctgtag

SEQ ID NO: 129430 - DNA, 885 bp, Artificial Sequence
  derived and/or modified sequence
atggaggacagcatggacatggacatgagccccctgcggccccagaactacctcttcgggtgcgagctcaaggccgacaaggactaccactttaaggtagacaatgacgaaaacgaacatcaactctcattgcgcacagtgtctctgggggccggggcaaaagacgagctgcacattgtggaagcagaggcgatgaactacgaaggcagccccattaaagtgaccctggcaacattaaaaatgtccgtgcagcccactgtgagtctgggaggcttcgaaatcacccctccggttgtcctgcggctcaaatgcgggagtgggcctgtgcacatcagtggtcagcatctagtcgccgtcgaagaggacgccgaatctgaggatgaagaggaggaggatgtgaaactactgagcatttccggcaagaggtctgcacccggtggaggatccaaggtgccacaaaagaaggtcaagctagcggcagatgaagacgacgacgacgatgacgaagaagacgatgacgaagatgatgatgatgacgacttcgacgatgaagaggcagaagaaaaagccccagtcaagaagtcaatccgtgacacccccgccaagaatgcccaaaagtccaatcagaacggaaaagactccaaaccaagctctactcccaggtcgaagggacaggaatcttttaaaaaacaggagaaaactccgaagacacctaagggaccttcctccgtggaggacatcaaggccaaaatgcaggcttcaatagaaaagggcggcagcctacccaaagtggaagccaagttcataaactacgttaaaaattgctttcggatgaccgatcaagaggccatacaggatttgtggcagtggaggaagagtctttag

SEQ ID NO: 129431 - DNA, 885 bp, Artificial Sequence
  derived and/or modified sequence
atggaggacagcatggacatggacatgagccccctgcggccccagaattatctctttggctgtgagctaaaagctgacaaagactatcattttaaagtcgacaatgacgaaaacgaacaccagctcagtttgagaactgtgagtcttggagccggagccaaggacgagctgcacattgtcgaagcagaggctatgaactatgagggcagcccaattaaggtgaccctggctaccctgaagatgagcgtgcagccaacagtgagcctgggcgggttcgagatcacaccccctgtggtcctcaggctgaaatgtggaagtggccctgtgcatatcagtggtcagcacctggtcgccgttgaagaagacgcagagtctgaggatgaggaagaggaagatgtgaaattgctgtctatatcgggaaagaggtctgcaccagggggaggttctaaggtgccacaaaaaaaggtgaagttagccgcagatgaggatgacgacgacgacgatgaggaggatgatgacgaggacgacgatgatgatgactttgatgacgaggaggcggaggaaaaggcacccgtgaagaaaagtatccgtgatacccctgccaagaacgctcagaaatcaaaccagaacggcaaggactccaagccctccagcaccccccgttcaaaaggccaggagtcctttaaaaaacaagagaaaacccccaagacaccaaaagggccctcatcagtggaagatatcaaagcgaaaatgcaggccagcatcgagaagggcggaagcttacctaaagtggaagccaagtttatcaactatgtgaagaattgctttaggatgactgaccaagaggctatacaagatctgtggcagtggagaaaaagcctgtag

SEQ ID NO: 129432 - DNA, 1758 bp, Artificial Sequence
  derived and/or modified sequence
agtgcgcgtgctcggtgggagcccgcggagtacctggaaggaggtgggggcgaggtagaaaggagtggggttgaaaagcgcttgcgcaggacggctacggtacgggggtgggagggcttcggagcacgcgcgcggaggcgggacttgggaagcgctcgcgagatcttcagggtctatatataagcgcggggagcctgcgtcctttccctggtgtgattccgtcctgcgcggttgttctctggagcagcgttcttttatctccgtccgccttctctcctacctaagtgcgtgccgccacccgatggaagattcgatggacatggacatgagccccctgaggccccagaactatcttttcggttgtgaactaaaggccgacaaagattatcactttaaggtggataatgatgaaaatgagcaccagttatctttaagaacggtcagtttaggggctggtgcaaaggatgagttgcacattgttgaagcagaggcaatgaattacgaaggcagtccaattaaagtaacactggcaactttgaaaatgtctgtacagccaacggtttcccttgggggctttgaaataacaccaccagtggtcttaaggttgaagtgtggttcagggccagtgcatattagtggacagcacttagtagctgtggaggaagatgcagagtcagaagatgaagaggaggaggatgtgaaactcttaagtatatctggaaagcggtctgcccctggaggtggtagcaaggttccacagaaaaaagtaaaacttgctgctgatgaagatgatgacgatgatgatgaagaggatgatgatgaagatgatgatgatgatgattttgatgatgaggaagctgaagaaaaagcgccagtgaagaaatctatacgagatactccagccaaaaatgcacaaaagtcaaatcagaatggaaaagactcaaaaccatcatcaacaccaagatcaaaaggacaagaatccttcaagaaacaggaaaaaactcctaaaacaccaaaaggacctagttctgtagaagacattaaagcaaaaatgcaagcaagtatagaaaaaggtggttctcttcccaaagtggaagccaaattcatcaattatgtgaagaattgcttccggatgactgaccaagaggctattcaagatctctggcagtggaggaagtctctttaagaaaatagtttaaacaatttgttaaaaaattttccgtcttatttcatttctgtaacagttgatatctggctgtcctttttataatgcagagtgagaactttccctaccgtgtttgataaatgttgtccaggttctattgccaagaatgtgttgtccaaaatgcctgtttagtttttaaagatggaactccaccctttgcttggttttaagtatgtatggaatgttatgataggacatagtagtagcggtggtcagacatggaaatggtggggagacaaaaatatacatgtgaaataaaactcagtattttaataaagtagcacggtttctattgacttatttaactgctttatactttgtcaaagaaataattaatgtagttaggaatggcaaatagtcttgtaaaattctatgagaatgtccctgccctccccttcaatattctctctggagctaaccactttttcatcataaggatttagtgctgtgttcccacctcctgatgatagttaacaattattataactatgcaacatgtttccaaatgttccattagacctcctatctgccta

SEQ ID NO: 129433 - DNA, 1338 bp, Artificial Sequence
  derived and/or modified sequence
gggcgatgtccttgctaatttggagactgattcagtccccttttggcccccaagttacgtaaagataaggactttggagatgttttctcaggaaggacagagctgaaaaacaaagttcctgcgtgccgccacccgatggaagattcgatggacatggacatgagccccctgaggccccagaactatcttttcggttgtgaactaaaggccgacaaagattatcactttaaggtggataatgatgaaaatgagcaccagttatctttaagaacggtcagtttaggggctggtgcaaaggatgagttgcacattgttgaagcagaggcaatgaattacgaaggcagtccaattaaagtaacactggcaactttgaaaatgtctgtacagccaacggtttcccttgggggctttgaaataacaccaccagtggtcttaaggttgaagtgtggttcagggccagtgcatattagtggacagcacttagtagctgtggaggaagatgcagagtcagaagatgaagaggaggaggatgtgaaactcttaagtatatctggaaagcggtctgcccctggaggtggtagcaaggttccacagaaaaaagtaaaacttgctgctgatgaagatgatgacgatgatgatgaagaggatgatgatgaagatgatgatgatgatgattttgatgatgaggaagctgaagaaaaagcgccagtgaagaaatctatacgagatactccagccaaaaatgcacaaaagtcaaatcagaatggaaaagactcaaaaccatcatcaacaccaagatcaaaaggacaagaatccttcaagaaacaggaaaaaactcctaaaacaccaaaaggacctagttctgtagaagacattaaagcaaaaatgcaagcaagtatagaaaaaggtggttctcttcccaaagtggaagccaaattcatcaattatgtgaagaattgcttccggatgactgaccaagaggctattcaagatctctggcagtggaggaagtctctttaagaaaatagtttaaacaatttgttaaaaaattttccgtcttatttcatttctgtaacagttgatatctggctgtcctttttataatgcagagtgagaactttccctaccgtgtttgataaatgttgtccaggttctattgccaagaatgtgttgtccaaaatgcctgtttagtttttaaagatggaactccaccctttgcttggttttaagtatgtatggaatgttatgataggacatagtagtagcggtggtcagacatggaaatggtggggagacaaaaatatacatgtgaaataaaactcagtattttaataaagt

SEQ ID NO: 129434 - DNA, 885 bp, Artificial Sequence
  derived and/or modified sequence
atggaagactctatggacatggatatgagccccctgaggccacagaactaccttttcggttgcgaactgaaagcagacaaggactaccattttaaggtcgacaatgatgaaaatgagcatcagctttccctaagaacagtctctctaggagccggtgccaaagacgagctgcatatcgtcgaagcagaagctatgaattatgagggaagtcccattaaggtaactttggcgacactgaaaatgtcagtgcaaccaaccgtatccctgggaggctttgaaatcactccacccgtcgtcttgcgcctgaaatgcggctcagggcctgtccatatttctggacagcacttggtcgccgttgaggaagatgctgaatctgaggacgaagaagaagaggacgtcaaactcctttcaatatctggcaagcggagcgctcctgggggtggctctaaggtaccccaaaagaaagtaaagctagccgctgacgaggacgacgatgacgatgatgaagaggatgacgacgaggacgatgacgatgatgatttcgatgatgaggaggcagaagaaaaggcacctgttaagaagtcaattagagatacaccggctaaaaatgcacagaagtcgaatcagaacggcaaggactctaagccctcttcgacacctcgcagcaaaggtcaggaatcatttaagaaacaggagaagacacccaaaaccccaaaagggccatcctcggtagaggacattaaggccaagatgcaggccagcatagagaagggcggtagtctgcccaaggttgaggccaaattcattaactatgtgaagaactgttttcgaatgacagatcaggaagctatccaagatctgtggcagtggcggaagtccctttag

SEQ ID NO: 129435 - DNA, 885 bp, Artificial Sequence
  derived and/or modified sequence
atggaggatagcatggacatggatatgtccccgctgcgccctcagaactatttattcgggtgcgagctgaaggctgacaaagactatcactttaaggtcgataatgacgagaacgagcatcagctgtctctccgtacagtgtcactgggcgcaggcgcaaaggacgagctgcacattgtggaggccgaggctatgaactatgaaggttcaccgattaaggtcacattagctaccctgaaaatgtctgttcaacccacagtgtcacttggtgggtttgaaatcacacctcctgtcgtcctgcgattgaagtgtggctctggccctgtgcacataagcggccagcacttggttgccgtggaagaggatgcagaatccgaggacgaggaagaggaggacgtaaagttgttgagcattagtgggaagcggtccgctcccggaggtgggagtaaggtacctcaaaaaaaggtgaagcttgccgctgacgaagatgacgatgacgacgatgaagaggatgacgatgaggatgatgacgatgacgattttgatgacgaggaggctgaggagaaggcccctgtaaagaagtctattcgtgacacccctgctaaaaacgcccagaagtcaaatcagaatggtaaagatagcaagccatcgagtactccacgttccaagggacaggagagcttcaagaagcaggagaaaacacccaaaacaccaaaggggccatcaagtgtcgaggacataaaagccaagatgcaggcgagcatagaaaaaggtggttcgctgccaaaggtcgaagccaaatttattaattatgttaagaattgttttagaatgactgaccaagaagcaatccaggacctttggcagtggagaaaaagtctttag

SEQ ID NO: 129436 - protein, 432 aa, Artificial Sequence
  derived and/or modified sequence
MPAGRAARTCALLALCLLGAGAQDFGPTRFICTSVPVDADMCAASVAAGGAEELRSSVLQLRETVLQQKETILSQKETIRELTAKLGRCESQSTLDPGAGEARAGGGRKQPGSGKNTMGDLSRTPAAETLSQLGQTLQSLKTRLENLEQYSRLNSSSQTNSLKDLLQSKIDELERQVLSRVNTLEEGKGGPRNDTEERVKIETALTSLHQRISELEKGQKDNRPGDKFQLTFPLRTNYMYAKVKKSLPEMYAFTVCMWLKSSATPGVGTPFSYAVPGQANELVLIEWGNNPMEILINDKVAKLPFVINDGKWHHICVTWTTRDGVWEAYQDGTQGGSGENLAPYHPIKPQGVLVLGQEQDTLGGGFDATQAFVGELAHFNIWDRKLTPGEVYNLATCSTKALSGNVIAWAESHIEIYGGATKWTFEACRQIN

SEQ ID NO: 129437 - protein, 194 aa, Artificial Sequence
  derived and/or modified sequence
MYAKVKKSLPEMYAFTVCMWLKSSATPGVGTPFSYAVPGQANELVLIEWGNNPMEILINDKVAKLPFVINDGKWHHICVTWTTRDGVWEAYQDGTQGGSGENLAPYHPIKPQGVLVLGQEQDTLGGGFDATQAFVGELAHFNIWDRKLTPGEVYNLATCSTKALSGNVIAWAESHIEIYGGATKWTFEACRQIN

SEQ ID NO: 129438 - DNA, 1299 bp, Artificial Sequence
  derived and/or modified sequence
atgcccgcaggacgagccgcccgaacatgtgctctgctggccctgtgcttgttgggggccggcgcccaggattttggccccacaaggtttatctgtacttcagtgcccgtagatgctgacatgtgcgccgcctctgttgccgccggcggcgccgaagagctgcggtcgtcagttctgcagctgagagaaaccgtgctgcagcagaaggagactatcctgagtcaaaaagagaccatcagagaactgactgcaaagcttggaaggtgtgaatctcaatccacgctggacccaggcgcgggcgaggccagggcaggggggggtcggaagcagcccggcagcggcaagaacaccatgggagacctgtcccggacccccgcagctgaaaccctttcacaacttggacagacactgcagtccctcaaaacaagactggagaatctcgagcagtactcaagactaaattcctcgtctcaaaccaatagcctgaaagatttactgcagtcgaagatcgatgagctggaacggcaggtgctgtcacgcgtaaacactctggaggagggaaaaggcgggccacggaacgataccgaggagcgcgtgaaaatagagacagccttgacatccctgcaccagagaatctccgaactagaaaaagggcagaaggataacagaccaggggataaattccagctgacctttccactgcggacaaactatatgtatgccaaggtcaagaagagcctccccgagatgtatgctttcacagtgtgcatgtggctgaagagttcggcaacaccgggagtcggaaccccttttagttacgccgtgccaggtcaggcaaacgaactggtcctgatagagtggggaaataaccccatggaaattctaataaacgacaaggtcgctaaactgccttttgtgataaacgatggcaaatggcaccatatctgtgtgacatggacaacccgagatggcgtctgggaagcataccaagatggtactcaaggcggcagcggcgagaacctggcaccatatcaccccatcaaacctcagggagtccttgtgctgggtcaggagcaagatactcttggagggggctttgatgctacgcaggccttcgtgggggaattggcacactttaatatctgggatagaaagctgacaccgggcgaagtatataacctggcgacgtgttctaccaaagctttgtcagggaacgtgatcgcctgggccgagagccatatagagatatatgggggggctacaaagtggacgttcgaagcttgtcggcagattaactag

SEQ ID NO: 129439 - DNA, 585 bp, Artificial Sequence
  derived and/or modified sequence
atgtacgccaaagtgaagaaatcactgcccgagatgtatgcctttacagtctgcatgtggcttaaaagtagcgctactccgggggtcggcacgccattcagttatgctgtcccgggtcaggctaatgaactggtcttgatcgagtggggtaacaatcccatggagattttaattaacgataaggtggctaaactgccgtttgttataaatgacggcaaatggcaccacatttgtgtgacctggacaacacgggatggagtgtgggaagcatatcaagatgggacacagggaggctcaggggagaacctcgccccttaccatccgatcaaaccccagggcgttctcgtgcttggacaggagcaggacactcttggtggaggatttgacgccactcaagcgttcgtaggggagctagcacattttaacatatgggataggaagctgaccccaggggaagtatacaacctcgcgacctgcagcactaaggcactctcaggaaacgtgatagcctgggctgagtctcacatcgagatttacgggggcgcgactaaatggacatttgaggcttgtcggcaaatcaactag

SEQ ID NO: 129440 - DNA, 1299 bp, Artificial Sequence
  derived and/or modified sequence
atgcctgctggccgggccgcccggacctgtgccctgctggccctgtgcctgctgggcgctggggcccaggactttggccccacccgcttcatctgcacctctgtgcctgtggatgctgacatgtgtgccgcctctgtggccgccggcggcgctgaggagctgcggagctctgtgctgcagctgcgggagaccgtgctgcagcagaaggagaccatcctgagccagaaggagaccatccgggagctgacagccaagctgggccgctgtgagagccagagcaccctggaccctggagctggggaggcccgggccggcggcggcaggaagcagcccggcagcggcaagaacaccatgggagacctgagcaggaccccagctgctgagaccctgagccagctgggccagaccctgcagagcctgaagacccggctggagaacctggagcagtacagccggctgaacagcagcagccagaccaacagcctgaaggacctgctgcagagcaagattgatgagctggagcggcaggtgctgagccgggtgaacaccctggaggagggcaagggcggccccagaaatgacacagaggagcgggtgaagattgaaacagccctgaccagcctgcaccagaggatcagcgagctggagaagggccagaaggacaacagacctggggacaagttccagctgaccttccccctgcggaccaactacatgtatgccaaggtgaagaagagcctgcctgagatgtatgccttcaccgtgtgcatgtggctgaagagcagcgccaccccaggagtgggcacccccttctcctatgctgtgcccggccaggccaatgagctggtgctgattgagtggggcaacaaccccatggagatcctgatcaatgacaaggtggccaagctgccctttgtgatcaatgatggcaagtggcaccacatctgtgtgacctggaccaccagagatggagtgtgggaggcctaccaggacggcacccagggcggcagcggggagaacctggccccctaccaccccatcaagccccagggcgtgctggtgctgggccaggagcaggacaccctgggcggcggctttgatgccacccaggcctttgtgggggagctggcccacttcaacatctgggacaggaagctgaccccaggagaggtgtacaacctggccacctgcagcaccaaggccctgtctggaaatgtgattgcctgggccgagagccacatcgagatctatggaggagccaccaagtggacctttgaggcctgccggcagatcaactag

SEQ ID NO: 129441 - DNA, 585 bp, Artificial Sequence
  derived and/or modified sequence
atgtatgccaaggtgaagaagagcctgcctgagatgtatgccttcaccgtgtgcatgtggctgaagagcagcgccaccccaggagtgggcacccccttctcctatgctgtgcccggccaggccaatgagctggtgctgattgagtggggcaacaaccccatggagatcctgatcaatgacaaggtggccaagctgccctttgtgatcaatgatggcaagtggcaccacatctgtgtgacctggaccaccagagatggagtgtgggaggcctaccaggacggcacccagggcggcagcggggagaacctggccccctaccaccccatcaagccccagggcgtgctggtgctgggccaggagcaggacaccctgggcggcggctttgatgccacccaggcctttgtgggggagctggcccacttcaacatctgggacaggaagctgaccccaggagaggtgtacaacctggccacctgcagcaccaaggccctgtctggaaatgtgattgcctgggccgagagccacatcgagatctatggaggagccaccaagtggacctttgaggcctgccggcagatcaactag

SEQ ID NO: 129442 - DNA, 1299 bp, Artificial Sequence
  derived and/or modified sequence
atgcccgccggccgggccgcccggacctgcgccctgctggccctgtgccttctgggcgccggcgcccaggatttcggcccaactcggtttatctgcacaagcgtgccggtggacgctgatatgtgcgcagccagcgtggctgccggtggagccgaagaactccgctccagtgtgcttcagttgcgcgaaaccgtgctccaacaaaaagaaaccatcctgagccaaaaagaaactatcagggaattaactgcaaagctagggcgatgcgagtcgcagagcacgctggaccctggcgcaggggaggcacgagccggcggcggaagaaaacaacctggcagcggcaagaacactatgggcgatctgagtcgcacacctgctgctgagactctaagccagttagggcagacattacaaagtctaaagacaaggttggaaaacctggagcagtatagcaggctgaatagctcaagccagacaaactccctcaaagaccttctccaatccaaaatcgatgagctggaaaggcaggtgttgagtcgcgtgaacacgctggaggaaggaaaaggcgggcctcgcaacgacaccgaagagagggtgaaaatagagaccgcgctgaccagtctacaccagcgcataagtgagctggagaaaggtcagaaagataatcgacccggtgataaatttcagctgactttcccgctgcgtacaaactacatgtatgccaaagtgaaaaaatcactacccgagatgtacgcgtttaccgtgtgcatgtggctgaagtcttctgccactcctggggtgggtaccccattctcttatgccgttcccggccaggcaaatgaactcgtactcatcgagtggggaaataatccaatggagattctgattaacgacaaggtggccaaattgccatttgttatcaacgatgggaaatggcatcacatctgtgtgacttggacaactagggacggcgtatgggaagcgtatcaggatggaacccaagggggttcgggcgagaatctcgccccctaccatcccatcaagccccagggggtgctggtgctgggtcaagagcaggacaccctggggggtggtttcgatgccactcaggccttcgtcggcgaacttgctcatttcaacatctgggataggaaattgacgccaggagaagtatacaacctggcaacttgctccacaaaggccctgtccggcaatgtcatcgcctgggcggagtcccacatcgagatttacggaggcgccactaagtggacctttgaagcgtgccggcagatcaattag

SEQ ID NO: 129443 - DNA, 585 bp, Artificial Sequence
  derived and/or modified sequence
atgtacgccaaggtgaagaagagcctgcccgagatgtacgccttcaccgtttgcatgtggctgaagtcatccgccactcctggggtgggaaccccgttctcttatgccgttcccggacaagccaatgaattggtgctgattgagtggggtaataaccctatggagattctaatcaatgacaaagtggccaaactgccatttgttatcaatgatggcaaatggcaccacatctgcgttacctggaccacacgtgacggggtttgggaagcatatcaggatggaacccaggggggtagcggtgagaacctagcaccttatcatccaattaagcctcagggtgtactcgtcctaggacaggaacaggatactctgggcgggggctttgatgccacacaagcattcgtcggcgaactcgcccatttcaacatttgggaccgtaagcttactcccggagaagtttataacctcgctacttgcagtacaaaggccctctcggggaacgtgatcgcctgggcagagtcccacattgaaatctacggcggagcaacaaaatggacgtttgaagcttgcagacagattaactag

SEQ ID NO: 129444 - DNA, 5437 bp, Artificial Sequence
  derived and/or modified sequence
agtgggggcctgatagcgcggcggtgtggaccgcgcggccgaagagcgcggcgcccagagcgcgggccgctcgcggagccacagcccgagccgggtcccagccggagccgagccccagccgagccgagccgggcccggagcgcccggtgcccgcagccatgccggccggccgcgccgcgcgcacctgtgcgctgctcgccctctgcctcctgggcgccggggcccaggatttcgggccgacgcgcttcatctgcacctcggtgcccgtggacgccgacatgtgcgccgcgtccgtggccgccggcggcgccgaggagctccggagcagcgtgctgcagctccgcgagacggtgctgcagcagaaggagaccatcctgagccagaaggagaccatccgcgagctgaccgccaagctgggccgctgcgagagccagagcacgctggaccccggagccggcgaggcccgggcgggcggcggccgcaagcagcccggctcgggcaagaacaccatgggcgacctgtcccggacaccggccgccgagacgctcagccaactcgggcaaactttgcaatcgctcaaaacccgcctggagaacctcgagcagtacagccgcctcaattcctccagccagaccaacagcctcaaggatctgctgcagagcaagatcgatgagctggagaggcaggtgctgtcccgggtgaacaccctggaggagggcaaggggggccccaggaacgacaccgaggagagggtcaagatcgagaccgccctgacctccctgcaccagcggatcagcgagctcgagaaaggtcagaaagacaaccgccctggagacaagttccagctcacattcccactgcggaccaactatatgtatgccaaggtgaagaagagcctgccagagatgtacgccttcactgtctgcatgtggctcaagtccagcgccacgccaggtgtgggcacgcccttctcctacgctgtgcccggccaggccaacgagctggtcctcattgagtggggcaacaaccccatggagatcctcatcaatgacaaggtggccaagttgccttttgtcatcaatgatggcaagtggcaccacatctgtgtcacctggaccacccgggacggggtctgggaggcctaccaggatggcacgcagggtggcagtggcgagaacttggcgccctatcaccccatcaagccccagggcgtgctggtgctgggccaggagcaggacactctgggtggtgggtttgatgccacccaggcatttgtgggtgagctggcccacttcaacatctgggaccgcaagctgacccccggggaggtgtacaacctggccacctgcagcaccaaggctctgtccggcaatgtcatcgcctgggctgaatcccacatcgagatctacggaggggccaccaagtggaccttcgaggcctgtcgccagatcaactgagcacggcaggccaggctgagcccgcccgccctcgccccctgcttgtgcggcgatgatctgttttgtgcgtctcttctctcccttttccccaggaatgaaccgaggccgtcgcccctgcacacgcacacgcacacagcctggttttgtcctcatgcacacgaagcagcccctgctcccatctgtccctgaggaagccccacttctctgtaggagcccggactctctcaggcatgccccattcacagctgaagtgggtgctgcaacgtcttgaacaaggcagaagttggtgagaggatctgtgtgtgcgtgtctacatgtgtgtgtctacgtgtgtgcgtgcgtggctgggggaggccttttctttgaggacgtacctcatttccttctttcttctggctttggaaaaatctcatgatgaaaattcatatttgccaactttgttagctgcgtgcgtgctttggggttggtgcaacctcagtacacgcatttgtctttgtttgcaaacctttctcagagcgacatatctttatattgatgtaataaatgtcttttagtggtttgtcaaaggccgggggcgggggctctctacagagaatttttattttgtaatagaagtgaactgtctctgaagggtgaaggcaggccgtcctgggatggtaccctgtgctctcccgtggaggagaggggatggctgaggacactggcccttaccccagggccagacagcatccatccctgctgtttgcatctgagagcagcatggggcctgggaggtcggcctgtgtgcccagctcagctagctctgccccaggacggccctgccctcgaccttcccacctcctcagatcctgcaaggctggggtctgcccctcccttctcacctctggagctgtgctgcactgcttcagcccagagggccctgagagaggagcgtgccacccacagcccgggaagccgggccccagcacccctctcctttggcctccggcagtgcagaccagaggggaccttttaaggaaagaagccgtgtttcgatgaagacctggccacatggggccactgggacttcaacccagcccatcggtgggaaggtcctttttgggggactttgacagccatatccctcccagcacaccaggcgccaggtgagctggttcagacccctccaggggtactccagagacctcacgtgtggagccaggcctggccagggcaggggcctgaaacccactcctccatctcatggggctcacggcctacagcagcccacaagctgccactggccggcgacactgacacctgagcagtgtccagaacctttttgcctttttttgttccccgtgaaaagcaacatggacatttccttctagtccttccaaggaggggagagaagtgtatgtgcatttgtgtgtgtgtgtgtgtgttgtgtgtgtgtgtgcgctaagtgagaaagagagcaggctcgggaggccctgcccagggtaggaggagcttcctgctttgcaccatctggtggtcgcacgccctgagggcaccccgactctgtctccaggagtctcatcagcaaaccgctgacaagtctttctagaaattctactgcactgcctggctcagctgcagctgcagacatttctgcaggaggagcaggtgtttctgtcttctgttccttctagggccacctgtccccttaaacacaggtccacgttgtgtcaagaacctagtgcatctgtgtgtgtctgtcagtgtctctgtgtcagtgttctcgtgggtgtctgcacggtacccggccgccgttctgcaatgcatcactcccgcagaggggggtgcagatcaggcgccgtgctgcgcgttgttgttcaacagtggctttttcttagataatcgtgcttcctcagcgcccgtcgggttgtggcatccttggatctgcagggatcttctccgtttgcatgttcctcggggtggcgtgttccttgctccctgggtccgacatgtgttcccgcacctgcatggactgccccggttctgtgttgtgtgccgagtgccgcccagtgttctgtgaccacccgtgtagctactgaaaatggctgggtaagcaagtcaagggtgttggaggaggtcaagagagagctcagtttccctctccccctccccaaacacaccaagaagcatttttaacgtgtaggttgagaacaagcctaaaggattcccacagctgggagccagcaagagagcttggagtcgcctctctagaccagatctagccccaccctcactccagccatctcggagcccttgtgtaggcaacgcccggtgcgggctgtgtggggtgctcccctgccagcacctccggccagccccgcccctgccgatctactggaccgcagaccaccttctgcccccgtgggccaggtgggagctgtccgttcaggaccatgagccatcctctgccctgactagcgaggggcagagcacaccccagtgcttacgcctccacccctgcagcctcctggcccgctcaccttcctcacccctcctctgacccacccatggtgccagggccgaagctgacctttagctccctcctgccccttgctagggtctgagccaagcccctcgactccctcactgtgttgacacttggcactttgctggccccgagaaaggtcgatgacacagccgcaaatctaatccacgtagttcccatttactccttaatctgattgatgttccctcttgcactgaataatacatgcctctctcaggtaagccattttataaaacaagaagataaaaagcactgttgaggcagtgtttgcttttgccgagctggtgtccgacagctccctgggtgtccggggtgggagagctgttgacagaagctctccgggccctcaggggcttagatcccacttgagtcgtaagccttcttgcttttgataacacagtattatttctcttactgtagaagaaaaagtttattaccaaacaagagtatttttatgaaagaaaaggacaaacctataaattaactcaacctatatctcccttgaaaatactttcaggctccaccaaaacgtagaactgaaagcatgtattttggaagaaagagatacattttgtatgctttcttttccttttgtagattcccagtttattttctaagactgcaaagatcactttgtcaccagccctgggacctgagaccaagggggtgtcttgtgggcagtgagggggtgaggagaggctggcatgaggttcagtcattccagtgagctccaaagaggggccacctgttctcaaaagcatgttggggaccaggaggtaaaactggccatttatggtgaacctgtgtcttggagctgacttactaagtggaatgagccgaggatttgaatatcagttctaaccttgatagaagaaccttgggttacatgtggttcacattaagaggatagaatcctttggaatcttatggcaaccaaatgtggcttgacgaagtcgtggtttcatctcttaaacacagtgtgtaaatttattcaactaacgatgggaaatgtattacttctgtacacagtggactgaagtgcaatttgttgaaagggaacaagtcattgaagagaaaaaaaaagcccaatacttagagtcccaattttgtctcatttgccaaaaaaaaaaaaaaaaaaaaagcaaaccccctatggttgatattgttataatgtatatactgtataatatgaaagagaatcgatgtatctcactttttcattatttgctaaccaaagctgtacatttttcatatgatctgcagccttttgggtatcaaatgggtcaaaaccatgggacctgccacctcccatcagcaattctggaaatgcactatttctactggtattcttgctttttttttttttttcattttcttgctgaaatgacatgaattgttgagtttatttttacacagtaaagagtggagaaagact

SEQ ID NO: 129445 - DNA, 3957 bp, Artificial Sequence
  derived and/or modified sequence
agatcagaaggaaggacctcaggagggagggagagggaaggagcggagattggggaatgaaaaacacccggagaaaggccaggggctgggcccctccctatcccccactgcaggcctcaatgggttggggtagccgctggggtgctgcactgagggggcctgccctgctctgctccctgccagttggtttagaggagggggtggttgctgaccgggcaggatgtcttctagaaataatttttggcctggggaactggtttctttctgggcttcctggcaggaccacggctgctcacccagggattgaccaaggggtgtgtgttcctgggctctgggcctgctactgtgcccattgctggccaggaatgttttgcctggagtcagtcacaccatacccagggtgccacagtatatagatgggctatgggggttggcgcttacgggagaagtggccggtggggagggagaaggtgggccttgtggaaagggaggccaccaggcctggaacctgagctgtgaggacacttactcacctgagagtgtggcggcatcctagagcagtcaccttggggagccctggcgcccagagtactcccagctccttgctgccctgccctctcagcagagctccaggcagagtccctgctccaaggaagggccttggaggtggggagctgcccagcctcacacccaagaggcattggtgggtcagaggcacatctggcctggagggaagtgtgtgggcaccagggcctggctgtcgggtggggagaggcaggagcagagcctgggattgagcgaggagaggctctgagccccgccccatcctggaatcaggtcggttactctcagggtagctagcctcgttcctcctctgcagccacccctgctccttgggttgacttggcttggcggctgtccccattcccttctcatgcccaccacgcagcccagtgttgatgcagcagcccaccaggcactgccccccacccccatctccccaaggatgccagcacatgggcgtgacagcaggccagacctggagcatgaagagcttgggtcagctctttacagactggccctgtgccttggggcaaagtacttgacctgggaagctacccgctctgcgtctccagaatggagaccggagcctgccctggccacgcatcacagagcttggtggggaccgaactcaactcagacaccgataagcacttcacgcaggtgcagatgtcaggactgtgtcttccgcaggtcagaaagacaaccgccctggagacaagttccagctcacattcccactgcggaccaactatatgtatgccaaggtgaagaagagcctgccagagatgtacgccttcactgtctgcatgtggctcaagtccagcgccacgccaggtgtgggcacgcccttctcctacgctgtgcccggccaggccaacgagctggtcctcattgagtggggcaacaaccccatggagatcctcatcaatgacaaggtggccaagttgccttttgtcatcaatgatggcaagtggcaccacatctgtgtcacctggaccacccgggacggggtctgggaggcctaccaggatggcacgcagggtggcagtggcgagaacttggcgccctatcaccccatcaagccccagggcgtgctggtgctgggccaggagcaggacactctgggtggtgggtttgatgccacccaggcatttgtgggtgagctggcccacttcaacatctgggaccgcaagctgacccccggggaggtgtacaacctggccacctgcagcaccaaggctctgtccggcaatgtcatcgcctgggctgaatcccacatcgagatctacggaggggccaccaagtggaccttcgaggcctgtcgccagatcaactgagcacggcaggccaggctgagcccgcccgccctcgccccctgcttgtgcggcgatgatctgttttgtgcgtctcttctctcccttttccccaggaatgaaccgaggccgtcgcccctgcacacgcacacgcacacagcctggttttgtcctcatgcacacgaagcagcccctgctcccatctgtccctgaggaagccccacttctctgtaggagcccggactctctcaggcatgccccattcacagctgaagtgggtgctgcaacgtcttgaacaaggcagaagttgcgcccgtcgggttgtggcatccttggatctgcagggatcttctccgtttgcatgttcctcggggtggcgtgttccttgctccctgggtccgacatgtgttcccgcacctgcatggactgccccggttctgtgttgtgtgccgagtgccgcccagtgttctgtgaccacccgtgtagctactgaaaatggctgggtaagcaagtcaagggtgttggaggaggtcaagagagagctcagtttccctctccccctccccaaacacaccaagaagcatttttaacgtgtaggttgagaacaagcctaaaggattcccacagctgggagccagcaagagagcttggagtcgcctctctagaccagatctagccccaccctcactccagccatctcggagcccttgtgtaggcaacgcccggtgcgggctgtgtggggtgctcccctgccagcacctccggccagccccgcccctgccgatctactggaccgcagaccaccttctgcccccgtgggccaggtgggagctgtccgttcaggaccatgagccatcctctgccctgactagcgaggggcagagcacaccccagtgcttacgcctccacccctgcagcctcctggcccgctcaccttcctcacccctcctctgacccacccatggtgccagggccgaagctgacctttagctccctcctgccccttgctagggtctgagccaagcccctcgactccctcactgtgttgacacttggcactttgctggccccgagaaaggtcgatgacacagccgcaaatctaatccacgtagttcccatttactccttaatctgattgatgttccctcttgcactgaataatacatgcctctctcaggtaagccattttataaaacaagaagataaaaagcactgttgaggcagtgtttgcttttgccgagctggtgtccgacagctccctgggtgtccggggtgggagagctgttgacagaagctctccgggccctcaggggcttagatcccacttgagtcgtaagccttcttgcttttgataacacagtattatttctcttactgtagaagaaaaagtttattaccaaacaagagtatttttatgaaagaaaaggacaaacctataaattaactcaacctatatctcccttgaaaatactttcaggctccaccaaaacgtagaactgaaagcatgtattttggaagaaagagatacattttgtatgctttcttttccttttgtagattcccagtttattttctaagactgcaaagatcactttgtcaccagccctgggacctgagaccaagggggtgtcttgtgggcagtgagggggtgaggagaggctggcatgaggttcagtcattccagtgagctccaaagaggggccacctgttctcaaaagcatgttggggaccaggaggtaaaactggccatttatggtgaacctgtgtcttggagctgacttactaagtggaatgagccgaggatttgaatatcagttctaaccttgatagaagaaccttgggttacatgtggttcacattaagaggatagaatcctttggaatcttatggcaaccaaatgtggcttgacgaagtcgtggtttcatctcttaaacacagtgtgtaaatttattcaactaacgatgggaaatgtattacttctgtacacagtggactgaagtgcaatttgttgaaagggaacaagtcattgaagagaaaaaaaaagcccaatacttagagtcccaattttgtctcatttgcc

SEQ ID NO: 129446 - DNA, 1299 bp, Artificial Sequence
  derived and/or modified sequence
atgcccgctggcagggccgctcgtacctgcgctttgctcgcactgtgcctcttgggagcgggtgcgcaagacttcgggccaacgaggtttatctgtactagcgtgcctgtggatgccgatatgtgcgccgcatcagttgccgctggtggcgcagaagagctacgcagctctgtgctccaacttcgggagaccgtcctgcaacaaaaggaaaccattctgtcccagaaagaaaccatcagggagttaacagctaaattaggaagatgtgagtcacagtcaaccctggaccctggcgctggagaggccagagccggagggggtcgaaaacaaccaggtagtggtaaaaatacgatgggggacttatcccgcactcccgcagcagaaactttatctcagttgggacagaccctgcagtcattaaaaacaaggctggagaacttagaacagtattcccgcttgaacagttccagccaaaccaactccttgaaagacctcttacagtctaagattgatgagctggaacgccaagtgctgagccgggtcaatacattggaagagggcaaaggtgggcctcggaacgatacagaagagagagtcaagatcgaaactgccctcacttcactgcatcaaagaatctccgagctggaaaaagggcaaaaggataacaggccaggggacaaattccagcttactttccccctgaggaccaactacatgtatgctaaggtcaaaaaatcactgcctgagatgtatgcgttcaccgtgtgcatgtggcttaaaagttccgccacgcctggcgtcggcacccccttcagctacgctgtgcccggacaagcgaacgagctggtgcttatcgaatggggaaataatccaatggagatactgattaacgacaaggtcgctaaacttccctttgtgatcaatgatggcaagtggcaccacatttgcgtcacctggactacacgggacggggtttgggaagcctatcaggatggtacgcaggggggaagtggcgagaacctcgccccttatcacccaatcaagccccagggagtgttagtcctcggacaggagcaagacacactaggagggggtttcgacgccacacaagccttcgtcggggaactggcccattttaatatctgggacagaaaattaacaccgggagaagtgtacaatctggcaacttgctctacaaaagctctgagtgggaacgtgatagcatgggctgaaagtcacatcgaaatctatggtggcgctactaagtggactttcgaagcctgccgccaaatcaactag

SEQ ID NO: 129447 - DNA, 585 bp, Artificial Sequence
  derived and/or modified sequence
atgtacgccaaggtaaaaaagtccctgcccgaaatgtacgcatttactgtatgtatgtggcttaaatccagcgcaactccaggggtcggcactccgttctcatacgccgtgcccggacaggcgaacgaattagtattgattgagtggggaaacaatcccatggaaattctgatcaatgacaaggtcgcaaagttaccatttgtaataaacgatggcaagtggcatcatatctgcgtcacctggaccacccgcgacggtgtttgggaagcctaccaggacggtacccaggggggatcaggtgaaaatttggcaccgtatcaccctataaagccacagggcgtcttggtgttgggccaagaacaagacacccttggagggggttttgatgccacacaggcatttgtgggcgaactcgctcatttcaacatttgggataggaagctcactccaggggaagtttataacttggccacttgctcaacaaaggccctgagcggcaatgttatcgcgtgggctgagtcccatattgagatctatggtggtgctacgaaatggacgttcgaggcttgtaggcagatcaattag

SEQ ID NO: 129448 - DNA, 1299 bp, Artificial Sequence
  derived and/or modified sequence
atgcccgccggcagagccgccagaacctgcgccctgctggccctgtgcctgctgggcgccggcgcccaggacttcggccccaccagattcatctgcaccagcgtgcccgtggacgccgacatgtgcgccgccagcgtggccgccggcggcgccgaggagctgagaagcagcgtgctgcagctgagagagaccgtgctgcagcagaaggagaccatcctgagccagaaggagaccatcagagagctgaccgccaagctgggcagatgcgagagccagagcaccctggaccccggcgccggcgaggccagagccggcggcggcagaaagcagcccggcagcggcaagaacaccatgggcgacctgagcagaacccccgccgccgagaccctgagccagctgggccagaccctgcagagcctgaagaccagactggagaacctggagcagtacagcagactgaacagcagcagccagaccaacagcctgaaggacctgctgcagagcaagatcgacgagctggagagacaggtgctgagcagagtgaacaccctggaggagggcaagggcggccccagaaacgacaccgaggagagagtgaagatcgagaccgccctgaccagcctgcaccagagaatcagcgagctggagaagggccagaaggacaacagacccggcgacaagttccagctgaccttccccctgagaaccaactacatgtacgccaaggtgaagaagagcctgcccgagatgtacgccttcaccgtgtgcatgtggctgaagagcagcgccacccccggcgtgggcacccccttcagctacgccgtgcccggccaggccaacgagctggtgctgatcgagtggggcaacaaccccatggagatcctgatcaacgacaaggtggccaagctgcccttcgtgatcaacgacggcaagtggcaccacatctgcgtgacctggaccaccagagacggcgtgtgggaggcctaccaggacggcacccagggcggcagcggcgagaacctggccccctaccaccccatcaagccccagggcgtgctggtgctgggccaggagcaggacaccctgggcggcggcttcgacgccacccaggccttcgtgggcgagctggcccacttcaacatctgggacagaaagctgacccccggcgaggtgtacaacctggccacctgcagcaccaaggccctgagcggcaacgtgatcgcctgggccgagagccacatcgagatctacggcggcgccaccaagtggaccttcgaggcctgcagacagatcaactag

SEQ ID NO: 129449 - DNA, 585 bp, Artificial Sequence
  derived and/or modified sequence
atgtacgccaaggtgaagaagagcctgcccgagatgtacgccttcaccgtgtgcatgtggctgaagagcagcgccacccccggcgtgggcacccccttcagctacgccgtgcccggccaggccaacgagctggtgctgatcgagtggggcaacaaccccatggagatcctgatcaacgacaaggtggccaagctgcccttcgtgatcaacgacggcaagtggcaccacatctgcgtgacctggaccaccagagacggcgtgtgggaggcctaccaggacggcacccagggcggcagcggcgagaacctggccccctaccaccccatcaagccccagggcgtgctggtgctgggccaggagcaggacaccctgggcggcggcttcgacgccacccaggccttcgtgggcgagctggcccacttcaacatctgggacagaaagctgacccccggcgaggtgtacaacctggccacctgcagcaccaaggccctgagcggcaacgtgatcgcctgggccgagagccacatcgagatctacggcggcgccaccaagtggaccttcgaggcctgcagacagatcaactag

SEQ ID NO: 129450 - protein, 431 aa, Artificial Sequence
  derived and/or modified sequence
MLALLAASVALAVAAGAQDSPAPGSRFVCTALPPEAVHAGCPLPAMPMQGGAQSPEEELRAAVLQLRETVVQQKETLGAQREAIRELTGKLARCEGLAGGKARGAGATGKDTMGDLPRDPGHVVEQLSRSLQTLKDRLESLEHQLRANVSNAGLPGDFREVLQQRLGELERQLLRKVAELEDEKSLLHNETSAHRQKTESTLNALLQRVTELERGNSAFKSPDAFKVSLPLRTNYLYGKIKKTLPELYAFTICLWLRSSASPGIGTPFSYAVPGQANEIVLIEWGNNPIELLINDKVAQLPLFVSDGKWHHICVTWTTRDGMWEAFQDGEKLGTGENLAPWHPIKPGGVLILGQEQDTVGGRFDATQAFVGELSQFNIWDRVLRAQEIVNIANCSTNMPGNIIPWVDNNVDVFGGASKWPVETCEERLLDL

SEQ ID NO: 129451 - DNA, 1296 bp, Artificial Sequence
  derived and/or modified sequence
atgctggcgttgctcgcagctagcgttgcactggcggtggcagcaggggcccaggattcccccgccccgggttccagattcgtctgcacggctctgccacctgaggctgtgcacgctggatgcccacttcctgccatgcccatgcaagggggcgcccagagtcctgaggaggaactcagggctgctgtcctgcaactgcgtgagacagtagttcagcaaaaagagacgctcggcgcccagcgcgaggccatccgagagctaaccgggaaactggcacgatgcgagggcttagccggaggcaaagcccgaggcgctggggctacaggcaaagataccatgggggacttgccgcgtgaccctggccacgtagtggaacagctctcgagatcactgcagacactgaaagaccgcctcgaatcgctggagcaccaattacgcgctaacgtgagcaacgctggattacccggtgactttcgcgaggttctccagcagagactcggagagctggagagacagctgctgcggaaggtcgcagagttggaagacgagaagtccctccttcacaacgagacctctgcgcaccgacaaaagacagagagtaccttgaatgctctactgcagcgggtcacagaactggagcgaggaaactctgcttttaaaagtccagatgcatttaaagtgagtctgcccctgcgcacgaattatctgtacggtaagatcaagaaaaccctccccgaactttatgcattcacaatatgcctgtggctccggagctccgcctcccctggaataggtacacccttctcctatgccgtgcctggccaggccaacgaaattgttctgatcgagtggggaaataaccctattgagttgcttattaatgataaggttgctcagttacctctgttcgtgtcagacgggaaatggcaccatatctgtgtaacgtggactactcgcgatggcatgtgggaagcattccaggacggcgagaagctgggcacaggcgagaatctcgccccttggcaccccatcaagcccggcggggttctcatccttggtcaagagcaagatacagttggcggtagatttgacgctacccaggcattcgtgggggaactttctcagtttaatatttgggaccgggtcttgcgtgctcaggaaatcgtaaatattgcaaactgttccaccaacatgcctggcaatataattccatgggttgacaacaacgtggatgtgtttggaggtgcaagcaagtggcccgttgaaacctgtgaggaacgcttgctggacttgtag

SEQ ID NO: 129452 - DNA, 1296 bp, Artificial Sequence
  derived and/or modified sequence
atgctggccctgctggccgcctctgtggccctggccgtggccgccggggcccaggacagccctgcccctggcagcagatttgtgtgcacagccctgcccccagaggccgtgcatgctggctgccccctgcctgccatgcccatgcagggcggggcccagagccctgaggaggagctgcgggctgctgtgctgcagctgcgggagaccgtggtgcagcagaaggagaccctgggcgcccagcgggaggccatccgggagctgaccgggaagctggcccgctgtgagggcctggccggcggcaaggcccggggagctggggccaccgggaaggacaccatgggagacctgccccgggaccccggccacgtggtggagcagctgagccgcagcctgcagaccctgaaggaccggctggagagcctggagcaccagctgcgggccaacgtgtccaatgccggcctgcccggggacttccgggaggtgctgcagcagaggctgggggagctggagcggcagctgctgaggaaggtggccgagctggaggatgagaagagcctgctgcacaatgagaccagcgcccaccggcagaagacagagagcaccctgaatgccctgctgcagagggtgacagagctggagcggggcaacagcgccttcaagagcccagatgccttcaaggtgtccctgcccctgcggaccaactacctgtatggcaagatcaagaagaccctgcctgagctgtatgccttcaccatctgcctgtggctgcggagcagcgccagccctggcatcggcacccccttctcctatgctgtgcccggccaggccaatgaaattgtgctgattgagtggggcaacaaccccatcgagctgctgatcaatgacaaggtggcccagctgcccctgtttgtgtctgatggcaagtggcaccacatctgtgtgacctggaccaccagagatggcatgtgggaggccttccaggatggagagaagctgggcaccggggagaacctggccccctggcaccccatcaagccaggcggcgtgctgatcctgggccaggagcaggacacagtgggcggccgctttgatgccacccaggcctttgtgggggagctgagccagttcaacatctgggacagagtgctgcgggcccaggagatcgtgaacatcgccaactgcagcaccaacatgcctggcaacatcatcccctgggtggacaacaacgtggatgtgtttggaggagccagcaagtggcctgtggagacctgtgaggagcggctgctggacctgtag

SEQ ID NO: 129453 - DNA, 1296 bp, Artificial Sequence
  derived and/or modified sequence
atgctggccctgctggccgccagcgtggccctggccgtggccgccggtgcacaggatagtccggcccctgggagcaggttcgtttgcaccgctctgccaccggaggctgtacatgctggatgccccttgcccgcaatgcctatgcagggtggcgcccaatcacccgaggaggagctccgggcagccgtgcttcagctcagggagactgtcgtccagcagaaagagaccctcggtgcccaacgcgaagccattcgcgagctgaccggcaagctggcaaggtgcgagggccttgcaggtggcaaggctcggggcgcaggcgcaaccggaaaagataccatgggagatttaccccgggaccctggccacgtagtggagcagctgagcagaagtctgcaaacgctgaaagaccggctggaatcgttagagcaccagcttcgagcgaatgtgtccaacgccggtctccccggggacttcagagaagtcctacagcagaggttaggagaacttgagcgccaactattacgcaaggttgccgaactggaagatgagaagagtctgctgcacaacgagacaagcgcccataggcagaagactgagtccactctcaacgctctactgcagagagtcaccgaactcgagagaggcaatagtgcattcaagagtcccgacgcttttaaggtgtccctgccattacgcacgaactatctatacggaaagataaagaaaactctgcctgaactgtacgcctttacaatctgtctatggcttcgaagttcagcctcccctggcatcggaactcccttcagctatgcggtgccaggccaggccaatgagattgtcctgattgagtggggcaacaacccaatagagcttttaatcaatgataaggtcgctcagctacccctgttcgtgagcgacgggaagtggcaccacatctgcgttacctggaccacccgtgacgggatgtgggaggcctttcaggatggcgagaagctgggcacaggggaaaatctggcaccttggcatccaatcaaacccggcggagtgcttatcctgggtcaggaacaggataccgtgggcggcaggttcgatgctacacaggcgtttgtcggcgaactgtctcaattcaacatctgggaccgcgtgctacgcgcacaggagatcgtaaatatcgccaattgttccacaaacatgcccggtaacatcatcccatgggtcgataacaacgtggatgtgtttggtggcgcctctaagtggcctgtggagacctgtgaagagcgcctgttagacctttag

SEQ ID NO: 129454 - DNA, 2700 bp, Artificial Sequence
  derived and/or modified sequence
agcgcggtgggtgcggctgtgagacggcaggagacttctgccccgcggtgcacgcgaccctcgagacgacagcgcggctactgccagcagcgaaggcgcctcccgcggagcgccccgacggcgcccgctcgcccatgccgagctgagcgcggcagcggcggcgggatgctggcgctgctggccgccagcgtggcgctcgccgtggccgctggggcccaggacagcccggcgcccggtagccgcttcgtgtgcacggcactgcccccagaggcggtgcacgccggctgcccgctgcccgcgatgcccatgcagggcggcgcgcagagtcccgaggaggagctgagggccgcggtgctgcagctgcgcgagaccgtcgtgcagcagaaggagacgctgggcgcgcagcgcgaggccatccgcgagctcacgggcaagctagcgcgctgcgaggggctggcgggcggcaaggcgcgcggcgcgggggccacgggcaaggacactatgggcgacctgccgcgggaccccggccacgtcgtggagcagctcagccgctcgctgcagaccctcaaggaccgcctggagagcctcgagcaccagctcagagcaaacgtgtccaatgctgggctgcccggcgacttccgcgaggtgctccagcagcggctgggggagctggagaggcagcttctgcgcaaggtggcagagctggaggacgagaagtccctgctgcacaatgagacctcggctcaccggcagaagaccgagagcaccctgaacgcgctgctgcagagggtcaccgagctggagcgaggcaatagcgcctttaagtcaccagatgcgttcaaggtgtccctcccactccgcacaaactacctatacggcaagatcaagaagacgctgcctgagctgtacgccttcaccatctgcctgtggctgcggtccagcgcctcaccaggcattggcacccccttctcctatgcggtgccagggcaggccaacgagatcgtgctgatcgagtggggcaacaaccccatcgagctgctcatcaacgacaaggttgcgcagctgcccctgtttgtcagtgacggcaagtggcaccacatctgtgtcacctggacgacacgggatggcatgtgggaggcattccaggacggagagaagctgggcactggggagaacctggccccctggcaccccatcaagcccgggggcgtgctgatccttggacaagagcaggacaccgtggggggtaggtttgatgccactcaggcatttgtcggggagctcagccagttcaacatatgggaccgcgtccttcgcgcacaagaaattgtcaacatcgccaactgctccacaaacatgccgggcaacatcatcccgtgggtggacaataacgtcgatgtgttcggaggggcctccaagtggcccgtggagacgtgtgaggagcgtctccttgacttgtagccgccttctcctctgtccaggaggccgggatcaggctgttgccatggaagttcagggccatagactgccccacttaaactcttgtcagtctgggctcagggttcccagagctcattccccaggaatctctaagaccagggctggggcagtgtctgtcactggcttgtttgttccctaccaatattctgttgctgtttgaagtagtgccagggtcccctgggaagatgcccccaagacacctgccccaagtgggtggatatctgccttcctgctgcaagtggaggcaggtccagcagcccctcttcagagcccctgtaaatgctatcgcagcctgagtcctgccgccttccagttccttggtgtcccgtgcaccccttctgtctgtcccctttcatggctgtgcagccgtcccgctggagtggccatgtcccttgtgcattgagtgcatccccgctggtgactaagctcgcagcaagcggctaccccccgatctgcaaaagggcctctccctttgtgttctatacattgtgaatcttcccgtctgaagaacgcccagcctgcccagacaaagccccgccttccccaaagcagaggggctgtctgtgtctccagaaaggggacatcgggggggaggggggctcagaaaggagaagggctgtgatctccggtcccttcccccatcatccttccttagactgatgctttgactgaatcatcactagctatggcattaaaaggcctctcttctcatctggtgccaaaggttccgttgcagctttttacaaccatccggtgtggtttggaggatttgttttttttttttcccaacagaaaagaacagccattagaagaaggctcccattttctgatgttccgccccactgtgaagagtgtgctcgttttaaattcatgttgattcttgtaagcactggactgtcttcatcaagtatttccctacagaactcctcaagaaaacagagatcatttggctagagattgtctgagtgactccaagctactcactgtattggacgggagtagtaatttattttaaagataaagtgactaagtggggaaatttataaagctaaatattatatattttatttttcatacatgtttgaagtgcaaatctgtggatattccatttgtaggaccaagtcgacatgcccatcctgacattgtatgctacgagaactcttctgatgatggaatttcgattaaagtgcactgaaagat

SEQ ID NO: 129455 - DNA, 1296 bp, Artificial Sequence
  derived and/or modified sequence
atgctcgctctccttgcagcctctgtggctttggctgtggctgcaggcgctcaggactcacctgctcctgggtctagattcgtctgtacggccttaccacctgaggcggtgcacgctggctgtccgttacccgctatgcctatgcagggcggtgcacaaagtccagaagaagaacttcgagccgctgtgctacagctaagggaaactgtcgtccagcagaaggaaacactgggggcacagcgcgaagccattagagagcttaccggaaaactggcaagatgcgagggcctagcaggtggcaaggcaagaggcgctggggctactggaaaggataccatgggagacctcccccgtgacccaggacacgtggtcgaacagttgtctaggagcctgcaaacattgaaagataggttggaatccctcgagcatcagctcagggcaaacgtgagtaacgccggtctcccaggcgattttagggaggtgctgcagcagaggttgggagagttggaaagacagctgttaaggaaggttgccgagctggaggacgagaagtcattgctccataatgagaccagtgctcaccggcagaagactgaatctactctcaacgctctgttacagcgtgttaccgagctggaaagaggcaattccgcctttaagtcccccgatgcgtttaaagtgagcttacctctcagaaccaactacctctatgggaaaattaaaaagacacttccagagctgtacgcattcaccatttgtctctggttgagatcaagtgccagtccaggaattggtacgccattcagttatgctgtacccggtcaggccaacgagattgtactaattgaatggggaaataatcctatcgagttgctaatcaatgataaagttgctcagctgcccctctttgtttctgatggtaagtggcatcacatatgcgttacttggaccactagggatggtatgtgggaagcgtttcaggatggagaaaaactggggaccggtgaaaatttggcgccttggcaccccataaagcccggtggcgtgcttattctggggcaggagcaagacactgtcggaggcagatttgacgctacacaggcttttgtgggagagctgtcccaattcaacatttgggatcgagttctgagagcacaagagattgtgaacattgcaaattgttccactaatatgcccggaaatattatcccatgggtggacaataacgtggacgtcttcggcggagcttctaaatggcccgttgagacttgcgaggagaggctcctcgatctgtag

SEQ ID NO: 129456 - DNA, 1296 bp, Artificial Sequence
  derived and/or modified sequence
atgctggccctgctggccgccagcgtggccctggccgtggccgccggcgcccaggacagccccgcccccggcagcagattcgtgtgcaccgccctgccccccgaggccgtgcacgccggctgccccctgcccgccatgcccatgcagggcggcgcccagagccccgaggaggagctgagagccgccgtgctgcagctgagagagaccgtggtgcagcagaaggagaccctgggcgcccagagagaggccatcagagagctgaccggcaagctggccagatgcgagggcctggccggcggcaaggccagaggcgccggcgccaccggcaaggacaccatgggcgacctgcccagagaccccggccacgtggtggagcagctgagcagaagcctgcagaccctgaaggacagactggagagcctggagcaccagctgagagccaacgtgagcaacgccggcctgcccggcgacttcagagaggtgctgcagcagagactgggcgagctggagagacagctgctgagaaaggtggccgagctggaggacgagaagagcctgctgcacaacgagaccagcgcccacagacagaagaccgagagcaccctgaacgccctgctgcagagagtgaccgagctggagagaggcaacagcgccttcaagagccccgacgccttcaaggtgagcctgcccctgagaaccaactacctgtacggcaagatcaagaagaccctgcccgagctgtacgccttcaccatctgcctgtggctgagaagcagcgccagccccggcatcggcacccccttcagctacgccgtgcccggccaggccaacgagatcgtgctgatcgagtggggcaacaaccccatcgagctgctgatcaacgacaaggtggcccagctgcccctgttcgtgagcgacggcaagtggcaccacatctgcgtgacctggaccaccagagacggcatgtgggaggccttccaggacggcgagaagctgggcaccggcgagaacctggccccctggcaccccatcaagcccggcggcgtgctgatcctgggccaggagcaggacaccgtgggcggcagattcgacgccacccaggccttcgtgggcgagctgagccagttcaacatctgggacagagtgctgagagcccaggagatcgtgaacatcgccaactgcagcaccaacatgcccggcaacatcatcccctgggtggacaacaacgtggacgtgttcggcggcgccagcaagtggcccgtggagacctgcgaggagagactgctggacctgtag

SEQ ID NO: 129457 - protein, 574 aa, Artificial Sequence
  derived and/or modified sequence
MCPRAARAPATLLLALGAVLWPAAGAWELTILHTNDVHSRLEQTSEDSSKCVNASRCMGGVARLFTKVQQIRRAEPNVLLLDAGDQYQGTIWFTVYKGAEVAHFMNALRYDAMALGNHEFDNGVEGLIEPLLKEAKFPILSANIKAKGPLASQISGLYLPYKVLPVGDEVVGIVGYTSKETPFLSNPGTNLVFEDEITALQPEVDKLKTLNVNKIIALGHSGFEMDKLIAQKVRGVDVVVGGHSNTFLYTGNPPSKEVPAGKYPFIVTSDDGRKVPVVQAYAFGKYLGYLKIEFDERGNVISSHGNPILLNSSIPEDPSIKADINKWRIKLDNYSTQELGKTIVYLDGSSQSCRFRECNMGNLICDAMINNNLRHTDEMFWNHVSMCILNGGGIRSPIDERNNGTITWENLAAVLPFGGTFDLVQLKGSTLKKAFEHSVHRYGQSTGEFLQVGGIHVVYDLSRKPGDRVVKLDVLCTKCRVPSYDPLKMDEVYKVILPNFLANGGDGFQMIKDELLRHDSGDQDINVVSTYISKMKVIYPAVEGRIKFSTGSHCHGSFSLIFLSLWAVIFVLYQ

SEQ ID NO: 129458 - protein, 259 aa, Artificial Sequence
  derived and/or modified sequence
MDKLIAQKVRGVDVVVGGHSNTFLYTGNPPSKEVPAGKYPFIVTSDDGRKVPVVQAYAFGKYLGYLKIEFDERGNVISSHGNPILLNSSIPEDPSIKADINKWRIKLDNYSTQELGKTIVYLDGSSQSCRFRECNMGNLICDAMINNNLRHTDEMFWNHVSMCILNGGGIRSPIDERNNGTITWENLAAVLPFGGTFDLVQLKGSTLKKAFEHSVHRYGQSTGEFLQVGDLKECCPICINQDDSWKEQPTAQTYLNTWF

SEQ ID NO: 129459 - protein, 179 aa, Artificial Sequence
  derived and/or modified sequence
  misc_feature (1)..(1): Xaa can be any naturally occurring amino acid
XNPILLNSSIPEDPSIKADINKWRIKLDNYSTQELGKTIVYLDGSSQSCRFRECNMGNLICDAMINNNLRHTDEMFWNHVSMCILNGGGIRSPIDERNNGTITWENLAAVLPFGGTFDLVQLKGSTLKKAFEHSVHRYGQSTGEFLQVGDLKECCPICINQDDSWKEQPTAQTYLNTWF

SEQ ID NO: 129460 - DNA, 1725 bp, Artificial Sequence
  derived and/or modified sequence
atgtgccctcgggccgcccgggctccggcaaccttgctcctggcgctgggtgcagtgctgtggcccgctgctggtgcatgggagctgactatcttacacaccaacgatgtgcacagcaggctggaacagacttccgaagattcttccaaatgcgtgaacgctagtaggtgcatgggaggcgttgctaggctgttcaccaaagttcagcagattcggcgggccgagcccaatgttctgctccttgatgcgggagaccagtaccagggtaccatttggttcaccgtatataaaggcgcggaggtcgcccattttatgaacgctttgaggtacgacgctatggcgctcgggaaccatgagttcgataacggagtggagggcctcatcgagccgttgctaaaggaagccaagttccccattttaagtgctaatatcaaagcgaagggccctcttgcaagccagatctctggtttatacttaccgtacaaagttctgccggtcggcgacgaggttgtggggatcgtggggtatacgagcaaggaaacccccttcctgtcaaaccctggaaccaatctggtcttcgaggacgaaatcacagcattgcagccagaagttgacaagttgaagacgctcaatgttaataaaataatagccttgggtcactctggattcgagatggataagctgatagcccagaaagtgagaggcgttgacgtggtggtaggagggcattcgaatactttcctgtacacgggaaaccctccctcgaaagaggtccctgctggcaagtaccccttcatcgtcacatctgacgatgggcggaaagttccggttgtgcaggcctacgcctttggaaagtacctgggatacctgaagattgaattcgatgagagaggaaatgtgatttcttctcacggcaatcctatcctactgaatagtagcatacccgaggacccctctatcaaggccgacattaataaatggcgcataaagctggataactatagtacccaggaactggggaagaccattgtctacttggatggatcgagtcagtcttgccgtttcagagaatgcaacatgggtaacctgatctgtgacgccatgattaataacaacttgaggcacacggatgaaatgttctggaatcatgtgagcatgtgcatactcaacggcggtgggatccgatctcccatcgatgaacgcaataatggcactattacctgggaaaatctggccgcggtattgcctttcggaggcacctttgatcttgttcagctgaagggcagcactttgaaaaaagcatttgaacatagtgtgcacaggtatggccagtctaccggggagttcctccaggtgggaggaattcatgtagtgtatgatctttctcgaaaaccaggcgaccgggtagtgaagttggatgttctgtgtacaaagtgtcgagtgccttcctatgatcccctcaagatggacgaggtgtataaggtaatcctgcccaacttcctggctaatggaggggatgggtttcagatgattaaagacgagctcctacgacacgattcaggtgatcaggatatcaacgtcgtttctacgtacatcagcaaaatgaaggtgatctatcccgccgtggaaggcaggatcaaattctcaactggatctcattgccacggctcttttagcttaatcttcctctctctttgggctgtcattttcgtactttatcaatag

SEQ ID NO: 129461 - DNA, 780 bp, Artificial Sequence
  derived and/or modified sequence
atggacaagctcattgctcaaaaagttcggggagtcgatgtggtggtcggcggacactccaacactttcctttataccggtaacccacctagtaaggaggtgcccgctggtaagtatcctttcatagtcactagcgatgacggccgcaaagtcccggtcgtgcaggcatacgccttcggcaaatacctgggctatcttaagattgaatttgatgagcgggggaatgtgatctcaagccacggtaatccaattctgttaaatagctccatacctgaagaccctagcatcaaggcagatattaataaatggagaattaagttagacaattactccacacaagagctaggaaaaactatagtgtacctcgacgggtccagtcagtcctgtaggttcagggaatgtaatatggggaacctcatctgcgatgctatgatcaataacaatttgagacacacagacgagatgttttggaaccatgtcagtatgtgcatcttaaacggaggtggaattaggagcccgatcgatgaaaggaataatgggaccattacatgggagaacttggcagctgttctgccgtttggaggcactttcgatctggttcagttaaaggggagcaccctgaaaaaagccttcgaacattctgtgcacagatatggccagagtacaggcgagttcctgcaggtcggagacttaaaagaatgttgccccatctgtatcaaccaggatgacagttggaaagaacagccaacagctcaaacatacttgaacacttggttctag

SEQ ID NO: 129462 - DNA, 540 bp, Artificial Sequence
  derived and/or modified sequence
tgaaatcctattttgttgaacagcagtattcctgaagacccctctataaaggccgatattaacaagtggagaattaagttagacaattactccacacaggaattaggtaagacaattgtgtatctggatggttcaagtcagagttgtcgatttcgggagtgcaacatgggcaacctcatctgcgacgccatgatcaataacaatctccgtcacaccgatgaaatgttctggaaccacgtcagcatgtgtatcctgaacggcggcgggattaggagcccgatcgatgaaaggaataacggaacaattacctgggaaaacctcgccgccgtgctgccttttggagggacattcgacttggtacaactgaaaggatctactctgaaaaaggccttcgagcactccgtgcaccgatatgggcagtccactggagaattcctgcaagtgggggatttaaaagaatgctgtccaatctgtattaatcaggatgactcgtggaaggagcagcccacggcccagacgtacctcaatacatggttttag

SEQ ID NO: 129463 - DNA, 1725 bp, Artificial Sequence
  derived and/or modified sequence
atgtgccccagggctgcccgggccccagccaccctgctgctggccctgggcgctgtgctgtggccagctgctggggcctgggagctgaccatcctgcacaccaatgatgtgcacagccggctggagcagaccagcgaggacagcagcaaatgtgtgaatgccagccgctgcatgggcggcgtggcccggctcttcaccaaggtgcagcagatccggcgggcagagcccaacgtgctgctgctggatgctggggaccagtaccagggcaccatctggttcaccgtgtacaagggagctgaggtggcccacttcatgaatgccctgcgctatgatgccatggccctgggcaaccacgagtttgacaacggggtggagggcctcatcgagcccctgctgaaggaggccaagttccccatcctgagcgccaacatcaaggccaagggccccctggccagccagatcagcggcctgtacctgccctacaaggtgctgcctgtgggagatgaggtggtgggcatcgtgggctacaccagcaaggagacccccttcctgagcaaccctggcaccaacctggtgtttgaagatgagatcacagccctgcagcctgaggtggacaagctgaagaccctgaatgtgaacaagatcatcgccctgggccacagcggctttgagatggacaagctgattgcccagaaggtgcggggcgtggatgtggtggtgggcggccacagcaacaccttcctgtacacaggcaacccccccagcaaggaggtgcctgctgggaagtaccccttcatcgtgaccagtgatgatggcaggaaggtgcctgtggtgcaggcctatgccttcggcaagtacctgggctacctgaagattgaatttgatgaaagaggaaatgtcatcagcagccacggcaaccccatcctgctgaacagcagcatccctgaggaccccagcatcaaggctgacatcaacaagtggaggatcaagctggacaactacagcacccaggagctgggcaagaccatcgtgtacctggatggcagcagccagagctgccgcttccgggagtgcaacatgggcaacctgatctgtgatgccatgatcaacaacaacctgcggcacacagatgagatgttctggaaccacgtgtccatgtgcatcctgaatggaggcggcatccgcagccccattgatgaaagaaataatggcaccatcacctgggagaacctggccgctgtgctgccctttggaggcacctttgacctggtgcagctgaagggcagcaccctgaagaaggcctttgagcacagcgtgcacagatatggccagagcactggagagttcctgcaggtgggcggcatccacgtggtgtatgacctgagcaggaagccaggggacagagtggtgaagctggatgtgctgtgcaccaagtgccgggtgcccagctatgaccccctgaagatggatgaggtgtacaaggtgatcctgcccaacttcctggccaatggaggagatggcttccagatgatcaaggatgagctgctgcggcatgacagcggggaccaggacatcaacgtggtgtccacctacatcagcaagatgaaggtgatctacccagctgtggagggccgcatcaagttcagcacaggcagccactgccacggcagcttcagcctcatcttcctgagcctgtgggccgtcatctttgtgctgtaccagtag

SEQ ID NO: 129464 - DNA, 780 bp, Artificial Sequence
  derived and/or modified sequence
atggacaagctgattgcccagaaggtgcggggcgtggatgtggtggtgggcggccacagcaacaccttcctgtacacaggcaacccccccagcaaggaggtgcctgctgggaagtaccccttcatcgtgaccagtgatgatggcaggaaggtgcctgtggtgcaggcctatgccttcggcaagtacctgggctacctgaagattgaatttgatgaaagaggaaatgtcatcagcagccacggcaaccccatcctgctgaacagcagcatccctgaggaccccagcatcaaggctgacatcaacaagtggaggatcaagctggacaactacagcacccaggagctgggcaagaccatcgtgtacctggatggcagcagccagagctgccgcttccgggagtgcaacatgggcaacctgatctgtgatgccatgatcaacaacaacctgcggcacacagatgagatgttctggaaccacgtgtccatgtgcatcctgaatggaggcggcatccgcagccccattgatgaaagaaataatggcaccatcacctgggagaacctggccgctgtgctgccctttggaggcacctttgacctggtgcagctgaagggcagcaccctgaagaaggcctttgagcacagcgtgcacagatatggccagagcactggagagttcctgcaggtgggggacctgaaggagtgctgccccatctgcatcaaccaggatgacagctggaaggagcagcccacagcccagacctacctgaacacctggttctag

SEQ ID NO: 129465 - DNA, 540 bp, Artificial Sequence
  derived and/or modified sequence
tgaaaccccatcctgctgaacagcagcatccctgaggaccccagcatcaaggctgacatcaacaagtggaggatcaagctggacaactacagcacccaggagctgggcaagaccatcgtgtacctggatggcagcagccagagctgccgcttccgggagtgcaacatgggcaacctgatctgtgatgccatgatcaacaacaacctgcggcacacagatgagatgttctggaaccacgtgtccatgtgcatcctgaatggaggcggcatccgcagccccattgatgaaagaaataatggcaccatcacctgggagaacctggccgctgtgctgccctttggaggcacctttgacctggtgcagctgaagggcagcaccctgaagaaggcctttgagcacagcgtgcacagatatggccagagcactggagagttcctgcaggtgggggacctgaaggagtgctgccccatctgcatcaaccaggatgacagctggaaggagcagcccacagcccagacctacctgaacacctggttctag

SEQ ID NO: 129466 - DNA, 1725 bp, Artificial Sequence
  derived and/or modified sequence
atgtgcccccgggccgcccgggcccccgccaccctgctgctggccctgggggcggttctgtggccggctgcgggcgcatgggaactgactatacttcacaccaacgacgtccattcccgcttggagcaaacttcagaagactccagtaagtgtgtcaatgcgtccaggtgtatgggcggcgttgcgagactttttactaaagtgcagcagatacgaagggcggaacctaatgttctgcttctcgacgccggggaccagtaccaagggactatttggtttacagtgtataagggggccgaagtggcccactttatgaacgcattacgctacgacgctatggccctgggaaatcacgagtttgacaacggcgtcgaagggctaatcgaaccattgcttaaagaggccaaattcccaattctttctgcaaacatcaaggcaaagggcccgctggccagccagataagcggactctatcttccatacaaggtgctcccggtgggggatgaggttgttgggatcgtgggctatacttccaaagaaacgccgttcctaagtaatccggggaccaacctggtatttgaagacgagataacggctctgcagccagaggtcgataaattgaaaactttgaatgtaaacaagattattgctctcgggcattctggttttgagatggacaaactgatagcacaaaaggtgcggggcgtggacgttgttgtgggaggacactcgaacacattcctgtatacaggaaaccccccctcgaaagaagtgccagctgggaagtatccctttatagtcacctcagatgacgggcggaaagtgccagtggtgcaggcctacgcatttggaaaatacctaggatacctgaaaatcgaattcgatgagagaggaaatgttatctcctcgcacgggaatccgattctgctcaactcctcaatacccgaggacccctcgatcaaagcagatattaataagtggcggataaaactggacaactactcaacacaggaactcggcaagactatcgtgtatttagacggtagttcccaaagctgcaggttcagagaatgtaatatgggcaacctcatctgcgatgccatgatcaataacaatttgaggcacacagacgagatgttctggaatcacgtcagcatgtgtatcttgaacggaggtggaatccggtctcccatcgacgagcgaaataacgggactataacctgggagaacctggcagcagtgttgccgtttgggggtaccttcgacctggttcaactgaaaggctctacactcaaaaaagccttcgaacactcggtgcaccggtatggtcagagtacgggggaattccttcaagttggtggcattcatgtcgtctacgacctctccaggaagcctggtgaccgtgtagttaaactcgatgtgctgtgcactaagtgtcgcgtgcctagctacgatccattaaaaatggatgaggtttataaagttatcttaccgaattttctggcgaacggcggcgacggttttcagatgatcaaagacgagctcctcaggcatgattcaggggaccaggatattaacgtcgtgagcacttatatatctaaaatgaaggtgatttacccagctgttgagggtcggatcaaattctccacgggatcacattgccatgggtctttctccctgattttccttagcctgtgggccgtaatctttgtgctttatcagtag

SEQ ID NO: 129467 - DNA, 780 bp, Artificial Sequence
  derived and/or modified sequence
atggacaagctgatcgcccagaaggtgcggggcgtggacgtggtggttgggggccactccaacaccttcctttacacgggcaatcctcctagtaaggaggtgccagctggaaagtacccatttatagttactagcgatgatggaaggaaagtgccggtcgtgcaagcttacgcctttggaaaatacttgggctatcttaagatcgagttcgacgagcgtgggaatgtgataagttctcatggcaatccaattctcctcaattccagtataccggaggatcccagcatcaaggcagacattaacaagtggcgcataaaactcgacaattactctacgcaggagcttggtaaaactatcgtgtatctcgacggctcgtcgcagagctgccgatttagggagtgcaacatgggcaacctgatttgtgatgccatgatcaacaataatctgagacataccgatgaaatgttttggaaccatgtgtccatgtgtatcctgaacggcggcggaattagaagcccaattgacgaaaggaacaatggcacaattacatgggaaaacttggcagctgttcttccatttggcggaactttcgacctggtgcagctgaagggctccactctgaagaaagccttcgagcattcagtccaccgttatggacaatcgacaggggagttcttgcaagtgggggatctcaaggagtgctgtcctatatgtatcaatcaagatgatagttggaaagagcagcctacggcccaaacctatctgaacacttggttttag

SEQ ID NO: 129468 - DNA, 540 bp, Artificial Sequence
  derived and/or modified sequence
tgaaaccccatcctgctgaacagcagcatccccgaggaccccagcatcaaggcggacattaacaaatggcgcattaaattagataactactccacccaagagctgggtaagacaatcgtttatctggacggtagcagccagtcctgcagatttcgagaatgtaatatgggcaacctgatctgcgatgcgatgatcaataataacctgcggcataccgacgaaatgttctggaaccatgtcagtatgtgtatactgaacggtggcggcatccggagtccgattgacgaacggaacaatggtaccatcacttgggagaaccttgctgccgtgcttccgttcggaggcaccttcgatttggtgcagttaaaaggtagcacactgaaaaaggcctttgagcatagcgtacacaggtacggtcagagtaccggggagttcctccaggttggagatcttaaggaatgctgtccaatctgtatcaatcaagatgattcgtggaaggagcagccaactgcacaaacatacctcaatacatggttctag

SEQ ID NO: 129469 - DNA, 1725 bp, Artificial Sequence
  derived and/or modified sequence
atgtgcccacgggcagcccgtgcgccagctaccttgctgctcgccctcggcgctgtgctatggcccgctgccggagcttgggaattgacaatcctccacaccaacgatgtccattcccggcttgaacaaacctctgaggatagctctaagtgcgtgaacgccagtcgatgtatgggtggggtcgctcgcttgttcactaaggtccagcaaatcagaagggctgagcccaacgtgctgcttctcgacgctggagatcaatatcagggtaccatctggtttacagtttacaaaggggctgaagtagcgcatttcatgaatgcactgcgctacgatgctatggccctcgggaatcatgaatttgataacggcgttgagggccttatcgagccgctcctgaaagaagctaagtttccgattctctcagccaacattaaagccaagggacctttagcttcgcagatcagtggactctacctgccttacaaagtcctgccagtgggcgacgaggtggtggggatagtgggttacacaagtaaagagaccccctttttatcaaacccaggtacgaacctggtcttcgaggatgagatcactgctctccagcctgaagtagacaagctgaagaccttgaatgttaataaaataattgctttgggtcatagcgggtttgagatggacaaactgatcgcccagaaagttagaggagtggatgtggtggtgggagggcacagtaatacttttctctatactggaaacccaccctcaaaggaggtccccgctggcaagtatccattcattgttacgagcgacgacggtcgaaaagtacccgtggtgcaggcttacgcttttggaaagtatctcgggtacctgaagattgaattcgatgaacggggtaacgtaatctcaagtcacgggaatccaatcctgctgaactcctcaatacccgaagatcctagtataaaagccgatatcaataaatggagaatcaaactggataactatagtactcaggagctgggtaaaaccatcgtataccttgacggatccagtcaaagctgtagattcagggaatgtaacatgggaaatcttatttgcgatgcaatgattaataacaacttgcgacatacagacgagatgttctggaatcacgtgtccatgtgtatcttgaacggcggaggtattcgatcccctatcgatgagcgcaacaatggtactatcacatgggagaatttggctgcagtgctgcctttcggcggaacatttgatctggtccagctgaagggatccaccctaaagaaagcctttgaacattccgtgcaccggtatggccaatccactggcgaatttttacaggtcggcggaatccacgtggtatatgacctcagtaggaaaccaggcgaccgggtggtcaagctggatgtgctctgtacaaaatgccgcgtgccttcctacgacccattgaaaatggacgaggtctacaaggtgatcctgccaaatttcctggccaacggaggagacgggttccagatgatcaaggatgaactgctgcgacacgatagtggtgaccaggatatcaatgtggtgtccacgtacatatccaagatgaaagtaatatatcctgccgtggagggccgtatcaagttttctacagggtctcattgccacgggagtttttccctgattttcctatcgctgtgggcagttatattcgtgctctaccaatag

SEQ ID NO: 129470 - DNA, 780 bp, Artificial Sequence
  derived and/or modified sequence
atggacaaacttattgctcagaaagtgagaggagtcgatgtagtagtggggggacatagtaacacctttctctatacaggaaatccgccttcaaaagaggtccccgctgggaaatatccgtttatcgtcacaagcgatgacggaagaaaggttccggtcgtgcaggcttatgccttcggtaaatacctgggatatctaaagattgagtttgacgaacggggtaacgttatatcctcccatggcaatcccattttgctgaattcgtctattccagaggatccaagcatcaaggccgacatcaataaatggcggatcaaactcgacaactactcaactcaagagcttggcaaaaccatcgtttacctggatgggagctcacaatcctgccgttttcgcgagtgcaatatgggcaacctgatctgcgacgctatgataaataacaatctgagacacacggatgaaatgttttggaaccacgtcagtatgtgcattctgaacggcggtgggattcgttctccgatagatgaacgcaataatggaacgattacatgggagaacctggccgcagtcctgccattcgggggaacttttgatctggttcagctgaaggggagcacccttaaaaaggcgtttgagcactccgtgcaccggtacggtcaaagtaccggtgagttcttacaggtcggggatctgaaggagtgctgcccaatatgtatcaaccaagacgactcatggaaagagcagcctacagctcagacatacctaaacacgtggttctag

SEQ ID NO: 129471 - DNA, 540 bp, Artificial Sequence
  derived and/or modified sequence
tgaaaccccatccttctgaattcaagcatccctgaagaccccagcataaaggctgacataaataagtggcgcattaagctggataattacagtacgcaagaattaggtaaaaccatcgtgtacctggacggctcgagtcagtcctgccggttcagggagtgcaatatgggaaacttgatctgcgatgccatgataaacaacaatctgcgacataccgatgagatgttctggaaccacgtgagtatgtgcatactgaacggcggtggcattaggagcccaatcgatgaacgcaacaacggcactattacctgggaaaatctggcagctgtgctgcccttcggtgggacattcgacctagtccagctgaagggcagcacccttaagaaggcgttcgaacattcggtgcatcgatacgggcagagtacgggagagtttctgcaggtgggcgacctgaaggaatgctgcccaatttgcatcaaccaggatgatagctggaaggaacagcccactgcccagacttatctgaatacctggttctag

SEQ ID NO: 129472 - DNA, 3548 bp, Artificial Sequence
  derived and/or modified sequence
gcactcgcccggctcgcccgctttcgcacccagttcacgcgccacagctatgtgtccccgagccgcgcgggcgcccgcgacgctactcctcgccctgggcgcggtgctgtggcctgcggctggcgcctgggagcttacgattttgcacaccaacgacgtgcacagccggctggagcagaccagcgaggactccagcaagtgcgtcaacgccagccgctgcatgggtggcgtggctcggctcttcaccaaggttcagcagatccgccgcgccgaacccaacgtgctgctgctggacgccggcgaccagtaccagggcactatctggttcaccgtgtacaagggcgccgaggtggcgcacttcatgaacgccctgcgctacgatgccatggcactgggaaatcatgaatttgataatggtgtggaaggactgatcgagccactcctcaaagaggccaaatttccaattctgagtgcaaacattaaagcaaaggggccactagcatctcaaatatcaggactttatttgccatataaagttcttcctgttggtgatgaagttgtgggaatcgttggatacacttccaaagaaaccccttttctctcaaatccagggacaaatttagtgtttgaagatgaaatcactgcattacaacctgaagtagataagttaaaaactctaaatgtgaacaaaattattgcactgggacattcgggttttgaaatggataaactcatcgctcagaaagtgaggggtgtggacgtcgtggtgggaggacactccaacacatttctttacacaggcaatccaccttccaaagaggtgcctgctgggaagtacccattcatagtcacttctgatgatgggcggaaggttcctgtagtccaggcctatgcttttggcaaatacctaggctatctgaagatcgagtttgatgaaagaggaaacgtcatctcttcccatggaaatcccattcttctaaacagcagcattcctgaagatccaagcataaaagcagacattaacaaatggaggataaaattggataattattctacccaggaattagggaaaacaattgtctatctggatggctcctctcaatcatgccgctttagagaatgcaacatgggcaacctgatttgtgatgcaatgattaacaacaacctgagacacacggatgaaatgttctggaaccacgtatccatgtgcattttaaatggaggtggtatccggtcgcccattgatgaacgcaacaatggcacaattacctgggagaacctggctgctgtattgccctttggaggcacatttgacctagtccagttaaaaggttccaccctgaagaaggcctttgagcatagcgtgcaccgctacggccagtccactggagagttcctgcaggtgggcggaatccatgtggtgtatgatctttcccgaaaacctggagacagagtagtcaaattagatgttctttgcaccaagtgtcgagtgcccagttatgaccctctcaaaatggacgaggtatataaggtgatcctcccaaacttcctggccaatggtggagatgggttccagatgataaaagatgaattattaagacatgactctggtgaccaagatatcaacgtggtttctacatatatctccaaaatgaaagtaatttatccagcagttgaaggtcggatcaagttttccacaggaagtcactgccatggaagcttttctttaatatttctttcactttgggcagtgatctttgttttataccaatagccaaaaattctccttgcctttaatgtgtgaaactgcattttttcaagtgagattcaaatctgccttttaggacctggctttgtgacagcaaaaaccatctttacaggctcctagaagctgaaggttagagcattataaaatgaagagacagacatgattactcagggtcagcaacctagtgagttagaaaaaaaattaacatagggccctataaggagaaagccaactatgttaagtttacgtgtccaaattttaatgaaattttactaacaattttaaaccatatttttcttcttcatatccatttctaatccatcaaacagcttatgtttacataaaattttatcattcacaaggaagttttaagcacactgtctcatttgatatccacaacttatttttggtaggaaagagagatgtttttcccacctgtcagatgaaaaaactgaagctcaaaaagggttgacttgaccatacagctaatgctgacagatccaagacctagacctaggtcttttgaactcaagtccagcattctcaactatatcaagttactgttcagaatacttaatatctcctctcttcataattatcaatagccccaagctcatggatgacaaatctctgctttatttcttgtctctattttttcactttatagctcctgttataatagcaagtttaatggtataaacacaggataccatcctctcttgcaacacccatgtgcctttgatgagtcaggtagcaagctgtagtagataatgagaaaggccagaggctgcaaaagacagtcaaaggacacgagagaaaggaaggggaagaacaggactccaggactgttttatattatagaaaagcaagagctaaagagcatttacacatgttaaacagatacttgttaagcatagtgcctgacacacggcattagctgttattttatgagattccatcagctctgcctctgtcctctttcttctaacatgaaggtatcatgagaagagaaccttctaacataagctgtaattctaaacctgcacttgtccctctccagcaagaggctagcactgaattcattctactcatactacacacccagttatggaatgtccagagttctcgaagaaaataaatgactttaggaagaggtatacattttttaagtcgctctgcctccaaatctgaacagtcactgtaaatcattcttaagcccagatatgagaacttctgctggaaagtgggaccctctgagtgggtggtcagaaaatacccatgctgatgaaatgacctatgcccaaagaacaaatacttaacgtgggagtggaaccacatgagcctgctcagctctgcataagtaattcaagaaatgggaggcttcaccttaaaaacagtgtgcaaatggcagctagaggttttgataggaagtatgtttgtttcttagtgtttacaaatattaagtactcttgatacaaaatatacttttaaacttcataacctttttataaaagttgttgcagcaaaataatagcctcggttctatgcatatatggattagctataaaaaatgtcaataagattgtacaaggaaaattagagaaagtcacatttagggtttattttttacacttggccagtaaaatagggtaaatcctattagaattttttaaagaactttttttaagtttcctaaatctgtgtgtgtattgtgaagtggtataagaaatgactttgaaccactttgcaattgtagattcccaacaataaaattgaagat

SEQ ID NO: 129473 - DNA, 2008 bp, Artificial Sequence
  derived and/or modified sequence
actcctcctctctgcccctcagctcgctcatctttcttcccgccccctctcttttccttctttggttctttgaagtgatgagctagcgcaaccacaaaccatacattccttttgtagaaaaacccgtgcctcgaatgaggcgagactcagagaggacccaggcgcggggcggacccctccaattccttcctcgcgcccccgaaagagcggcgcaccagcagccgaactgccggcgcccaggctccctggtccggccgggatgcggccggtacccgctccccgccgggaacaacctctccactcttcctgcagggagctggtgccagccgacagccgcgccagggccgctccgggtaccagggtcggatcgggtgacgtcgcgaacttgcgcctggccgccaagccggcctccaggctgaagaaggacccgccccggccttgacccgggccccgcccctccagccggggcaccgagccccggccctagctgctcgcccctactcgccggcactcgcccggctcgcccgctttcgcacccagttcacgcgccacagctatgtgtccccgagccgcgcgggcgcccgcgacgctactcctcgccctgggcgcggtgctgtggcctgcggctggcgcctgggagcttacgattttgcacaccaacgacgtgcacagccggctggagcagaccagcgaggactccagcaagtgcgtcaacgccagccgctgcatgggtggcgtggctcggctcttcaccaaggttcagcagatccgccgcgccgaacccaacgtgctgctgctggacgccggcgaccagtaccagggcactatctggttcaccgtgtacaagggcgccgaggtggcgcacttcatgaacgccctgcgctacgatgccatggcactgggaaatcatgaatttgataatggtgtggaaggactgatcgagccactcctcaaagaggccaaatttccaattctgagtgcaaacattaaagcaaaggggccactagcatctcaaatatcaggactttatttgccatataaagttcttcctgttggtgatgaagttgtgggaatcgttggatacacttccaaagaaaccccttttctctcaaatccagggacaaatttagtgtttgaagatgaaatcactgcattacaacctgaagtagataagttaaaaactctaaatgtgaacaaaattattgcactgggacattcgggttttgaaatggataaactcatcgctcagaaagtgaggggtgtggacgtcgtggtgggaggacactccaacacatttctttacacaggcaatccaccttccaaagaggtgcctgctgggaagtacccattcatagtcacttctgatgatgggcggaaggttcctgtagtccaggcctatgcttttggcaaatacctaggctatctgaagatcgagtttgatgaaagaggaaacgtcatctcttcccatggaaatcccattcttctaaacagcagcattcctgaagatccaagcataaaagcagacattaacaaatggaggataaaattggataattattctacccaggaattagggaaaacaattgtctatctggatggctcctctcaatcatgccgctttagagaatgcaacatgggcaacctgatttgtgatgcaatgattaacaacaacctgagacacacggatgaaatgttctggaaccacgtatccatgtgcattttaaatggaggtggtatccggtcgcccattgatgaacgcaacaatggcacaattacctgggagaacctggctgctgtattgccctttggaggcacatttgacctagtccagttaaaaggttccaccctgaagaaggcctttgagcatagcgtgcaccgctacggccagtccactggagagttcctgcaggtgggcgatttaaaggaatgctgtccaatctgtattaaccaggatgattcctggaaggagcagcctactgcacagacatacctgaacacctggttctag

SEQ ID NO: 129474 - DNA, 738 bp, Artificial Sequence
  derived and/or modified sequence
gaaatcccattcttctaaacagcagcattcctgaagatccaagcataaaagcagacattaacaaatggaggataaaattggataattattctacccaggaattagggaaaacaattgtctatctggatggctcctctcaatcatgccgctttagagaatgcaacatgggcaacctgatttgtgatgcaatgattaacaacaacctgagacacacggatgaaatgttctggaaccacgtatccatgtgcattttaaatggaggtggtatccggtcgcccattgatgaacgcaacaatggcacaattacctgggagaacctggctgctgtattgccctttggaggcacatttgacctagtccagttaaaaggttccaccctgaagaaggcctttgagcatagcgtgcaccgctacggccagtccactggagagttcctgcaggtgggcgatttaaaggaatgctgtccaatctgtattaaccaggatgattcctggaaggagcagcctactgcacagacatacctgaacacctggttctagtcccactgtgacctggggcaagttctcaacccctctgggcacagggagaaaacctttcctgtttatctcatggactgcagtgaaagttgaatggaaataaatgcttcctaaattgccaagggcttctgaaacacttttgttaataattccacagtccagtgaattaatcctttaaaagcaatcttattttacctggaaa

SEQ ID NO: 129475 - DNA, 1725 bp, Artificial Sequence
  derived and/or modified sequence
atgtgccccagagccgccagagcccccgccaccctgctgctggccctgggcgccgtgctgtggcccgccgccggcgcctgggagctgaccatcctgcacaccaacgacgtgcacagcagactggagcagaccagcgaggacagcagcaagtgcgtgaacgccagcagatgcatgggcggcgtggccagactgttcaccaaggtgcagcagatcagaagagccgagcccaacgtgctgctgctggacgccggcgaccagtaccagggcaccatctggttcaccgtgtacaagggcgccgaggtggcccacttcatgaacgccctgagatacgacgccatggccctgggcaaccacgagttcgacaacggcgtggagggcctgatcgagcccctgctgaaggaggccaagttccccatcctgagcgccaacatcaaggccaagggccccctggccagccagatcagcggcctgtacctgccctacaaggtgctgcccgtgggcgacgaggtggtgggcatcgtgggctacaccagcaaggagacccccttcctgagcaaccccggcaccaacctggtgttcgaggacgagatcaccgccctgcagcccgaggtggacaagctgaagaccctgaacgtgaacaagatcatcgccctgggccacagcggcttcgagatggacaagctgatcgcccagaaggtgagaggcgtggacgtggtggtgggcggccacagcaacaccttcctgtacaccggcaacccccccagcaaggaggtgcccgccggcaagtaccccttcatcgtgaccagcgacgacggcagaaaggtgcccgtggtgcaggcctacgccttcggcaagtacctgggctacctgaagatcgagttcgacgagagaggcaacgtgatcagcagccacggcaaccccatcctgctgaacagcagcatccccgaggaccccagcatcaaggccgacatcaacaagtggagaatcaagctggacaactacagcacccaggagctgggcaagaccatcgtgtacctggacggcagcagccagagctgcagattcagagagtgcaacatgggcaacctgatctgcgacgccatgatcaacaacaacctgagacacaccgacgagatgttctggaaccacgtgagcatgtgcatcctgaacggcggcggcatcagaagccccatcgacgagagaaacaacggcaccatcacctgggagaacctggccgccgtgctgcccttcggcggcaccttcgacctggtgcagctgaagggcagcaccctgaagaaggccttcgagcacagcgtgcacagatacggccagagcaccggcgagttcctgcaggtgggcggcatccacgtggtgtacgacctgagcagaaagcccggcgacagagtggtgaagctggacgtgctgtgcaccaagtgcagagtgcccagctacgaccccctgaagatggacgaggtgtacaaggtgatcctgcccaacttcctggccaacggcggcgacggcttccagatgatcaaggacgagctgctgagacacgacagcggcgaccaggacatcaacgtggtgagcacctacatcagcaagatgaaggtgatctaccccgccgtggagggcagaatcaagttcagcaccggcagccactgccacggcagcttcagcctgatcttcctgagcctgtgggccgtgatcttcgtgctgtaccagtag

SEQ ID NO: 129476 - DNA, 780 bp, Artificial Sequence
  derived and/or modified sequence
atggacaagctgatcgcccagaaggtgagaggcgtggacgtggtggtgggcggccacagcaacaccttcctgtacaccggcaacccccccagcaaggaggtgcccgccggcaagtaccccttcatcgtgaccagcgacgacggcagaaaggtgcccgtggtgcaggcctacgccttcggcaagtacctgggctacctgaagatcgagttcgacgagagaggcaacgtgatcagcagccacggcaaccccatcctgctgaacagcagcatccccgaggaccccagcatcaaggccgacatcaacaagtggagaatcaagctggacaactacagcacccaggagctgggcaagaccatcgtgtacctggacggcagcagccagagctgcagattcagagagtgcaacatgggcaacctgatctgcgacgccatgatcaacaacaacctgagacacaccgacgagatgttctggaaccacgtgagcatgtgcatcctgaacggcggcggcatcagaagccccatcgacgagagaaacaacggcaccatcacctgggagaacctggccgccgtgctgcccttcggcggcaccttcgacctggtgcagctgaagggcagcaccctgaagaaggccttcgagcacagcgtgcacagatacggccagagcaccggcgagttcctgcaggtgggcgacctgaaggagtgctgccccatctgcatcaaccaggacgacagctggaaggagcagcccaccgcccagacctacctgaacacctggttctag

SEQ ID NO: 129477 - DNA, 540 bp, Artificial Sequence
  derived and/or modified sequence
tgaaaccccatcctgctgaacagcagcatccccgaggaccccagcatcaaggccgacatcaacaagtggagaatcaagctggacaactacagcacccaggagctgggcaagaccatcgtgtacctggacggcagcagccagagctgcagattcagagagtgcaacatgggcaacctgatctgcgacgccatgatcaacaacaacctgagacacaccgacgagatgttctggaaccacgtgagcatgtgcatcctgaacggcggcggcatcagaagccccatcgacgagagaaacaacggcaccatcacctgggagaacctggccgccgtgctgcccttcggcggcaccttcgacctggtgcagctgaagggcagcaccctgaagaaggccttcgagcacagcgtgcacagatacggccagagcaccggcgagttcctgcaggtgggcgacctgaaggagtgctgccccatctgcatcaaccaggacgacagctggaaggagcagcccaccgcccagacctacctgaacacctggttctag

SEQ ID NO: 129478 - DNA, 774 bp, Artificial Sequence
  derived and/or modified sequence
atgagcattctgttttatgtcatctttttggcatacctgagggggatacaggggaacaatatggatcaacgttccctgcccgaggactcactgaacagtttgatcattaagttgattcaggcagacatactgaagaataagctgagtaaacaaatggtcgacgtaaaggaaaattatcagagcacactacccaaagctgaggcccctcgtgaacccgagagaggtggtcctgcaaaaagcgcttttcagccagtcatcgccatggatacagagctcctgaggcagcagaggaggtataatagtccccgagtgttgcttagcgacagtaccccgttggaacctcccccactgtatttgatggaggattacgtgggatcccccgtcgtcgctaataggacatctcgccggaaacgatacgccgagcacaagagtcaccggggggaatatagcgtgtgtgattcagagagcctgtgggtcacagacaagtctagcgcaatcgatatccgggggcatcaggtgacagtcctcggtgagatcaaaacagggaattcacctgtgaaacagtatttctacgaaacacggtgcaaagaagccaggccagtaaagaacggatgtagggggatagacgacaagcactggaactctcagtgcaagacttcccagacttacgtgagggcactgaccagcgagaacaacaagctggttggctggaggtggatccgcatcgacacctcatgtgtttgtgccctctcgcgcaaaatcggcagaacttag

SEQ ID NO: 129479 - DNA, 774 bp, Artificial Sequence
  derived and/or modified sequence
atgagcatcctcttctacgtgatcttcctggcctacctgcggggcatccagggcaacaacatggaccagaggagcctgcctgaggacagcctgaacagcctcatcatcaagctgatccaggccgacatcctgaagaacaagctgagcaagcagatggtggatgtgaaggagaactaccagagcaccctgcccaaggccgaggccccccgggagcctgagcggggcggccctgccaagagcgccttccagcccgtcatcgccatggacacagagctgctgcggcagcagaggcgctacaacagcccccgggtgctgctgagtgacagcacccccctggagcccccacccctgtacctgatggaggactatgtgggcagccctgtggtggccaacagaaccagcaggaggaagagatatgcagagcacaagagccacagaggagagtacagcgtgtgtgacagcgagagcctgtgggtgacagacaagagcagcgccatcgacatccggggccaccaggtgacagtgctgggggagatcaagacaggcaacagccctgtgaagcagtacttctatgagacccgctgcaaggaggcccggcctgtgaagaatggctgccggggcattgatgacaagcactggaacagccagtgcaagaccagccagacctacgtgcgggccctgaccagcgagaacaacaagctggtgggctggcgctggatcagaattgacaccagctgtgtgtgtgccctgagcaggaagattggccgcacctag

SEQ ID NO: 129480 - DNA, 774 bp, Artificial Sequence
  derived and/or modified sequence
atgagcatcctgttctacgtgatcttcctggcctacctgcggggcatacagggaaataacatggatcagaggtctctccctgaggacagccttaactcgctcatcattaagctgatccaggccgacattctgaaaaataagttaagtaaacaaatggtggatgtcaaagagaactaccagagcacactcccaaaagccgaagccccccgtgagcctgagcgcggcggccccgctaagtctgccttccagccggttatcgctatggacaccgaacttctgcggcagcagcgccgatacaacagtcctcgcgtgctcttgtccgatagcacaccactcgaaccccctccactgtatttgatggaggactatgtgggatcaccagtggtggccaatcggacatcgagacgcaagaggtatgctgagcacaagtctcaccgtggggagtactccgtctgcgactccgaatccctgtgggtcacagacaaatcatctgcgattgatatcagggggcaccaggttaccgtccttggggagataaaaacaggcaacagtcccgtgaagcagtatttttacgaaacccgctgcaaggaggctaggcccgttaaaaatggctgcaggggaatcgacgacaaacattggaattctcagtgcaaaaccagtcagacgtatgtcagggcactgacatctgaaaataacaagctcgtaggttggcgctggatccgaatagacacttcatgcgtatgtgcattgagccgaaagatcggccgcacttag

SEQ ID NO: 129481 - DNA, 774 bp, Artificial Sequence
  derived and/or modified sequence
atgagcattctcttctacgtgattttcctggcctacttgcggggaatacaaggcaataacatggaccagcggagtctcccggaggattccctgaatagccttattatcaagcttatccaggctgatattctaaagaataaactttcaaagcagatggtggacgtcaaagaaaactaccaatccactctgcccaaagctgaagcaccacgcgaacccgaaagggggggaccggcaaagagtgcattccagccggtgattgcaatggataccgagctgcttcgccagcaacgcaggtacaactcacccagggtgctcctgagcgattcaactcctctggagccaccaccgctctatctgatggaagactacgttggatctccagtagtggccaacaggacttcaaggcggaagaggtacgccgaacataaatcacataggggggagtacagcgtgtgtgactccgagtcattgtgggttaccgacaaaagcagcgccatcgacataagaggacatcaggtgactgtgttaggggaaattaagactggcaattccccagtaaagcaatacttctatgagaccaggtgcaaagaggccaggccggtgaagaatggttgtagaggtatcgatgacaaacactggaattcccaatgcaagacatcccagacatacgttagggccctgacctcggagaacaataagctggtaggctggcgctggatacgtatcgatacgtcctgcgtgtgtgctctgagccgtaaaattgggagaacttag

SEQ ID NO: 129482 - DNA, 774 bp, Artificial Sequence
  derived and/or modified sequence
atgtctatattgttttatgtcatttttctcgcctaccttaggggtattcagggtaataatatggaccagcgtagcttgcctgaagacagcctgaattcactgatcattaaattaatccaggcagatatcttgaaaaataaactgagtaagcagatggtagatgtcaaggaaaactaccagtctacattgcctaaggctgaggcccccagggagcctgagagaggaggccctgccaaaagcgcatttcagcctgtcattgccatggacactgagctgctccgacaacaaaggcgctataattctccccgggtcctgctctcagactcaacccccctcgaacccccacccctctacttgatggaagactacgtgggtagcccagtagttgcgaacaggacatccagaagaaagagatacgccgagcacaagtcccacaggggtgaatattcagtctgcgactccgagtccttgtgggtgaccgataaaagtagcgcaatcgatatcagagggcatcaggtaaccgtactcggtgaaatcaaaaccgggaatagccccgtgaagcagtatttctacgagacaaggtgcaaagaggccagaccagttaagaacggatgtaggggcatcgatgacaagcattggaactcgcaatgcaagacatcccagacatatgtcagggcactaacatctgagaacaataagctggtgggatggcggtggattcggattgatacaagttgtgtatgcgctctgagccgtaagattggaagaacctag

SEQ ID NO: 129483 - DNA, 774 bp, Artificial Sequence
  derived and/or modified sequence
atgtccattctcttttatgtcatctttctggcctacttacgcggcatccaagggaacaatatggaccagagatcattgccagaggactctctcaattcacttataattaagttgatccaggccgacattctgaaaaacaaactgagcaaacagatggtagatgtgaaggaaaattatcagagtacactccccaaggccgaggcacccagggagcctgaaaggggtggccctgctaaaagcgccttccaacctgtgatcgccatggacaccgaacttctgcgccaacagagacgatacaattcaccaagggtcctcctgtcagatagtacaccattagaaccgccccccctatatttgatggaagactacgtcgggtctccagttgtagctaataggacgtccagacggaagagatatgcagagcacaagagccatcggggtgagtactccgtgtgtgattctgaatccttgtgggttacagacaaaagttcagccattgacattaggggacaccaggtgaccgtgctcggagaaattaaaaccggcaacagtccagtgaagcagtatttttatgaaacacgctgtaaagaagctaggcccgttaagaatggctgtaggggaatcgatgataaacactggaactctcaatgtaagacatcacagacatacgtaagagccttaaccagcgaaaataacaaacttgtaggctggcggtggatcagaatagacacctcctgcgtgtgtgcactttccaggaagatcgggaggacttag

SEQ ID NO: 129484 - DNA, 774 bp, Artificial Sequence
  derived and/or modified sequence
atgagcatcctgttctacgtgatcttcctggcctacctgagaggcatccagggcaacaacatggaccagagaagcctgcccgaggacagcctgaacagcctgatcatcaagctgatccaggccgacatcctgaagaacaagctgagcaagcagatggtggacgtgaaggagaactaccagagcaccctgcccaaggccgaggcccccagagagcccgagagaggcggccccgccaagagcgccttccagcccgtgatcgccatggacaccgagctgctgagacagcagagaagatacaacagccccagagtgctgctgagcgacagcacccccctggagcccccccccctgtacctgatggaggactacgtgggcagccccgtggtggccaacagaaccagcagaagaaagagatacgccgagcacaagagccacagaggcgagtacagcgtgtgcgacagcgagagcctgtgggtgaccgacaagagcagcgccatcgacatcagaggccaccaggtgaccgtgctgggcgagatcaagaccggcaacagccccgtgaagcagtacttctacgagaccagatgcaaggaggccagacccgtgaagaacggctgcagaggcatcgacgacaagcactggaacagccagtgcaagaccagccagacctacgtgagagccctgaccagcgagaacaacaagctggtgggctggagatggatcagaatcgacaccagctgcgtgtgcgccctgagcagaaagatcggcagaacctag

SEQ ID NO: 129485 - protein, 312 aa, Artificial Sequence
  derived and/or modified sequence
MCSPQESGMTALSARMLTRSRSLGPGAGPRGCREEPGPLRRREAAAEARKSHSPVKRPRKAQRLRVAYEGSDSEKGEGAEPLKVPVWEPQDWQQQLVNIRAMRNKKDAPVDHLGTEHCYDSSAPPKVRRYQVLLSLMLSSQTKDQVTAGAMQRLRARGLTVDSILQTDDATLGKLIYPVGFWRSKVKYIKQTSAILQQHYGGDIPASVAELVALPGVGPKMAHLAMAVAWGTVSGIAVDTHVHRIANRLRWTKKATKSPEETRAALEEWLPRELWHEINGLLVGFGQQTCLPVHPRCHACLNQALCPAAQGL

SEQ ID NO: 129486 - DNA, 1067 bp, Artificial Sequence
  derived and/or modified sequence
ggccgcatgggccgccgggatgtgtagtccgcaggagtccggcatgaccgccttgagcgcgaggatgctgacccggagccggagcctgggacccggggctgggccgcgggggtgtagggaggagcccgggcctctccggagaagagaggctgcagcagaagcgaggaaaagccacagccccgtgaagcgtccgcggaaagcacagagactgcgtgtggcctatgagggctcggacagtgagaaaggtgagggggctgagcccctcaaggtgccagtctgggagccccaggactggcagcaacagctggtcaacatccgtgccatgaggaacaaaaaggatgcacctgtggaccatctggggactgagcactgctatgactccagtgcccccccaaaggtacgcaggtaccaggtgctgctgtcactgatgctctccagccaaaccaaagaccaggtgacggcgggcgccatgcagcgactgcgggcgcggggcctgacggtggacagcatcctgcagacagatgatgccacgctgggcaagctcatctaccccgtcggtttctggaggagcaaggtgaaatacatcaagcagaccagcgccatcctgcagcagcactacggtggggacatcccagcctctgtggccgagctggtggcgctgccgggtgttgggcccaagatggcacacctggctatggctgtggcctggggcactgtgtcaggcattgcagtggacacgcatgtgcacagaatcgccaacaggctgaggtggaccaagaaggcaaccaagtccccagaggagacccgcgccgccctggaggagtggctgcctagggagctgtggcacgagatcaatggactcttggtgggcttcggccagcagacctgtctgcctgtgcaccctcgctgccacgcctgcctcaaccaagccctctgcccggccgcccagggtctctgatggccgcatggctctggccgaggtgccgctgtggccaccgtctgtgaagtggctttacgcttcaggaagccacgcctgttgaataaagctttggtgtgtttgcagatgg

SEQ ID NO: 129487 - DNA, 939 bp, Artificial Sequence
  derived and/or modified sequence
atgtgcagcccccaggagagcggcatgaccgccctgagcgccagaatgctgaccagaagcagaagcctgggccccggcgccggccccagaggctgcagagaggagcccggccccctgagaagaagagaggccgccgccgaggccagaaagagccacagccccgtgaagagacccagaaaggcccagagactgagagtggcctacgagggcagcgacagcgagaagggcgagggcgccgagcccctgaaggtgcccgtgtgggagccccaggactggcagcagcagctggtgaacatcagagccatgagaaacaagaaggacgcccccgtggaccacctgggcaccgagcactgctacgacagcagcgccccccccaaggtgagaagataccaggtgctgctgagcctgatgctgagcagccagaccaaggaccaggtgaccgccggcgccatgcagagactgagagccagaggcctgaccgtggacagcatcctgcagaccgacgacgccaccctgggcaagctgatctaccccgtgggcttctggagaagcaaggtgaagtacatcaagcagaccagcgccatcctgcagcagcactacggcggcgacatccccgccagcgtggccgagctggtggccctgcccggcgtgggccccaagatggcccacctggccatggccgtggcctggggcaccgtgagcggcatcgccgtggacacccacgtgcacagaatcgccaacagactgagatggaccaagaaggccaccaagagccccgaggagaccagagccgccctggaggagtggctgcccagagagctgtggcacgagatcaacggcctgctggtgggcttcggccagcagacctgcctgcccgtgcaccccagatgccacgcctgcctgaaccaggccctgtgccccgccgcccagggcctgtag

SEQ ID NO: 129488 - DNA, 939 bp, Artificial Sequence
  derived and/or modified sequence
atgtgttcaccacaggaatccggaatgactgcactgagtgctaggatgttgaccaggtcaagatcactgggccccggtgctggcccgagagggtgcagggaggaacctgggcctctgcgcagaagagaggccgccgccgaggcaagaaagtcccactcacccgtgaaaaggccacgaaaggcacaaaggctccgagtcgcttatgaagggtccgattcagagaagggcgagggcgccgagcctctgaaggtcccagtgtgggaacctcaagattggcagcagcaactggttaacataagagcaatgcgaaataagaaagatgcacctgttgaccatctgggaaccgaacactgctatgattctagtgctccacctaaggtaagacggtatcaggtcctgttatcgctgatgctttccagtcagaccaaggatcaggttaccgccggcgctatgcagagactacgggctaggggactcacagtagatagcatattacaaacggacgacgccacattagggaagttgatttatcctgttggcttttggaggtccaaggtgaagtatatcaaacagacctccgctattctccagcagcattacggaggggatattcccgcgtcagtggctgaacttgttgcccttcctggagtgggcccaaaaatggctcacttagctatggccgtggcttgggggacggtgagcggcattgctgtggatactcacgtgcataggatcgctaaccgcctgagatggaccaagaaagcgaccaaatccccagaagagactcgtgcagcgctggaggaatggctgcctcgggaactgtggcacgagatcaatggcctgctcgttggtttcggccagcaaacatgtctgcctgttcaccccaggtgccatgcgtgccttaatcaggccttatgtcctgcggcccaaggcctttag

SEQ ID NO: 129489 - DNA, 939 bp, Artificial Sequence
  derived and/or modified sequence
atgtgcagcccccaggagagcggcatgacagccctgagcgccaggatgctgaccaggagccgcagcctgggccctggagctggcccccggggctgccgggaggagcccggccccctgcggcggcgggaggccgctgctgaggccaggaagagccacagccctgtgaagaggcccaggaaggcccagaggctgcgggtggcctatgagggcagtgacagcgagaagggggagggcgctgagcccctgaaggtgcctgtgtgggagccccaggactggcagcagcagctggtgaacatccgggccatgaggaacaagaaggatgcccctgtggaccacctgggcacagagcactgctatgacagcagcgccccacccaaggtgcggcgctaccaggtgctgctgagcctgatgctgagcagccagaccaaggaccaggtgacagctggggccatgcagaggctgcgggcccggggcctgactgtggacagcatcctgcagacagatgatgccaccctgggcaagctgatctaccctgtgggcttctggaggagcaaggtgaagtacatcaagcagaccagcgccatcctgcagcagcactacggcggggacatcccagcctctgtggccgagctggtggccctgcccggggtgggccccaagatggcccacctggccatggctgtggcctggggcaccgtgtctggaattgctgtggacacccacgtgcacagaattgccaaccggctgcgctggaccaagaaggccaccaagagccctgaggagacccgggccgccctggaggagtggctgccccgggagctgtggcatgagatcaatggcctgctggtgggcttcggccagcagacctgcctgcctgtgcacccccgctgccacgcctgcctgaaccaggccctgtgcccagctgcccagggcctgtag

SEQ ID NO: 129490 - DNA, 939 bp, Artificial Sequence
  derived and/or modified sequence
atgtgcagcccccaggagagcggcatgaccgccctgagcgcccggatgctcaccaggtccagatcactcggaccaggagctgggcctcgagggtgtagagaagagcctggccccctccgccggagggaggctgcagcggaggcacgcaagagccattcaccggtcaagagaccgcgcaaggcccagcgcttaagagtggcctacgagggatctgattcggaaaagggcgagggcgcagagccgcttaaagttcctgtatgggagccgcaggactggcagcagcagctcgtaaatattagagctatgaggaacaagaaagacgcacccgtagatcacctcgggacagagcactgttacgatagcagcgccccacctaaggtgaggcgctatcaggtcctgctgagtttgatgctatccagccagacaaaagaccaggtgacagcaggagcaatgcagagacttcgtgctcgcgggctgactgtggatagcatcctgcagaccgacgatgccaccctggggaaattaatataccccgtgggcttctggcgctcgaaagtgaagtacataaagcaaactagcgccatcctgcagcagcattacgggggtgacatcccagcttccgtggccgagctggttgccttaccaggtgtgggaccgaagatggcccacctcgcaatggcagtcgcctggggtaccgtctccggcattgccgttgatacccatgttcaccggattgcaaacagattgaggtggacgaagaaggcaacaaagagtcccgaagagacaagagcagctctggaagagtggctcccaagagagctctggcacgaaataaatggtcttttagtgggcttcggtcagcagacctgcttacctgtccacccacggtgccatgcatgcctgaatcaagcgctgtgtcccgctgcacaggggctctag

SEQ ID NO: 129491 - DNA, 939 bp, Artificial Sequence
  derived and/or modified sequence
atgtgctcacctcaggagagcggcatgacagccctttcagctaggatgttgacccggtcccgctccctgggaccgggtgctggccctaggggctgccgagaggaaccaggacccttgcgcaggagagaggccgctgctgaagccaggaagtctcatagccctgtgaaaaggccaagaaaagcacagcggttgcgcgtcgcctacgaagggtccgattcagagaagggggagggcgcagagccactcaaagtccccgtgtgggaacctcaggactggcagcaacagctagtgaacatcagagccatgcgtaataagaaggacgcacccgtggaccacttgggtactgagcattgctatgattcctctgctccacccaaggttaggcgctaccaggtactactcagcctgatgcttagctctcaaactaaggaccaggtcaccgccggagcgatgcagcgactgagggccagaggtctcaccgtcgattctattctgcagaccgacgatgccaccttaggcaaactcatttatcccgtgggtttttggcgctctaaagttaaatacatcaagcagaccagcgccatcctgcaacagcactacggaggggacatcccggcaagtgtcgctgagctggtggccctcccaggggtgggccctaaaatggctcacctggccatggccgtggcctggggtactgtttcaggcattgctgtcgacacccatgtacatagaatcgccaaccgactgcgctggactaagaaggccacgaaatcgcctgaggaaacaagagccgctctggaggaatggctgccccgtgagctctggcacgaaattaacggccttctggtcgggtttggccagcaaacctgcctcccagtacacccacgctgccacgcatgcctgaaccaggccctgtgcccggcagcccagggcctatag

SEQ ID NO: 129492 - protein, 796 aa, Artificial Sequence
  derived and/or modified sequence
MLRGGRRGQLGWHSWAAGPGSLLAWLILASAGAAPCPDACCPHGSSGLRCTRDGALDSLHHLPGAENLTELYIENQQHLQHLELRDLRGLGELRNLTIVKSGLRFVAPDAFHFTPRLSRLNLSFNALESLSWKTVQGLSLQELVLSGNPLHCSCALRWLQRWEEEGLGGVPEQKLQCHGQGPLAHMPNASCGVPTLKVQVPNASVDVGDDVLLRCQVEGRGLEQAGWILTELEQSATVMKSGGLPSLGLTLANVTSDLNRKNVTCWAENDVGRAEVSVQVNVSFPASVQLHTAVEMHHWCIPFSVDGQPAPSLRWLFNGSVLNETSFIFTEFLEPAANETVRHGCLRLNQPTHVNNGNYTLLAANPFGQASASIMAAFMDNPFEFNPEDPIPVSFSPVDTNSTSGDPVEKKDETPFGVSVAVGLAVFACLFLSTLLLVLNKCGRRNKFGINRPAVLAPEDGLAMSLHFMTLGGSSLSPTEGKGSGLQGHIIENPQYFSDACVHHIKRRDIVLKWELGEGAFGKVFLAECHNLLPEQDKMLVAVKALKEASESARQDFQREAELLTMLQHQHIVRFFGVCTEGRPLLMVFEYMRHGDLNRFLRSHGPDAKLLAGGEDVAPGPLGLGQLLAVASQVAAGMVYLAGLHFVHRDLATRNCLVGQGLVVKIGDFGMSRDIYSTDYYRVGGRTMLPIRWMPPESILYRKFTTESDVWSFGVVLWEIFTYGKQPWYQLSNTEAIDCITQGRELERPRACPPEVYAIMRGCWQREPQQRHSIKDVHARLQALAQAPPVYLDVLG

SEQ ID NO: 129493 - DNA, 2391 bp, Artificial Sequence
  derived and/or modified sequence
atgctccgaggaggccgacgtgggcaactgggatggcatagctgggctgccggcccagggtcccttctggcctggctaatactggccagcgccggggccgccccatgtcctgatgcttgctgtccgcacggtagctccggtctccgctgcacgcgagatggggccttagacagcctgcaccatcttcctggcgccgagaatctcacagagctatacatcgagaatcagcagcatctgcagcacctggaactgcgcgacctccgtggcctgggtgaattaagaaatctcaccatcgtgaagtcaggtctgcgattcgtggctcctgatgcatttcactttacccccaggttgtcccggctcaacctaagctttaatgctctggaatctctgagctggaaaaccgtgcaaggcctttctcttcaggagctggtgcttagtggtaatccgcttcattgttcttgcgccctgcgctggctgcagagatgggaggaggagggactggggggcgtccctgagcagaaattgcagtgccatggtcagggaccgcttgcacatatgcccaatgccagctgtggcgtgccgactttgaaggtacaggtgcccaatgcctccgtcgatgtcggggacgatgtcctgctccgttgccaggttgagggtagaggcctggagcaggccggatggatcctaactgagttggagcagagcgcaaccgtgatgaagtctggtggcctaccgagcttgggtcttactctcgcaaacgtcacatctgacctaaaccgcaagaacgttacgtgctgggcagagaacgatgttggacgcgccgaggtgtccgtgcaggtgaatgtttctttccccgcgagcgtccagttacataccgctgtggagatgcatcactggtgcatccctttctctgttgacgggcagccagccccttcattgcgctggttattcaatggcagtgttctgaacgagacatcctttatctttaccgaattcttggaacctgccgcaaatgagactgtgcgccacgggtgcctgaggttgaaccaacctacacatgttaacaatggaaattacactctacttgctgccaatccattcggccaagcaagtgcgagcattatggcagcatttatggataatccctttgagttcaaccctgaagatccgatccccgtgagcttcagcccggtcgatactaactcgacctcaggggatcctgtggagaagaaagacgagacccccttcggggtctcagtagccgttggactggcagtgttcgcctgcctgttcctgagtaccctgttactggtccttaataagtgtggccgccgaaataagtttgggatcaaccgtccagctgtgcttgcccccgaggatgggctcgctatgtccctacacttcatgaccctgggcggttcgtctctatccccgactgaggggaaaggcagcgggctccaggggcatataatagaaaacccacagtacttctctgacgcttgtgtccaccacatcaagcggagagacatagtgcttaaatgggaactcggtgagggcgctttcggcaaagtgttcctggccgagtgccacaatcttctgcccgaacaggataaaatgctggtggcagttaaggcccttaaagaggcctccgaaagcgccagacaggatttccagcgcgaggcagagcttctaaccatgctgcagcatcagcacatagtacgattcttcggagtatgcactgaggggcgaccactcctaatggtctttgagtacatgaggcatggggacctgaatagattcctgaggagtcacgggcccgatgccaagctgctggccggtggggaggatgtggctcctggtcccctgggactcggccagctgctcgccgtcgcctcgcaggtggccgccggcatggtctacctagctggactgcatttcgtgcatcgagatctcgcgacccggaactgcttagtgggacaggggcttgtcgttaaaattggcgactttggcatgagccgcgatatctactccaccgattactaccgagttgggggcagaactatgcttcccatccgatggatgccccccgagtctatcttatatcgaaagttcacaactgagtctgatgtttggtccttcggtgtggtgctttgggaaatttttacttatggcaagcagccctggtatcaactgtccaacactgaggcaatagattgcatcactcagggccgggagttagagagaccaagggcctgccccccagaggtttatgctatcatgagggggtgttggcagcgggagcctcagcagaggcatagcatcaaggacgtccatgcccggctgcaggctctggcacaggcccctcccgtgtacctggacgtgcttggatag

SEQ ID NO: 129494 - DNA, 2391 bp, Artificial Sequence
  derived and/or modified sequence
atgctgcggggcggccggcggggccagctgggctggcacagctgggccgccggccctggcagcctgctggcctggctgatcctggccagcgctggagctgccccctgcccagatgcctgctgcccccacggcagcagcggcctgcgctgcaccagagatggagccctggacagcctgcaccacctgcctggagctgagaacctgacagagctgtacatcgagaaccagcagcacctgcagcacctggagctgcgggacctgcggggcctgggggagctgaggaacctgaccatcgtgaagagcggcctgcgctttgtggccccagatgccttccacttcaccccccggctgagccggctgaacctgtccttcaatgccctggagagcctgtcctggaagacagtgcagggcctgagcctgcaggagctggtgctgagcggcaaccccctgcactgcagctgtgccctgcgctggctgcagcgctgggaggaggagggcctgggcggcgtgcctgagcagaagctgcagtgccacggccagggccccctggcccacatgcccaatgccagctgtggggtgcccaccctgaaggtgcaggtgcccaatgcctctgtggatgtgggagatgatgtgctgctgcgctgccaggtggagggccggggcctggagcaggccggctggatcctgacagagctggagcagagcgccaccgtgatgaagagcggcggcctgcccagcctgggcctgaccctggccaacgtgaccagtgacctgaacaggaagaatgtgacctgctgggccgagaatgatgtgggccgggcagaggtgtctgtgcaggtgaatgtgtccttccctgcctctgtgcagctgcacacagctgtggagatgcaccactggtgcatccccttctctgtggatggccagcctgcccccagcctgcgctggctgttcaacggctctgtgctgaatgagaccagcttcatcttcacagagttcctggagcctgctgccaatgagaccgtgagacatggctgcctgcggctgaaccagcccacccacgtgaacaacggcaactacaccctgctggccgccaaccccttcggccaggccagcgccagcatcatggccgccttcatggacaacccctttgagttcaaccctgaggaccccatccctgtgtccttcagccctgtggacaccaacagcaccagcggggaccctgtggagaagaaggatgagacccccttcggcgtgtctgtggccgtgggcctggccgtgtttgcctgcctcttcctgagcaccctgctgctggtgctgaacaagtgtggcagaagaaacaagtttggcatcaacagacctgctgtgctggccccagaagatggcctggccatgagcctgcacttcatgaccctgggcggcagcagcctgagccccacagagggcaagggcagcggcctgcagggccacatcatcgagaacccccagtacttcagtgatgcctgtgtgcaccacatcaagagaagagacatcgtgctgaagtgggagctgggggagggcgccttcggcaaggtgttcctggccgagtgccacaacctgctgcctgagcaggacaagatgctggtggccgtgaaggccctgaaggaggccagcgagagcgcccggcaggacttccagcgggaggccgagctgctgaccatgctgcagcaccagcacatcgtgcgcttcttcggcgtgtgcacagagggccggcccctgctgatggtgtttgagtacatgagacatggagacctgaaccgcttcctgcggagccacggcccagatgccaagctgctggccggaggagaagatgtggcccctggccccctgggcctgggccagctgctggccgtggccagccaggtggccgccggcatggtgtacctggccggcctgcactttgtgcaccgggacctggccaccaggaactgcctggtgggccagggcctggtggtgaagatcggggactttggcatgagccgggacatctacagcacagactactacagagtgggcggccgcaccatgctgcccatccgctggatgcctcctgagagcatcctgtacaggaagttcaccacagaaagtgatgtgtggagctttggagtggtgctgtgggagatcttcacctacggcaagcagccctggtaccagctgagcaacacagaggccatcgactgcatcacccagggccgggagctggagcggccccgggcctgccccccagaggtgtatgccatcatgaggggctgctggcagcgggagccccagcagaggcacagcatcaaggatgtgcacgcccggctgcaggccctggcccaggcccctcctgtgtacctggatgtgctgggctag

SEQ ID NO: 129495 - DNA, 2391 bp, Artificial Sequence
  derived and/or modified sequence
atgctgcggggcggccggcggggccagctgggctggcacagctgggcagctggacccggaagtctcctcgcatggctgatcctagcatccgcaggcgccgctccatgccccgacgcctgctgcccacacggctcttctggtctgagatgtaccagggatggcgccctcgattccctccatcatctgcccggcgctgagaacttgactgagctgtatatcgagaatcagcagcacctgcagcatttggaactcagggatctgaggggcttaggagagctcagaaatttgacaatcgtgaaaagcggcctcagatttgtggctcccgacgcgtttcacttcacccccagacttagcaggctaaacctatccttcaatgccctagagtccttatcttggaaaacggtacaaggtctatcactgcaggaactggtgttaagtgggaatcctctgcattgttcttgtgccctacgctggctccaaaggtgggaggaggagggactgggcggggtgcctgaacagaagttgcagtgtcatggccaaggacccctcgcgcacatgccaaacgcgagctgcggcgtccccactttgaaagtgcaggtgcctaatgcatcagtagacgtcggcgacgacgtcctactgaggtgtcaggtcgaaggcagagggttggagcaggcagggtggattctgacagagcttgaacagtccgcgaccgtgatgaaatctggtgggctgccaagcctgggcctcacgctcgccaatgtgacctccgacctgaataggaagaacgtcacttgctgggcagaaaacgacgtgggcagggctgaggtttctgtgcaggtaaatgtctcgttccctgcatctgtgcagctgcacaccgccgtggagatgcatcactggtgtataccattctctgtggatgggcagcccgcccccagcttacgctggttatttaacgggtcagttctcaatgagactagcttcatttttaccgaatttctcgagcctgccgctaatgagacagtaagacatgggtgcttacggcttaatcagcccacacatgttaacaacggtaactacactctgctggccgccaacccatttggccaggcctctgccagcattatggccgcttttatggacaatccattcgagtttaatccagaagatcctattccagtgagcttcagcccagtggataccaactctaccagcggtgaccccgtggagaagaaggatgagacccctttcggggtctccgtggccgtcggcctcgccgtctttgcttgcctgtttctgagtaccttactccttgtgttgaataagtgtggcaggcggaataaattcgggattaatcgcccagccgttttggcccctgaagacgggctcgcaatgagcctgcactttatgaccctggggggcagttccttgtcccccacagaaggcaagggaagcgggctgcagggccatataatcgaaaacccccagtacttctcagacgcctgcgtccaccacatcaaacgacgggacattgtcctgaagtgggaacttggagagggcgccttcgggaaggtcttcctggcagaatgccataaccttctgcctgaacaggacaagatgttagtcgccgtcaaagccctcaaggaggcaagtgaatcagctcgtcaggatttccagcgggaggctgaactgcttaccatgttgcagcaccagcacattgtgaggtttttcggtgtgtgtacagaagggagaccactcctcatggtgtttgagtacatgaggcacggcgatctgaacagattcctgaggtcacacgggccagatgccaagctattagcagggggagaagatgttgcacccggcccgctgggccttgggcaacttctggccgtcgcttcccaggtggccgctggcatggtctatctggctggccttcacttcgtgcatcgagacctggccactaggaactgtctcgtcggtcaaggtctcgtggtgaaaatcggggacttcggcatgagccgcgatatttactccactgattattaccgggtcggtgggcgcacaatgcttcccataaggtggatgcccccggagtccatcctttatcgaaaattcactacggagtctgatgtgtggagcttcggtgtggtattatgggaaattttcacttacggaaaacagccttggtatcagctgtctaatactgaggccattgattgtattacccaggggagagagcttgaacggcctcgggcatgtccgcccgaggtttacgccataatgaggggttgctggcaacgcgagcctcagcagcgtcacagtatcaaggacgtccacgctcggctgcaggccctggcccaggcccccccagtctatctggacgtcttagggtag

SEQ ID NO: 129496 - DNA, 2432 bp, Artificial Sequence
  derived and/or modified sequence
acagacggctgccccgcctgagcgaggcgggcgccgccgcgatgctgcgaggcggacggcgcgggcagcttggctggcacagctgggctgcggggccgggcagcctgctggcttggctgatactggcatctgcgggcgccgcaccctgccccgatgcctgctgcccccacggctcctcgggactgcgatgcacccgggatggggccctggatagcctccaccacctgcccggcgcagagaacctgactgagctctacatcgagaaccagcagcatctgcagcatctggagctccgtgatctgaggggcctgggggagctgagaaacctcaccatcgtgaagagtggtctccgtttcgtggcgccagatgccttccatttcactcctcggctcagtcgcctgaatctctccttcaacgctctggagtctctctcctggaaaactgtgcagggcctctccttacaggaactggtcctgtcggggaaccctctgcactgttcttgtgccctgcgctggctacagcgctgggaggaggagggactgggcggagtgcctgaacagaagctgcagtgtcatgggcaagggcccctggcccacatgcccaatgccagctgtggtgtgcccacgctgaaggtccaggtgcccaatgcctcggtggatgtgggggacgacgtgctgctgcggtgccaggtggaggggcggggcctggagcaggccggctggatcctcacagagctggagcagtcagccacggtgatgaaatctgggggtctgccatccctggggctgaccctggccaatgtcaccagtgacctcaacaggaagaacgtgacgtgctgggcagagaacgatgtgggccgggcagaggtctctgttcaggtcaacgtctccttcccggccagtgtgcagctgcacacggcggtggagatgcaccactggtgcatccccttctctgtggatgggcagccggcaccgtctctgcgctggctcttcaatggctccgtgctcaatgagaccagcttcatcttcactgagttcctggagccggcagccaatgagaccgtgcggcacgggtgtctgcgcctcaaccagcccacccacgtcaacaacggcaactacacgctgctggctgccaaccccttcggccaggcctccgcctccatcatggctgccttcatggacaaccctttcgagttcaaccccgaggaccccatccctgtctccttctcgccggtggacactaacagcacatctggagacccggtggagaagaaggacgaaacaccttttggggtctcggtggctgtgggcctggccgtctttgcctgcctcttcctttctacgctgctccttgtgctcaacaaatgtggacggagaaacaagtttgggatcaaccgcccggctgtgctggctccagaggatgggctggccatgtccctgcatttcatgacattgggtggcagctccctgtcccccaccgagggcaaaggctctgggctccaaggccacatcatcgagaacccacaatacttcagtgatgcctgtgttcaccacatcaagcgccgggacatcgtgctcaagtgggagctgggggagggcgcctttgggaaggtcttccttgctgagtgccacaacctcctgcctgagcaggacaagatgctggtggctgtcaaggcactgaaggaggcgtccgagagtgctcggcaggacttccagcgtgaggctgagctgctcaccatgctgcagcaccagcacatcgtgcgcttcttcggcgtctgcaccgagggccgccccctgctcatggtctttgagtatatgcggcacggggacctcaaccgcttcctccgatcccatggacctgatgccaagctgctggctggtggggaggatgtggctccaggccccctgggtctggggcagctgctggccgtggctagccaggtcgctgcggggatggtgtacctggcgggtctgcattttgtgcaccgggacctggccacacgcaactgtctagtgggccagggactggtggtcaagattggtgattttggcatgagcagggatatctacagcaccgactattaccgtgtgggaggccgcaccatgctgcccattcgctggatgccgcccgagagcatcctgtaccgtaagttcaccaccgagagcgacgtgtggagcttcggcgtggtgctctgggagatcttcacctacggcaagcagccctggtaccagctctccaacacggaggcaatcgactgcatcacgcagggacgtgagttggagcggccacgtgcctgcccaccagaggtctacgccatcatgcggggctgctggcagcgggagccccagcaacgccacagcatcaaggatgtgcacgcccggctgcaagccctggcccaggcacctcctgtctacctggatgtcctgggctag

SEQ ID NO: 129497 - DNA, 2391 bp, Artificial Sequence
  derived and/or modified sequence
atgctgcgaggaggacggaggggacagttggggtggcatagctgggcggcaggccctgggtcactgctagcatggctcatcctagcttctgctggcgctgctccgtgccctgatgcttgctgcccccacgggtcctccggactccgctgtacacgtgacggtgccttggacagcctgcaccacctcccaggggcagagaatctcacggagctgtacatagagaatcagcagcaccttcagcaccttgaactgcgcgacctccgaggcttgggcgaattaaggaacctgactatagtgaagtccggactgcgctttgtggccccagatgcatttcatttcacaccaagactttctagattgaatctgtctttcaatgctctcgagtcactgagctggaagacggtgcaaggactttcgttgcaggaactggtgctgtctggcaacccactccattgcagctgcgcccttcgctggctgcagcggtgggaggaagaaggccttggaggggtcccagaacagaagctgcagtgccatgggcagggacccctcgcgcatatgcccaacgctagctgcggcgttcccacattgaaagtgcaagttcccaatgccagtgtggatgttggcgatgacgtgctgttgcgatgtcaggtagagggccgtggcctggaacaggctggttggatcttgactgagctcgaacagagtgcaacagtgatgaaatccgggggattgccctctcttggtcttacgttagccaatgtgacatccgatctcaacaggaagaacgtcacgtgttgggccgaaaacgacgtggggagggcagaagtgtccgtacaggtcaatgtgtcattccccgcatcagtgcagctgcataccgctgtagagatgcaccactggtgtatccctttctctgtggatggacagcctgccccttccctgcggtggctatttaatggatctgtactaaacgagacgtccttcatttttacggagttcctggagccggctgccaacgaaaccgtaaggcacgggtgtctgcgacttaatcagcctacacacgtaaacaatggcaattatacactgctggcagctaacccattcggtcaggcatcggccagcattatggctgcctttatggataacccattcgagttcaatcccgaggatcctatcccagtgtcgttctctcccgtcgataccaactcaacttccggggaccccgttgagaagaaagatgaaacccccttcggagtaagcgttgcagtcggacttgctgtgttcgcctgtctattcctttctactctactactcgttttgaataaatgcggcaggaggaataagttcggcattaatcggccagccgtgctggccccagaggatgggctcgcaatgtcccttcactttatgactctgggtgggtcaagcttatcccccacagaagggaagggcagtgggctgcagggccatatcatcgaaaatcctcagtacttcagcgacgcgtgcgtccaccacatcaagcgccgtgacatcgtgctcaaatgggaactcggtgagggggctttcgggaaggtatttctggctgagtgtcataatctgctgcccgagcaagataaaatgctggtggcagtgaaagctctaaaggaggcttctgaatctgctaggcaagattttcaaagggaagcagagctgttgacaatgctgcagcatcagcacatagtgcgatttttcggggtttgcaccgaggggcgacctctccttatggtatttgagtacatgcgtcacggagacctgaatcgctttctgaggtcgcacggaccagatgccaaactgcttgccggaggggaagatgtggctcctggcccactagggttgggccagctccttgcagtcgcaagccaggtcgctgctggaatggtgtacctggcgggtttacactttgtacatcgcgacctcgcaactaggaattgtctggtggggcagggtttagtggtgaagatcggagactttggcatgtcccgagatatttacagtaccgactactaccgggtcggaggacggaccatgctgccaatccggtggatgcctcccgagtctatcctgtacaggaaattcactaccgagtcagacgtgtggagctttggcgtggtgctgtgggaaatctttacatatggcaagcagccttggtatcagctctcaaatactgaagcaattgattgtattacccaggggagggaactggagcggccacgggcttgtcctccagaggtttatgctatcatgcggggatgctggcagagagaacctcagcaacgccactccattaaggatgttcatgccagacttcaggccttggcccaggcccctccagtgtacctggacgtgctggggtag

SEQ ID NO: 129498 - DNA, 2391 bp, Artificial Sequence
  derived and/or modified sequence
atgctgagaggcggcagaagaggccagctgggctggcacagctgggccgccggccccggcagcctgctggcctggctgatcctggccagcgccggcgccgccccctgccccgacgcctgctgcccccacggcagcagcggcctgagatgcaccagagacggcgccctggacagcctgcaccacctgcccggcgccgagaacctgaccgagctgtacatcgagaaccagcagcacctgcagcacctggagctgagagacctgagaggcctgggcgagctgagaaacctgaccatcgtgaagagcggcctgagattcgtggcccccgacgccttccacttcacccccagactgagcagactgaacctgagcttcaacgccctggagagcctgagctggaagaccgtgcagggcctgagcctgcaggagctggtgctgagcggcaaccccctgcactgcagctgcgccctgagatggctgcagagatgggaggaggagggcctgggcggcgtgcccgagcagaagctgcagtgccacggccagggccccctggcccacatgcccaacgccagctgcggcgtgcccaccctgaaggtgcaggtgcccaacgccagcgtggacgtgggcgacgacgtgctgctgagatgccaggtggagggcagaggcctggagcaggccggctggatcctgaccgagctggagcagagcgccaccgtgatgaagagcggcggcctgcccagcctgggcctgaccctggccaacgtgaccagcgacctgaacagaaagaacgtgacctgctgggccgagaacgacgtgggcagagccgaggtgagcgtgcaggtgaacgtgagcttccccgccagcgtgcagctgcacaccgccgtggagatgcaccactggtgcatccccttcagcgtggacggccagcccgcccccagcctgagatggctgttcaacggcagcgtgctgaacgagaccagcttcatcttcaccgagttcctggagcccgccgccaacgagaccgtgagacacggctgcctgagactgaaccagcccacccacgtgaacaacggcaactacaccctgctggccgccaaccccttcggccaggccagcgccagcatcatggccgccttcatggacaaccccttcgagttcaaccccgaggaccccatccccgtgagcttcagccccgtggacaccaacagcaccagcggcgaccccgtggagaagaaggacgagacccccttcggcgtgagcgtggccgtgggcctggccgtgttcgcctgcctgttcctgagcaccctgctgctggtgctgaacaagtgcggcagaagaaacaagttcggcatcaacagacccgccgtgctggcccccgaggacggcctggccatgagcctgcacttcatgaccctgggcggcagcagcctgagccccaccgagggcaagggcagcggcctgcagggccacatcatcgagaacccccagtacttcagcgacgcctgcgtgcaccacatcaagagaagagacatcgtgctgaagtgggagctgggcgagggcgccttcggcaaggtgttcctggccgagtgccacaacctgctgcccgagcaggacaagatgctggtggccgtgaaggccctgaaggaggccagcgagagcgccagacaggacttccagagagaggccgagctgctgaccatgctgcagcaccagcacatcgtgagattcttcggcgtgtgcaccgagggcagacccctgctgatggtgttcgagtacatgagacacggcgacctgaacagattcctgagaagccacggccccgacgccaagctgctggccggcggcgaggacgtggcccccggccccctgggcctgggccagctgctggccgtggccagccaggtggccgccggcatggtgtacctggccggcctgcacttcgtgcacagagacctggccaccagaaactgcctggtgggccagggcctggtggtgaagatcggcgacttcggcatgagcagagacatctacagcaccgactactacagagtgggcggcagaaccatgctgcccatcagatggatgccccccgagagcatcctgtacagaaagttcaccaccgagagcgacgtgtggagcttcggcgtggtgctgtgggagatcttcacctacggcaagcagccctggtaccagctgagcaacaccgaggccatcgactgcatcacccagggcagagagctggagagacccagagcctgcccccccgaggtgtacgccatcatgagaggctgctggcagagagagccccagcagagacacagcatcaaggacgtgcacgccagactgcaggccctggcccaggccccccccgtgtacctggacgtgctgggctag

SEQ ID NO: 129499 - protein, 825 aa, Artificial Sequence
  derived and/or modified sequence
MDVSLCPAKCSFWRIFLLGSVWLDYVGSVLACPANCVCSKTEINCRRPDDGNLFPLLEGQDSGNSNGNASINITDISRNITSIHIENWRSLHTLNAVDMELYTGLQKLTIKNSGLRSIQPRAFAKNPHLRYINLSSNRLTTLSWQLFQTLSLRELQLEQNFFNCSCDIRWMQLWQEQGEAKLNSQNLYCINADGSQLPLFRMNISQCDLPEISVSHVNLTVREGDNAVITCNGSGSPLPDVDWIVTGLQSINTHQTNLNWTNVHAINLTLVNVTSEDNGFTLTCIAENVVGMSNASVALTVYYPPRVVSLEEPELRLEHCIEFVVRGNPPPTLHWLHNGQPLRESKIIHVEYYQEGEISEGCLLFNKPTHYNNGNYTLIAKNPLGTANQTINGHFLKEPFPESTDNFILFDEVSPTPPITVTHKPEEDTFGVSIAVGLAAFACVLLVVLFVMINKYGRRSKFGMKGPVAVISGEEDSASPLHHINHGITTPSSLDAGPDTVVIGMTRIPVIENPQYFRQGHNCHKPDTYVQHIKRRDIVLKRELGEGAFGKVFLAECYNLSPTKDKMLVAVKALKDPTLAARKDFQREAELLTNLQHEHIVKFYGVCGDGDPLIMVFEYMKHGDLNKFLRAHGPDAMILVDGQPRQAKGELGLSQMLHIASQIASGMVYLASQHFVHRDLATRNCLVGANLLVKIGDFGMSRDVYSTDYYRVGGHTMLPIRWMPPESIMYRKFTTESDVWSFGVILWEIFTYGKQPWFQLSNTEVIECITQGRVLERPRVCPKEVYDVMLGCWQREPQQRLNIKEIYKILHALGKATPIYLDILG

SEQ ID NO: 129500 - DNA, 2478 bp, Artificial Sequence
  derived and/or modified sequence
atggacgtgtccctttgtcccgcgaaatgttcgttctggcgtatcttccttctcggttctgtctggctggactacgtgggcagtgtattggcctgccccgctaactgtgtgtgttcaaagaccgagattaactgtagacgccccgatgacggaaacctgttcccactgctcgaggggcaggattctggtaactcaaacggaaacgcttccataaacatcacagacataagtcgcaacataacctccatccatattgaaaattggcgtagtctccatactctcaatgctgttgatatggagctgtacaccgggctgcagaaactcaccataaaaaattctggcctccggagcattcagcctcgcgccttcgcgaaaaatccccaccttcgctatattaacttgtccagtaatcgactgacaactttgtcctggcagctttttcagacactttctctcagggaattgcagcttgaacaaaattttttcaattgtagctgcgatatccgctggatgcaactgtggcaggaacaaggcgaggccaagctgaatagtcagaacctctactgtatcaatgcggacggctcacagctgccactttttcgtatgaatatcagccagtgtgacctgccagaaatatcagtctcccatgtgaacctgactgtgcgggagggcgacaatgctgtgattacgtgtaatggtagcgggtccccgctgccagacgtggattggatagtcaccggccttcagagcataaacacacaccagacaaaccttaattggacaaacgtgcatgctatcaatctgacacttgtcaatgttacttctgaggataatgggtttaccctcacctgtattgctgaaaatgtcgtggggatgtcgaacgctagcgtggccctgacagtatattatcctccacgcgtggtatcgctagaggaaccagagctgcgtttagaacactgtatcgagttcgtcgttcgcggaaaccccccccctacactgcactggctccataacggacagccactgcgagagtccaagataatccatgtggagtactaccaggaaggggaaatctccgaagggtgcctcttgttcaataaacctacccactataacaacggcaattatacactgatcgccaaaaatccgcttggtacggccaatcagaccattaacggccacttcctcaaggaacccttcccagaaagtacagacaattttatactcttcgacgaggtttccccgactccgcctatcaccgtcacacataaaccagaagaagataccttcggcgtatccatagctgttggcttagcagcctttgcatgcgtgctcttggtagtgctctttgtgatgattaataagtatggtagacgatccaagtttgggatgaagggccccgtcgctgttatctccggggaggaggatagtgcgagccccctgcaccatatcaatcacggcattaccacgccaagttctttggatgccggacctgatactgtggttattggtatgacacggatccccgtcatcgagaatccccagtatttccgccagggccacaattgtcacaagccagacacatacgtgcagcacattaaaaggcgagacatcgttctcaagcgcgagctgggcgagggagccttcgggaaggtgttcttagctgaatgttataatctcagtcctacaaaggataaaatgctggtcgcagtgaaggcgctgaaggatcccacgctggctgccaggaaggattttcagagagaggccgagcttctgacaaatctccaacacgagcatattgtgaaattctacggggtgtgtggtgatggcgatcctttgatcatggtgttcgaatacatgaaacacggagatttaaacaaatttctgcgagctcatggccccgacgccatgattcttgtcgacggccagccaagacaggcgaagggagagctcggcctttcccaaatgctacatatcgcttcccagatcgcctctggaatggtctatctagctagccagcattttgttcaccgcgacctagctacaaggaattgcctcgttggagccaacttactggttaagataggggacttcggaatgtcacgagacgtctacagtaccgattactatagggttgggggtcataccatgctgccaattcgttggatgcccccggagtccatcatgtatcgcaagtttaccactgagagcgatgtgtggagttttggcgtgattctttgggagatcttcacctatggcaaacagccctggtttcagttgtccaacactgaggtgatcgaatgcatcacccagggtcgcgtgctcgaacggccgcgggtttgccccaaagaggtttatgatgtcatgctggggtgttggcagcgggaaccccagcagcggcttaacatcaaagagatttacaagattctgcatgcacttggaaaagcgacccctatctatctggacattctcggatag

SEQ ID NO: 129501 - DNA, 2478 bp, Artificial Sequence
  derived and/or modified sequence
atggacgtgtccctttgtccagcgaagtgttctttctggcgtatcttccttctggggtcagtgtggctggattacgtgggatcagtgttggcctgtccggctaactgcgtctgtagtaagactgaaattaactgccgcagacccgatgacggcaacctgtttcccctgctcgaaggacaagacagcgggaactcaaacggaaacgcctccatcaatatcaccgatatcagccggaacatcacctccatccacattgaaaactggcggtcactgcacacactaaacgctgttgatatggagctgtacaccgggttacagaaactgactattaaaaactctggactgcggtcaatccaacccagggccttcgcaaaaaacccacacctgcggtacatcaatctgagctccaaccggttaaccaccctttcatggcagctgtttcagactctgagcctgcgggagctgcagttggagcaaaatttcttcaactgtagttgcgatattcgttggatgcaactgtggcaggagcaaggcgaagcaaagctcaactcccaaaacttgtactgtatcaatgccgatggtagtcagctccctttgttcagaatgaatatctcacagtgtgatctgcctgagatttcggtgtcccacgtcaatctaactgtgcgggagggggacaacgctgtcattacttgtaacggcagcgggtcccctttgccagatgtcgattggatcgtcacaggtctgcagtccatcaatacccaccaaacgaacctgaactggaccaacgttcacgccatcaatctgactctagtcaatgtcaccagcgaagataacgggttcacactaacttgcatagccgagaatgtcgtgggtatgagtaacgccagcgtagctctcacagtgtactatcctcctagagtggtgtcattggaggagcctgaacttcggttagagcactgcattgaattcgtcgtgcgaggtaatccccctcctactctccattggctccacaatggacaaccactgcgcgagtccaaaatcatccacgtcgagtactatcaggagggggaaatcagcgaggggtgcctgctgttcaacaaaccaacacactataacaacgggaactacaccctcatcgccaaaaaccccctcggaactgccaaccaaacaatcaatggccactttctgaaggagccttttcctgagtccactgataatttcatcctctttgacgaagtgagtcccacgcctcctattaccgtgacacacaagccagaagaagatacatttggagtgtccatcgccgttgggctggctgccttcgcatgtgtgctactcgtcgtgctgtttgtgatgatcaacaagtacggaagaagatctaaatttgggatgaagggacctgtggcggttattagtggagaggaggattccgctagccctctgcatcacattaaccatggcataactaccccttctagcttagacgccggcccagataccgtcgtgattgggatgacgaggattcccgtcatcgaaaatcctcagtatttcagacaggggcataactgccacaagccggatacttatgtgcagcatattaagcgacgggacatcgtactgaaaagggagctcggtgagggagctttcggcaaggtgtttctggccgagtgttataatcttagccctaccaaagataagatgctggtggctgtgaaagcacttaaggatcccaccttggccgcgcgcaaggacttccagagagaggccgaacttctgaccaacctgcagcacgagcacatagtcaaattctacggtgtttgcggagacggcgatccattgatcatggtctttgaatatatgaagcacggagatctgaataaattcctcagggcccacggccctgacgctatgattctggtggacgggcagcctaggcaggcaaaaggtgagctgggtttaagccagatgttacatatcgcctctcagatcgcatcaggaatggtgtacctcgctagccaacactttgttcatcgggacttagccaccagaaactgcctggtcggcgccaacctcttggtcaagatcggggatttcgggatgagtcgggatgtctatagcaccgattattacagggtgggcggccatactatgctgccaattagatggatgcctccagagtctatcatgtaccgcaaattcactacagagagtgatgtgtggtcctttggtgtgattctctgggagatctttacttacggcaagcagccctggtttcagttgtctaataccgaggtcatagagtgtattactcaaggaagggttcttgagagaccgagggtttgcccaaaggaggtgtatgatgttatgctagggtgctggcagcgggagccacagcaacgattgaacattaaagaaatttataaaatcctccacgcactcggaaaggccaccccaatttacctagacatactaggatag

SEQ ID NO: 129502 - DNA, 2478 bp, Artificial Sequence
  derived and/or modified sequence
atggatgtgtccctgtgcccagccaagtgcagcttctggaggatcttcctgctgggctctgtgtggctggactatgtgggctctgtgctggcctgcccagccaactgtgtgtgcagcaagacagagatcaactgccggcggccagatgatggcaacctcttccccctgctggagggccaggacagcggcaacagcaatggaaatgccagcatcaacatcacagacatcagcaggaacatcaccagcatccacatcgagaactggaggagcctgcacaccctgaatgctgtggacatggagctgtacacaggcctgcagaagctgaccatcaagaacagcggcctgcggagcatccagccccgggcctttgccaagaacccccacctgcgctacatcaacctgagcagcaaccggctgaccaccctgtcctggcagctgttccagaccctgagcctgcgggagctgcagctggagcagaacttcttcaactgcagctgtgacatccgctggatgcagctgtggcaggagcagggcgaggccaagctgaacagccagaacctgtactgcatcaatgctgatggcagccagctgcccctcttcaggatgaacatcagccagtgtgacctgcctgagatctctgtgagccacgtgaacctgactgtgcgggagggggacaatgctgtgatcacctgcaatggcagcggcagccccctgcctgatgtggactggatcgtgacaggcctgcagagcatcaacacccaccagaccaacctgaactggaccaacgtgcacgccatcaacctgaccctggtgaatgtgaccagcgaggacaatggcttcaccctgacctgcatcgcagaaaatgtggtgggcatgagcaatgcctctgtggccctgactgtgtactacccaccccgggtggtgtccctggaggagcctgagctgcggctggagcactgcattgaatttgtggtgcggggcaaccccccacccaccctgcactggctgcacaacggccagcccctgcgggagagcaagatcatccacgtggagtactaccaggagggggagatcagcgagggctgcctgctcttcaacaagcccacccactacaacaatggaaactacaccctgattgccaagaaccccctgggcacagccaaccagaccatcaatggccacttcctgaaggagcccttccctgagagcacagacaacttcatcctgtttgatgaggtgagccccaccccacccatcaccgtgacccacaagccagaggaggacaccttcggcgtgtccattgctgtgggcctggccgcctttgcctgtgtgctgctggtggtgctgtttgtgatgatcaacaagtatggccgccgcagcaagtttggcatgaagggccctgtggccgtcatcagcggggaggaggacagcgccagccccctgcaccacatcaaccacggcatcaccacccccagcagcctggatgctggccctgacacagtggtgattggcatgacccgcatccctgtgattgagaacccccagtacttccggcagggccacaactgccacaagccagacacctacgtgcagcacatcaagagaagagacatcgtgctgaagcgggagctgggggagggcgccttcggcaaggtgttcctggccgagtgctacaacctgagccccaccaaggacaagatgctggtggccgtgaaggccctgaaggaccccaccctggccgccaggaaggacttccagcgggaggccgagctgctgaccaacctgcagcacgagcacatcgtgaagttctacggcgtgtgtggagatggagaccccctcatcatggtgtttgagtacatgaagcacggggacctgaacaagttcctgcgggcccacggcccagatgccatgatcctggtggatggccagccccggcaggccaagggggagctgggcctgagccagatgctgcacatcgccagccagatcgccagcggcatggtgtacctggccagccagcactttgtgcaccgggacctggccaccaggaactgcctggtgggcgccaacctgctggtgaagattggagactttggcatgagcagagatgtgtacagcacagactactacagagtgggcggccacaccatgctgcccatccgctggatgcctcctgagagcatcatgtacaggaagttcaccacagaaagtgatgtgtggagctttggagtcatcctgtgggagatcttcacctacggcaagcagccctggttccagctgagcaacacagaggtgattgagtgcatcacccagggccgggtgctggagcggccccgggtgtgccccaaggaggtgtatgatgtgatgctgggctgctggcagcgggagccccagcagaggctgaacatcaaggagatctacaagatcctgcacgccctgggcaaggccacccccatctacctggacatcctgggctag

SEQ ID NO: 129503 - DNA, 2478 bp, Artificial Sequence
  derived and/or modified sequence
atggacgtgagcctgtgccccgccaagtgcagcttctggcggatctttctcctgggcagcgtgtggctagattacgtcggtagcgttctagcttgcccagccaactgcgtgtgttccaagactgagataaactgtaggagacctgacgatggcaatctcttccccctccttgaaggacaggattctggcaacagcaacggcaacgcctccattaacatcacagatatcagccgaaatatcacgtccatccatattgaaaactggagatcactgcacacactcaacgccgtcgatatggagctgtacaccggcctgcagaaactcactataaaaaacagcggactacgcagcatccaacctagggcttttgctaagaatccacatttgcgctacatcaacctgtcatccaaccggttgaccactctttcgtggcagctgtttcaaactctgagtctccgagagctgcaacttgagcaaaatttttttaactgctcctgcgatataagatggatgcagctctggcaagaacagggagaggctaaactgaattcgcagaatttatactgcattaatgctgatggctctcagctgccactgttccgaatgaacattagccagtgtgacttaccagaaatttctgtgtcgcacgtcaatctcacagttcgagaaggcgacaatgccgtcatcacgtgcaatggcagcgggtctcccctccctgacgtagactggattgtgactggtctgcagagcataaacactcaccagaccaacctcaattggacaaatgtacatgcgattaacctcactttggtgaacgtgacttctgaagataatgggtttactctgacctgtattgccgagaacgttgtgggaatgtctaatgctagcgtggccttgacagtgtattatcccccaagggttgtgagtctcgaggagcctgaactgagacttgagcactgcatcgagttcgttgtgagaggaaatcccccacctaccctgcactggctccacaatggacagccgctccgcgaaagcaagatcatccatgtggagtattatcaagagggagaaattagtgagggctgcctgttgtttaataaacctactcattacaataacggtaactacacgctaattgccaaaaatcctctcggcacggccaatcaaaccatcaacgggcacttcttaaaagaaccctttccggagtccactgataactttattcttttcgacgaagtgtctcctaccccccctatcacagtgacgcataaacctgaagaagacacatttggggttagtatcgccgtgggcctcgctgcctttgcatgtgtgctgctagttgtgctctttgtgatgataaataagtatggacgccggtccaagtttggaatgaaaggcccagtggcagtgatctctggggaagaggacagtgcatctcccctgcaccatattaatcacgggattacaacacccagctctctggatgcgggacccgatacagtcgtgatcggaatgacacgcatccccgtgatcgagaaccctcagtacttccggcagggccacaactgtcacaaaccagatacatatgtgcaacacattaagagacgggacatcgtcttaaagagagagctgggagagggcgctttcggaaaggttttcctcgcggagtgctataacctgtcccccacaaaagataaaatgttggtggcggtgaaagcccttaaagaccctactctggcggcacgaaaagatttccagagagaagctgaactgttgaccaacctgcagcacgagcacatagtgaagttctatggcgtttgtggggatggagatccccttattatggtctttgagtacatgaaacacggggatctcaacaaattcctccgagcccatgggcccgacgctatgattttagtcgacggccagcccaggcaggctaaaggggagttgggattatctcagatgctacacattgcatcccagattgcatctggcatggtatacctggcgagccagcattttgtccatagggacctcgcaacccgcaattgcctcgtgggggccaatttacttgtcaagatcggcgacttcggaatgagccgtgacgtttattccacagactattacagagttggaggacataccatgctgcctatcagatggatgccccccgagagcatcatgtatcgcaaatttaccacagagagtgatgtttggtcttttggagtaattctgtgggagatattcacctacggcaagcagccctggttccaactgtccaatactgaggttatcgagtgcatcacccaaggccgagttctggaacggcccagggtgtgcccaaaggaggtgtacgatgtgatgttagggtgttggcagagagagccacagcagcgactgaatatcaaggagatatataagatcctccatgccctcggaaaagctactccaatttacctggacatcctaggctag

SEQ ID NO: 129504 - DNA, 2478 bp, Artificial Sequence
  derived and/or modified sequence
atggacgtgagcctgtgccccgccaagtgcagcttctggcggatcttcttgctggggagtgtttggctcgattacgtaggatccgtgctagcctgccccgcaaattgtgtgtgcagcaagactgaaattaactgtcggcgacctgacgacgggaatctattcccactgctggaaggacaggattcgggcaatagcaatggaaacgcatctatcaacatcactgatatttccaggaatataactagcattcacatcgagaattggaggtccctgcacaccttgaatgccgttgatatggaactttacaccggacttcagaagctcaccatcaagaattcagggttacggtcgatccaaccccgcgcattcgcaaaaaatcctcacctgaggtatattaatctgagctccaacagactgacaactctctcttggcaactattccagactctgtccctgagagagctacagctggagcagaacttcttcaattgttcgtgcgacatcaggtggatgcaactttggcaggagcagggggaagccaaacttaatagtcagaatctgtattgcattaatgctgacggctctcagctgccactgtttaggatgaacattagtcagtgcgacttaccggagatctcggttagccacgtgaatctcacagtgcgtgaaggagacaacgcagtgatcacgtgtaatggcagtggaagcccactcccagatgtcgactggatcgtgaccgggctgcaaagcattaacacacaccagactaacctcaattggactaatgttcacgccatcaacctgactctagtgaacgtcacaagcgaagacaacggctttaccctgacatgcattgcagaaaacgtcgtcggcatgtcaaatgcttccgttgcactcacggtatactaccccccgagggtggttagtttggaggagccagaactccggctggagcactgcatcgagttcgtagttagggggaacccgcccccaaccctccactggctgcacaacgggcagcccctgcgcgagagcaagatcatccatgtggaatactaccaggagggcgagatttccgaagggtgtctgttattcaacaagccaacacactataacaatggcaattacacactaatcgcaaagaaccctctcggtacagctaaccagactatcaacggacactttttgaaggagccattccctgaatctactgacaactttatcctgttcgatgaagtgagtcctacgccgccaataaccgtgacccacaagccagaggaggacacttttggagtgtccattgctgtgggcctggctgcctttgcatgcgtgctcctggtggtcttgttcgtaatgattaacaagtatgggaggcgttccaagtttggaatgaagggcccagtggctgtaattagtggagaggaagactctgctagcccactgcaccatatcaaccacggcattactacacccagctcccttgatgcaggcccagatactgtggtgattggaatgaccaggatacctgttatcgaaaatccccagtacttcagacaggggcataactgccacaagcctgacacttatgtgcaacacatcaaacgccgggatattgtgctcaaacgagaactcggggagggggctttcggcaaagtattccttgccgaatgttataacctctcccccaccaaggacaaaatgctagtagctgttaaggctctcaaagacccgaccctggccgcccgcaaagactttcagcgcgaggctgaactgctcaccaatctccaacatgaacatattgtgaagttttatggcgtgtgcggcgacggagacccactgattatggtgttcgagtacatgaagcacggggacctgaataaatttttgagagctcacggcccagatgctatgattctggtcgatgggcagcctcgacaggccaaaggtgagctcggtctctctcagatgctgcacattgcctctcagattgcatccggtatggtctacctagcctcacagcacttcgttcacagggatcttgccaccagaaactgcctcgtgggtgccaacctcttggtgaaaattggagatttcggcatgtctagagacgtttatagcactgactattatcgggtcggaggccacacaatgctgcctatccgttggatgcccccggagtcaattatgtatagaaagttcaccacagagagcgatgtctggtccttcggagtgattctgtgggaaatcttcacgtacgggaagcaaccttggttccagctgtcgaatacggaagttattgaatgcataacacagggccgagttcttgagaggccccgtgtgtgccccaaggaagtctatgatgtgatgctagggtgttggcagagggaacctcagcagaggcttaacatcaaagagatatacaaaatcttacacgctctcggaaaggcgacccccatttacctggatatccttgggtag

SEQ ID NO: 129505 - DNA, 2784 bp, Artificial Sequence
  derived and/or modified sequence
gatcgccgagccggccaccatgcccggcagaccgcgccactaggcgctcctcgcggctcccacccggcggcggcggcggcggcggcggcgtccgcgatggtttcagacgctgaaggattttgcatctgatcgctcggcgtttcaaagaagcagcgatcggagatggatgtctctctttgcccagccaagtgtagtttctggcggattttcttgctgggaagcgtctggctggactatgtgggctccgtgctggcttgccctgcaaattgtgtctgcagcaagactgagatcaattgccggcggccggacgatgggaacctcttccccctcctggaagggcaggattcagggaacagcaatgggaacgccagtatcaacatcacggacatctcaaggaatatcacttccatacacatagagaactggcgcagtcttcacacgctcaacgccgtggacatggagctctacaccggacttcaaaagctgaccatcaagaactcaggacttcggagcattcagcccagagcctttgccaagaacccccatttgcgttatataaacctgtcaagtaaccggctcaccacactctcgtggcagctcttccagacgctgagtcttcgggaattgcagttggagcagaactttttcaactgcagctgtgacatccgctggatgcagctctggcaggagcagggggaggccaagctcaacagccagaacctctactgcatcaacgctgatggctcccagcttcctctcttccgcatgaacatcagtcagtgtgaccttcctgagatcagcgtgagccacgtcaacctgaccgtacgagagggtgacaacgctgttatcacttgcaatggctctggatcaccccttcctgatgtggactggatagtcactgggctgcagtccatcaacactcaccagaccaatctgaactggaccaatgttcatgccatcaacttgacgctggtgaatgtgacgagtgaggacaatggcttcaccctgacgtgcattgcagagaacgtggtgggcatgagcaatgccagtgttgccctcactgtctactatcccccacgtgtggtgagcctggaggagcctgagctgcgcctggagcactgcatcgagtttgtggtgcgtggcaaccccccaccaacgctgcactggctgcacaatgggcagcctctgcgggagtccaagatcatccatgtggaatactaccaagagggagagatttccgagggctgcctgctcttcaacaagcccacccactacaacaatggcaactataccctcattgccaaaaacccactgggcacagccaaccagaccatcaatggccacttcctcaaggagccctttccagagagcacggataactttatcttgtttgacgaagtgagtcccacacctcctatcactgtgacccacaaaccagaagaagacacttttggggtatccatagcagttggacttgctgcttttgcctgtgtcctgttggtggttctcttcgtcatgatcaacaaatatggtcgacggtccaaatttggaatgaagggtcccgtggctgtcatcagtggtgaggaggactcagccagcccactgcaccacatcaaccacggcatcaccacgccctcgtcactggatgccgggcccgacactgtggtcattggcatgactcgcatccctgtcattgagaacccccagtacttccgtcagggacacaactgccacaagccggacacgtatgtgcagcacattaagaggagagacatcgtgctgaagcgagaactgggtgagggagcctttggaaaggtcttcctggccgagtgctacaacctcagcccgaccaaggacaagatgcttgtggctgtgaaggccctgaaggatcccaccctggctgcccggaaggatttccagagggaggccgagctgctcaccaacctgcagcatgagcacattgtcaagttctatggagtgtgcggcgatggggaccccctcatcatggtctttgaatacatgaagcatggagacctgaataagttcctcagggcccatgggccagatgcaatgatccttgtggatggacagccacgccaggccaagggtgagctggggctctcccaaatgctccacattgccagtcagatcgcctcgggtatggtgtacctggcctcccagcactttgtgcaccgagacctggccaccaggaactgcctggttggagcgaatctgctagtgaagattggggacttcggcatgtccagagatgtctacagcacggattattacagggtgggaggacacaccatgctccccattcgctggatgcctcctgaaagcatcatgtaccggaagttcactacagagagtgatgtatggagcttcggggtgatcctctgggagatcttcacctatggaaagcagccatggttccaactctcaaacacggaggtcattgagtgcattacccaaggtcgtgttttggagcggccccgagtctgccccaaagaggtgtacgatgtcatgctggggtgctggcagagggaaccacagcagcggttgaacatcaaggagatctacaaaatcctccatgctttggggaaggccaccccaatctacctggacattcttggctagtggtggctggtggtcatgaattcatactctgttgcctcctctctccctgcctcacatctcccttccacctcacaactccttccatccttgactgaagcgaacatcttcatataaactcaagtgcctgctacacatacaacactg

SEQ ID NO: 129506 - DNA, 19984 bp, Artificial Sequence
  derived and/or modified sequence
ggctcggagcacttgtacatttctgcagccgcgcggcgagccattcgcggcggctgctgcagctcctactgcatcttccttctcttcctttcctcgggctccggtctcggagtcggagagcgcgcctcgcttccagagcccccggacccggcgagtcagcgatcgccgagccggccaccatgcccggcagaccgcgccactaggcgctcctcgcggctcccacccggcggcggcggcggcggcggcggcgtccgcgatggtttcagacgctgaaggattttgcatctgatcgctcggcgtttcaaagaagcagcgatcggagatggatgtctctctttgcccagccaagtgtagtttctggcggattttcttgctgggaagcgtctggctggactatgtgggctccgtgctggcttgccctgcaaattgtgtctgcagcaagactgagatcaattgccggcggccggacgatgggaacctcttccccctcctggaagggcaggattcagggaacagcaatgggaacgccagtatcaacatcacggacatctcaaggaatatcacttccatacacatagagaactggcgcagtcttcacacgctcaacgccgtggacatggagctctacaccggacttcaaaagctgaccatcaagaactcaggacttcggagcattcagcccagagcctttgccaagaacccccatttgcgttatataaacctgtcaagtaaccggctcaccacactctcgtggcagctcttccagacgctgagtcttcgggaattgcagttggagcagaactttttcaactgcagctgtgacatccgctggatgcagctctggcaggagcagggggaggccaagctcaacagccagaacctctactgcatcaacgctgatggctcccagcttcctctcttccgcatgaacatcagtcagtgtgaccttcctgagatcagcgtgagccacgtcaacctgaccgtacgagagggtgacaacgctgttatcacttgcaatggctctggatcaccccttcctgatgtggactggatagtcactgggctgcagtccatcaacactcaccagaccaatctgaactggaccaatgttcatgccatcaacttgacgctggtgaatgtgacgagtgaggacaatggcttcaccctgacgtgcattgcagagaacgtggtgggcatgagcaatgccagtgttgccctcactgtctactatcccccacgtgtggtgagcctggaggagcctgagctgcgcctggagcactgcatcgagtttgtggtgcgtggcaaccccccaccaacgctgcactggctgcacaatgggcagcctctgcgggagtccaagatcatccatgtggaatactaccaagagggagagatttccgagggctgcctgctcttcaacaagcccacccactacaacaatggcaactataccctcattgccaaaaacccactgggcacagccaaccagaccatcaatggccacttcctcaaggagccctttccagagagcacggataactttatcttgtttgacgaagtgagtcccacacctcctatcactgtgacccacaaaccagaagaagacacttttggggtatccatagcagttggacttgctgcttttgcctgtgtcctgttggtggttctcttcgtcatgatcaacaaatatggtcgacggtccaaatttggaatgaagggtcccgtggctgtcatcagtggtgaggaggactcagccagcccactgcaccacatcaaccacggcatcaccacgccctcgtcactggatgccgggcccgacactgtggtcattggcatgactcgcatccctgtcattgagaacccccagtacttccgtcagggacacaactgccacaagccggacacgtatgtgcagcacattaagaggagagacatcgtgctgaagcgagaactgggtgagggagcctttggaaaggtcttcctggccgagtgctacaacctcagcccgaccaaggacaagatgcttgtggctgtgaaggccctgaaggatcccaccctggctgcccggaaggatttccagagggaggccgagctgctcaccaacctgcagcatgagcacattgtcaagttctatggagtgtgcggcgatggggaccccctcatcatggtctttgaatacatgaagcatggagacctgaataagttcctcagggcccatgggccagatgcaatgatccttgtggatggacagccacgccaggccaagggtgagctggggctctcccaaatgctccacattgccagtcagatcgcctcgggtatggtgtacctggcctcccagcactttgtgcaccgagacctggccaccaggaactgcctggttggagcgaatctgctagtgaagattggggacttcggcatgtccagagatgtctacagcacggattattacagggtgggaggacacaccatgctccccattcgctggatgcctcctgaaagcatcatgtaccggaagttcactacagagagtgatgtatggagcttcggggtgatcctctgggagatcttcacctatggaaagcagccatggttccaactctcaaacacggaggtcattgagtgcattacccaaggtcgtgttttggagcggccccgagtctgccccaaagaggtgtacgatgtcatgctggggtgctggcagagggaaccacagcagcggttgaacatcaaggagatctacaaaatcctccatgctttggggaaggccaccccaatctacctggacattcttggctagtggtggctggtggtcatgaattcatactctgttgcctcctctctccctgcctcacatctcccttccacctcacaactccttccatccttgactgaagcgaacatcttcatataaactcaagtgcctgctacacatacaacactgaaaaaaggaaaaaaaaagaaagaaaaaaaaaccctgtaaggcagtttggcaaatatatatatatatatatatatttatatatctaactatctatcaatctatatctacagagagttaccttctctagtacacagagaagctgctgatacagaaaaccacaagactttaacaactcagaaactctaaaatattaataatacaaaggaaaattccctttgacttaagctgtggcccatgcttctaatgctacggctctttggagcagaagacctggaccatgcagagagacaatctttgggatgagagctctgggacgggaggagttaaggtggtgctcagtcgctgctgtgtgtgtctgttaccccggaagctcaccacaggcacatgtggggactgcatggctgtgctcagcaaagaaatgatgcctgagcagggtccttgcctccacttcttccccatttcctccacttcaggacaatgttctaatttgtccattctaaaaagtgtaatcttgatgcttttgggaatcaatgatggcacctacgggtaaacacagaacagacaaccccacaacacaaaaccatgacaagagctgacagcatccatcctgggtgtaagcttcttgctggagttgcaaaggatgtgtctttctattctcagaacttaaagaactggactttctggagtaaaagaaccacagaagaaaaaatagctgaaacctgaaccctgccaagacactgccacctgtcttttccatcattgcaaagattccttggcctcacctcccactttcaggcccctgggaagcttagggggttaggaaacaggtccccatgttatctttgaatgtagacacagcacgctttagggttgcaatagcaagagacttggttgcttgtaggtcattataacgaatgccccctggtcctctcagtttctcatcctgcttccctagatcctagaccccacttcctgggtctctactgagtcccaggtaaaccccactgccaaggaagggagccaggtctagtgagaggctgcagcagtgagtgtttcaggaaagcaagcagtggagtgggtgagagccagcaggggagaatctacttggcacctgtgccaggccccttggcattctcctcacgtttccagcccctgggaggattgatgcatctgcctttgagctgttgtgaaaacgcaggggctgagaaatcacttttgtgggctggggtagggggaagggctgaggcttctctgggagatgtccaatgagcggccagtgctgcaggcttggaatcttaatgaggcctgagccctgaccggagagagggaaggaaacatctgtgctggggcctgctccctctgccccagcactggggaatcactgccttcctggctgctgccacataccacagtggggccgacctctgggcctccctgtcacatgaaacatggaagccaacagcctggccccacagatctcctctgctggagaggagaggatgtgttcctcccaggccacggggcccctctgccttgccccaagcacagagctacctaagggactgacctttgccacactggagctcacctcccgggggcctctggcctacccttttccctgccagctgaagagactgccggcagcctggacgtcctggttagctgaaggcagctgaaatgtgggcctccctatgtggggtttagtactgaattatgtgtttgtggttttgcttctttttgtagacccacaaatatttttatttgaatagtaaagagctgtgctcagattgtagccatggttgggatttgggatcaacgaggctggttagctggactgggaggggaggcaggtgagatgggaatttggtgttggttttctcactgtgctgtgctcctagcccctgaggactttgcaggaaagctgtttggattgaccacctcaaggaactcctttgctgtcctatgacaattactcctcttgtctttccacctagaggaccgttatgccggggctgtgagttctggctgaagctgcacaatctggctttgatctgggtagctaagaacaggtgttcagggagggcatggtctggaggcgcctgagggaaaagtatcttctggttagaagtgaagcaccaatgctcctgttgcttcccttctcccatatcctctcctgaacaaacactgtgtggcttctgtcttcttggctgtgtgtttcaaaactgatagtcactgatgggctgggaagaagcaggagaagaactgggttggagatgggtggaaaactgggaataaggaccatgctatggttttatcttcagggcactgattcatcatggcctaatgaaagaaggtgattccttgggggaacaagaagcactgaaggagaccgcagttgtcagattgctgccaccttaggcccacgggctttcacgctgatcttggggtcatgttcttactgtgtccattgtaagcagctggctgtggaagagtgccagagagagaggggcagagcagggaagggtagcgagggaagatatattactttgatatattagccttggcagattaaaaaaaaaagatttattttggagagtaaaggaggcagaaaatagggccatggaaattgcagggtacactatggctctggggagtgtggcatgtactgggacacacctgtccctcctatattgggacaggactgataaggcttagtacactgtatcttaatttccccatctgcagaataaggggtacacctgctaatctctggccccttctagctctgagttcttagattctgacaacgttgtgtcactgtgccatttttctcaataccattctggaatggcaggacagccttgcataggtggggggcagttgccgctgaaggctcactgggcctgggcaaggctgagttccaataagacactcctctccttctttgccccttgtctcaacatttcggagtctgaagtgtctgagacgactgtaagccaggaggggagcatttggtcggcttcccatcctggcattcctacataccagaaaagcactgtcgacggtccatttatttatttatttatgaagagcctaatgtgatgaaatgtgttgtgaaatgacatcctattagccaatatggccactccagttcatttcaccctcattttcccataccaaagtccaccttttagaagaccatgtcacatcgcctctgagagcttagctttgaagtgagctcttttgtgtcttttgatgaacgctccagggcacccaggctggtctctctgccatgccaacctcaccggatcctctcctggactgagtgagagtgacctgctgttgggtgtccaccttggagtagggtgttgtggccatgggacctcccaattcttctttctttggatgtgaacctaactctgccctctaatgatatccctgaactctgaggggaccttgggcatcactgaacctcctctagtcaagagacaagaaaaaggaggtgctgcttcctccattcagcagatcatgcacaaattactcctagacagaggcttcccacttgaggcaaaggatctttggtccttctgggttcaggttgaacattaatgttcttctctagtgatgcctactttgcggaatacactagtgcaagtcattttggtgctaaatactgcagaaaccaacaccaacgggagagctgtcagccagcttctggggctgcacgagactcaactcagaagtagaagtgagtcagccatgccgggagagtacagggtgcattggaagttaagtagaaaagtggcagggtgaaaagaccagcaaaatttctgattttgctattagttatccacgtggccttggccaaatcagcttatttctcatttgagacgtttaagaggtttgtatagatatttttagagtccttttcatttttttaaagctaggttctggtcccacctgatatatatgtacttgcttgttaaaaataagagatgaagtgaaagataaggaaggagacgaagaaaagttaccaatggcaaaggattgattatagaagacaatgaaagaaggcctggtgactggtagatttgaggaatattgtacagggagccaggcagacaagccagagacttcatttttatgctcttcacaggaggtcactggcctagccacttgcctgcgtttcaccaggctgttcccctcagctagtcaaccttccctgttcaaaaccaacatgctaacacttggcagaaactattccaagatatggagagaggcctgcccatctctcatgcaggccactggaaatcaactctgggtcaaaaccgacaagatttttatcttttaatgcttattgtaagaggccgggatgtttgaaagagggcagcgtcttaagttgcagactattcaccaaagtccttttctattcaggaatgactaatgactttctttgttccccttttccaaaccaaacagcagcagtattaccttgactccaaagtacagtgattgcaatggacagtcttgagattaagggtctttttagtgctttgctcggaatctggagcaaggaaatgtctagggatgtttgttgaatgaacccacctgccagcagtccagagagctgtcccaaaggcccctgagatgtctattgtctgctttggtagggagccaacctgctagaagactcaagggcatttgccttagagagaaaaaaaaatggcacatttagttccgggcttgggtgctgaagtcactgtgtttttggctcctgaagctccactttcttttttcataccaaataaattgttttggccaatatttaaggatttaaatatttaaggttttgaaggaaaattccaagtttatgcatcattattaagacatcaatatgggcttgggaaaatgttttggtgttgcttaataatactgggagtgtcttctaaagaaagtatacatatatgtacgttgtgtgtttatttctatatattggattggaatggcttcaaagaaggcctgtttgaagtcagcaaattgatttcaatttgggattctcttttagccttaccgttcttggggataagaaatctggagatgaactggcctcagaaacattcaggaagattacgatgggaaatctgtcatcttgtaaagttggatcatttggtgctctctgaactaaattatgctgactaacattctgagcatctgaaaatcattcttcctggttgcctgatagatgaccacacaggagtcatttctatcacatcttatttgggggttggtatagacgccaccagcactgcagggaaaaccaccccctaggaggggtgagacagagagaatgtgagattttgatcattgattgctctttctgaaaggcactgctgaccatagtaggtgtggtgaatgtttgtgtcactgcattgggtattagaacttttgctctgagcatgggctgccctaccctgaagagctgaatcttggcttctgacagaagctctgcatgactcattctcctcaagcatattttccttattttcctatgaaagtatctatagtttgcaacaagaactgtctttggttcaagtgtcagtgtactagaatagatgcttttctgtgagacctgtggaggttggattggggtggggggtgttccttcaaagtacttggaattctttatcaaagaaataaaactcagattctcttctttctagtttacttctaagttccaaatttaaaacaagacccagtttgacatttgcagtaggagataatgtcttgaaccagtgagcttggctatctttctttcatcatagggaggcagggcagtaagttgtattaatttttcctaatcacccaggcaaatattgctttttgttcagtgtcgtgacccacattcatagcttgcaggggatacttctagctgacaaagctggaagtttctaatagaagatgtatcaagataacagaggtgaggaaaggcctgttgaacatctacttctgagaatcattgaggcactcaggtcttgcttttcagtttagtatcttacaaaaggagttggtttcttctcattttagcaatgataaatttagacatcttttttgaaaggccaaaggtagattgagagctcaaatacttacggtgtactctgacagtcttttattctatttttcaagacttattttatatatacatattttttatttccataggttattggggaacaggtagtgtttggttacatgagtaagttctttggtggtgatttgtgagattttggcacacccatcacccaggcagtatgcaccatatttgtagtcttttatccctcactcccttcccacactttccccctgagtccgcagagtccattgtgtcattcttataccttgacatcctcacagcttagctcccacatatcagtgagaacgtacgatgtttggttttctattcctgaattgcttcacttagaatagtggtctccaatctcacccaggccgcttcgaatgccattaattcattcctttttatggatgagtagtattccatcatacatatatatgtttgtgtgtgtgtgtgtgtgtgtgtgtgtgtgtgtgtgtaccacagtttctttatctgctcattgattgatgggcatttgggttgattccactttttgcaattgcaaattgtgctgctataaacatatgtgtgcaagtatctctatctcttatgtataatgacttcttttcctctgggcagatacccagtaatagggctgcgggattactgacattcttttacatgcaacatccctaaaacccaacaagacgtgtaaacactgaagtccaagtctgataattattctttcatttaagaagaacacatgggagtttcacatattatttttaaaaactaattttgtaatatgttaaatggtaggacacattcaattttttttcctcattggagatctgtccatgttctgtctcaatttaatagctacctggcatgtaactgatgcctctgagcctacctctggagtgaataaataaacgtggtccaggtgatttgatttctgccatttgtagtggagaagtaaatctcagtgaagaagattttttttcatatttcttcttttttctttttcttttggcttctatcctcctgcttccatgggactgacaatccagcttctcaaactccacgaaagtcttaatacaaggtgaatcccagagccacaaacagtttggacttcaaacagtgagaaaattggaccgaatgattcggcacacaaagcagaaaactttcatttcctgtaggcaggatggaattgactgttatattaagacttctgaagaagccctgccctggagtaatttcagtgctgtcagacgatgttgacatctagattaacctctgtgcagtgaattttactgcaaagctcattgagatgcatgtgatgtgtctccacaaatcccatctggaacccgtggtggcccaccctcagcaaccctcctctccccactgactctgctttctctgtccataaacttttagcctccaggagcagaggagccgtggctgagatctgaccctaggagagggagtttgggccttctctgaccatgatgctgagccaggctttctgcttagagtgacagagattgtcattgtattgggtttcccctgagggaactgcaaattaaggcatgaaaaacactctgctgatgacagtttcacagcatatcttaatgctgcacaaagtgaaatggtttaaaaggaattagtgtgtcctaagtcattgagccctgctctgggctctgcaatcctctagggattcaagatcccattgcaacaaggtcatgactgcgtctaggccggacagacggattctgaaggacaaggtgtttgtcttttgtgcaggtctttcctatggtccttacaagagaggcagccacagctcctgtttctcccaactgggacaaaagatgtagctgttttctaagcactggtttgtcatctctttaaggagtggttggctccagaatgagccagactcactctataattccacattgtggcacaacagccacatagaacctcaaagctgaaattgcaacttttctgcaaaatagggccattgattacatccaaagttttgagaaaaggccttcaggttagattcagtcaccttcagactccacagagttgctcagcatggttgcaggcgtctttggaaacttacctcagggttttagaatacgttaccctgaagtctggataacaattttctctgagattttactgattctaattccctttgaaattgtttttcctacttgcctcttgtctttcatttaaataataagaatctccttgcatattcttaggtatttctttaggagaattggaagtttccagccaaggacactgtgtttatgaattggaaagatatctttctgggctgaaaaaggtaaaaatcatacggaggcaatcttgatgactttatttaaaagcaattatcagcattgtgttttattctaggtgctcgtgctcatagtgcaaactacattcacgtttttaattatttatgttatgatacttattcgtgtgtacatatatgcgcacacacacacacaaaagcctccacaatcctactggtatacaaatccatatgccccatttgtgtcgcttccgttgatctttgtgtgcatgcatttgcaatgaagtgtgcatcacatgtgtgatttcttaaagtcatctatagctcatctttcctcttattatcgacacataccctttgactttctgcactttggagctcatgaaattaaggctttttcaagggagactacatcttgagtttctttaaaccttcatatttaaagataggactggttttcttcgagaaacaaaaacttgattcagattttatttaattaattaattttctgggggaaatggtactgaatttgttcctgagtaacaaatagtagtaagtgcaaatataaatgtgaagtagtttaagcaggttattgaacctatcttgtggctgaaacaagtagtcagatatgaagctcagacactcaaattgaattagaacgtgaaccaaaacggttagcatggggcaggagaagagcactgggctaggagcaagcctgctagattgtcacttgagtgtccttagcttaatgtgggcatctgacaactagttgcagtcctgtgcccctctaattccagagatggggcaagccaatctgtttctcatccattgctcaagttggttatcactgaaatattatataccatctcaagatcctgccctgaacaagtttgcaaacatcccccccacactgaggagtcagtcccatttttgttttatggcagtttatctcttgtgaccctcctttggaagctgtccaaactctgaacacttgctgtccattccctgctccccaccccaccctttaaggccagggaaaagccagggaaagccctattggctcatctccctctttcctagcctgcacatcaaccaagcttgggatttagcctaggttttcagagaggaaaacaagtgcgttctcccagccatcagtatctttccagccccctggaccaagtgattagtgcctcattagcgcctcatcagttgcttttgcacaagagactctgggacaacaagcctattataatgcctcagtctgtctttttgaagtcaaaccatccttctggcttggttaggaaaggggagcctttctccaaacacgttttcttttaatttcctctgttgttttctggctgttaactatatggataaatggtaaaacataattttcattttttctaggcccctatgagagtggatatgctatatttctatagatgaggagttccacatgtcagcaaagcatttatttatttagtgaagtgactataatattgacacacagatttgcagcagcatccaaatcttgagggggaaaaaaaagcctttttcaatcaaatgaaaccttttctgtgatggcaccagagaggtttatatcttaagcacagaactgaacctgataatatgcttcctttctagaaacaaagagatagaagaaattgctgaaggagctggaagaccaaaccatctattccccaaatcattatgtatcaatagatacttcaactctgttccttaaatggctctgaaaaacacaaataaccatatttactattaaaaacaaattcataatgtctaacccaatcccttattttaatatatatacatattaaaataatcccatgtatatatgattattattatatgggatatatatagtttacatatatataggggtgtgtgtgtatatatatatatatatttacatatatatgtaaatgtatactttttaatgctggggatagttccatattgtttcttttcttgattccttctaatatattcaatgagatttataatttttttcacttttatttctttaggaaagagttggggtctattatgaatgctttctaggataaaatggcaaaacagatggaaagtgtggtagagggaggataatgggaataggaggcagagaacttgcacatttctatttcctgctgagagatcttggaaaaacattgtctgccctttacctcagtttcttaacatacaaaatagaactactatcaaccccctgcatgccacagagggttatttgagccctaaatgagatcataactgttaacatactctgtgaactgtacagggccagacaaatagagcccactctctgggcagttgcatacagtcttgctgggtgctgagctgagtgactgagagccgcttttgagacacattttgaggcatatcttccctaaatttttgctggtgtctgttttttagaagttttgccattagcattttttgctttgagtatctagtgatggagaatgctctaaaaaatacaaggagacagggggattctttatctatttggcttagtcactggaaagggacaattagagtttgttttcaggcttggaactctgacattttgtagcaaaatggcatcttctgctgcatttaattccttgccatcaactcttgctttcataaggttctgtcaatttcaacataatgctttgtaaaaataggactctgtgaaactttctctataaatttggtggtataactaatttttcagggagcatctgaagggataatgatttttaagtggtaccctgttcatgccaggaccagcatttgtacatgggaaaataatcttaagatgagtgaagagcaaatgctagaccacacctttaataggcccaagtgccaacaaaaatacgtgtgagtgggattcccacggagaaatgtttctgaatgaaaatgaaacccttgataatgaatcctgaggccagaatgccaaagtcacagtattctgtcatttacagcccctaaaaaatcccaggtgtttgtgatgacaagccactattataagtactctgtattagtgactacttggcaagtaaaattttctcaaatgttatttttcatagatctccaagcaacaatcacttgcagtgtatctgacaaaatgctatacatgattttctaaaagtattttgatcactccagaaagaaatcagaataaagctgcataccccaaatcctagaaaattcacaaatattttgctcaagttcaggctctctcagcttctcttttctctttaacttttgcctcatacagaggcaatcttgatgacaaaagattgggctcaatttttgtttttcttgtgtagaaaagcaacacctctgtttcggactactgttcagtagacaaaaagcatcccagctttcgaaatgagagtccaaattgggttaccactgagattttaaattatgatgtgaaattggagaaggtgaactgtacagggccagacaaataatagagcccactctctgggcagttgcatgcagtcttgctgggtgctgagctgagagactgagagccgcttttgagacgtgttttgaggcatatcttccttaaatttttgctggtgtctgttttttagaagttttgccattagcatttttcactttgagtatctagccatggagaatgctctaaaaaatacaaggagacagggggatgctttatctatttggcttagtcactggttcagggtgaagtttcataatttattctgataatctggaggggatgacctccttcacagtactgttaaagccttccttgaacaagctcatttcactatataacttcctaaagacaaggctgattatttaaggatttcagagatatcatttggggaataactcaccaggtagagaaagtttgacctgatatgttaacaggcacaacaagaacttatttcaatgctttctcaccatctgccccttctctgagagtttagcctttcttaggatacttccttttccaggctagaaaagattgattgtattcatatcccaaagtaaaggctcctccaattctatcagatgtggaggcaacagaaaatgactcatgttatttttctctcacttcacagcatcaagaactcttcttgtttatgtgggggccatggtggattagcttgaggaactgtcaaattaaaatgaaaggaaagcaagttggggcaagaaaattctcactctgaatgtgaaagaaaatagcagtgttcttctctctggcaaagatttgtgtactgttgggggaagattcatgttatttctcaggtagactttactttttgagattctgtgtgtgtgtgtgtgtgtgtgtgtgtatgtgtgtgtgtgtgtgtgtattttgcctggtggggggttaaaggcagatagaatgtagttgtttatgagtttatactttctctttagcataatagatgccctgtttattttctcagaatgtgacaataaaattaggaaaggagaggaattcagaggcccatgttgcagttcatggcaaagttttacccaaatatttccttcagaaacatttagtcatagcaagccatataaattattgtctgcaactggtatcagaaaaagaaatcagtaggtggggactgtagaccccaatggtgcatctgtttacaatctttcttttccaaggttttaaggttcatgaataacatgagggaattttgggagagctaccacatcagtactttggcacgcattaactgttccacaggaaaactagggttgcttcagggctatttttgtttgaaatgacacacatacaaaaaaaaaaaaagacttttggaacatgttttgaggcctgtcacctgaaatcagcctttgctgaaagagtatttagtttgataagcgggatttcttgcttctcgcatcccagagtgtaaattctgcagcgaagcctgggtgtatgttttcagcaccagggacagcaaacaaccccctgaattgaaggggcccgctatcctgattgacctcccagactaggaagggcagttgttttgttttcctttatttcctatctaccggagcctcaacttggaagactttattcttaaggttcttacatctttcatttattaccaagcctagcttagctgtctctgtcacattcttgacctcctaacaaatgggtttggagtaacactcccagctctcctggctcagagaagtagaaagaaacacactagacttcatttgaagggcatgctttagagtaggctccccctacacaagtctttataacataccactgacttgtaaacccctaaatgaaggactgcttatacacaatcattttccttttaacatttctgcacatttctcacaatgtacaagtctatgtttgactcagtgtgcatctggaggcaatgtttcacagcagttgagcagaagctatgaagtttggggacagaaaaggtcccagtgatgctgctgttattcattttggagactcattgggggcacttctctgattctcagcatccacccttcaaccctgagtgctctttaacagctgtttttgccttaaacaatcacaataagaatgcaaatgactccttgtggcattcttcaggccagactgaagggtgtactgagaaaacaagggtagcagaagcacatgttgtcacattgctttgtgattggccagtttttatatagcacaatgacacacagatatcatcttagagtcatcattgtctactcttaactaattgtcagcatcttctccactcatgtcaggatgaatcctgtgttgggaaggcaagtcagtcactgcaggtttcatcataaatattgccttctatctgacagatgttagaaaacctccattttgaatgcctctgtaccatccaaggctctgaatttcccctatatcttatccctttctttccattccctttccatgttgcttatcataacatccataacatttagtggtgtaagaaaataaggggtttcttttaggaataaatgaggtggaaaaagtaggacagagccagatctcagaggagcaagttcagtggaacgatgatttctaacttgggagtgggtctaagatgtagccatccattccttccattccttgtcctcttgagtgaatctcattccagtgctcacacttgccctgcaaaaaaggccatggcacaagattctctagattatttgtatgaagactggaggtgagcagcatccaacacctctgttagagttctttagaatagaggagttttgtcttatattttaatccaggaaccttcccatatttaaaaagtttagaaataatatgtacagaaaggacctatggggataggaaagcttaataatacaagttattttcccttagaacagaggggaaggagctgcaaagtgactgctaatggaggaacgatctgctggctgggggaaatgtggcctgagactagagatgcagagcaggcatctctagaaggagagatgatgccaatagaagccccaggagggaactggccagcgaatacaattttataaagattctcagtactttttctgaaaaaattcctaaaattttcaagggcgcgtctagccctctgcctctttagaggtgagctcagtgctacttctgggttcttaaggcaaatgccctacaaacaccaaagtcttgtattttccactctcagccggcactggctaagtgggattttttttttcccttccctaagtgaaagggacttgttttcaggagaagtgtcctttaaacatccagctaaaactggaagtaattttttgcatgaatggctttttacagctaggtctacagcagaacaaaacttgtattaaactaagtgctactttacatatcttatttcaagggaaatgaaggatttattgtcgtgtaaatgatatacactgatttgtttcctactggacattacatgtccctttatctctaggctgatgttgtgcagcaaactttcaatatctggaaaatcagctggtacctacttcagtgcattattaggatattacgttccctgagaggaattttgccaatgaagtttaggtactgttgtaactgatttccatcccccctccctaagcttctgtactaagtatatgtaaagctattatatcttgtctgatcccatgtgttcatgtgtgtttcccaatgtttgcataaatatattggcaatctgaagggttagctggcttatggcaactgctgaacaatggtatgtttggcatgtgggacacctgatacctgggcacacctgttctgaggccaagctaattttacagattttggaaaagaaaaaacagcagcaacaacaacagtgtggcttgaattaaggaaagtttaacaatgaatacagtattgccaagtcatcatttatgggtggagacgttgaccacagcagttgaggtgctttcaactggatcttatgccctttattttaatcccaattgatagttcctcatttgtattttatgacttagaaatactcctacgtgatgctcgtttgtttttctcccaggcttctggaaagtgctgatcatgattgcttcctatcatttggatcccaaagttgataacttaacataagtgactgaggttttagtagaactgggttttactaatcgtatctcctccttgaggtgctgttcccttcattcctttcctttatgacaggtgaatgcattggctatgctgattttatttgcatcctggcgagtcttggagaatcaatctcgttaaaatgatgactgcatttgcctttggagaagaggtttattgtctaagtaaaactcttatgtgaaggtgtcatttatgtaaaaaaaaaaaaaaattctaacttgataagatggccacaggttagaggggtgtgttctcagttgatattaagggatatgttgaaaaggcaagtgcccaccctctattcttcatctcacccttcctttctccccaacctcaaaagaaaacaaaaaattatttttttaaattgtattagtaatttatgtttaatacaaaaggatgatttaatggtatcaccaaaggttgtttctcccattgtgcatgtccttcagtctcggccccatacccatcaccccattcttcaccctcatgcttccatcccaaggcaaacatgtgtcttcatcggaatctatgggtgttgaagttaaatgtgggggcagagatttaacaccatgacactaatacaaatcaaccattcttcactttcaaatggttaatcactacaggaaggcgaactcttttcttggtttttgtttaaaaacattttatacatatatatgtatatatgtgtgtgtatgtatggacataggtatgtatatgcacatgtacatgtatatatgtatatatccatcttcaatataaatatatcataagtgagagttgtaaatactccttggtcatatgtctgtctttctcatagtatcatatcttcaatgttatgttaacaactccatttattgattgatgaaatcgtgtgtagacctgtatcctcctgacatagtttatgtagggtctcttctcaaataaagtataaaacaacaa

SEQ ID NO: 129507 - DNA, 2478 bp, Artificial Sequence
  derived and/or modified sequence
atggatgtatcgctctgtcctgcaaagtgcagcttttggaggattttcctgttgggctcggtgtggctggattatgtaggctccgttctggcttgccccgcaaattgcgtatgctccaagaccgaaattaattgtcggaggccagacgacggcaacttgttccccctcctggaaggccaggacagcgggaatagtaatgggaatgcttccatcaacattacagatatctctagaaacataacctcaatccacattgaaaactggagaagcttgcacacactgaatgcggtcgatatggaactgtatactggtcttcagaagttaacaataaagaattccggtctccgctccatccagcccagggcatttgcaaaaaaccctcaccttcgctatataaatctgtcatccaacaggctgactaccctaagctggcagctgtttcagacactgtccctacgagagctgcagctggagcagaattttttcaactgttcttgtgatatccggtggatgcaactctggcaagagcaaggagaagccaagttgaacagtcagaacctgtactgtataaatgccgacggctcccaattacccctttttcgtatgaacatttcccagtgtgatcttcccgagatttcggtgtctcatgttaacctgaccgttcgggaaggcgataacgcagtcattacctgcaatggcagcggctccccactgcccgatgttgactggatcgtgacaggtctgcaatcaatcaatacgcaccaaacaaatttgaattggactaacgtgcacgctatcaatctgaccttggtcaatgtgacatctgaggacaacggttttacccttacctgcatagccgagaatgttgtggggatgagcaacgcaagcgtggcattgaccgtgtactacccccctcgcgtcgtcagcctcgaggaacccgagctgcggttggagcactgcattgaattcgtggtcaggggtaatccccctccaacattgcactggctgcacaacggccagcccctgcgggagagcaaaataattcatgtcgaatactaccaagaaggagagatctcagaaggatgtctgctgttcaataagcctacccactacaataacggaaactacaccctcatcgcaaagaatccattgggcacagccaaccagactatcaatggccatttcctaaaagagccgtttcccgagagtactgataatttcattctctttgacgaggtgtcccctactcctccaattaccgtgacacataagcccgaggaagataccttcggcgtttccatcgccgtaggtctggctgcctttgcctgtgtgcttctggttgttctctttgtgatgatcaacaagtacggcagaaggtctaagttcggaatgaaaggtccagtggcagtaattagtggagaggaggacagcgctagccctttgcatcacatcaatcatggcatcaccaccccgagctcacttgacgccggacctgatacagttgtgattggaatgacccgcattcctgtgattgagaacccccagtattttagacagggacacaattgtcacaaaccagacacctacgtgcagcacataaagcggcgtgacattgtgctgaagagagaactgggtgaaggcgcattcggcaaggtgttcttggcagagtgctacaatctgagccctacaaaggataaaatgttggtagcagttaaagcgttgaaggatcccacgttagctgctagaaaggactttcagcgggaagcagagcttctcactaatctgcagcacgagcacatagtcaaattttatggggtttgtggagatggggacccattaattatggtgttcgagtatatgaaacatggcgacctgaataaattcttgcgggcacatggacccgatgccatgatactggtggatgggcagcctaggcaggccaagggcgagctggggctgagccagatgctgcacatcgcatcccagatcgctagtgggatggtttaccttgcgagccagcatttcgtgcatagagacctggctacaagaaattgtctcgtaggagcaaatctgctggtgaagatcggggatttcggaatgagcagggacgtgtatagcacagactattaccgggttggcggacacaccatgcttcctatccgatggatgcctccggaatctatcatgtacaggaagtttactacggaatccgatgtatggtcttttggggtgatcttatgggaaatcttcacctatggcaagcagccctggttccagctttcaaacactgaagtcatcgagtgtatcacacagggacgggtcctcgaaagacccagggtctgccccaaggaagtttatgacgttatgctcgggtgctggcagcgcgaaccgcagcagcgcctcaatattaaggagatatacaaaattcttcacgccctgggaaaggctaccccaatctacctggatatcctgggctag

SEQ ID NO: 129508 - DNA, 2477 bp, Artificial Sequence
  derived and/or modified sequence
atggatgtttccctctgcccagccaagtgcagtttctggaggatcttcctgctgggatcagtatggttggattacgtggggagcgtcctggcatgtcctgcaaactgtgtttgctccaagacggaaatcaactgcaggcgacctgatgacggtaatctctttcctcttcttgaggggcaagacagcggcaatagtaatggaaacgcctccataaatattaccgacatttccaggaatatcacttccatccatattgagaattggagatccttgcatacactgaatgcagtggatatggaactgtatactggcctacagaaattgacgattaaaaattccgggcttcggtccatccagccgagagcttttgccaagaatccacacctgcgatatatcaacctttctagcaaccgtctaaccacactgtcttggcagctgttccagaccctctccctgcgcgaattgcagctggagcagaatttctttaactgcagctgtgatatccgctggatgcagctgtggcaggagcaaggcgaggcaaagctgaatagtcaaaacctgtactgcataaacgcggatggtagtcagctgcccttgtttcgaatgaatattagtcagtgtgaccttccggaaatcagcgtgagccatgtcaacctaaccgtgcgtgagggcgacaacgctgtaattacgtgcaatggcagtggaagcccgctccccgatgttgactggatcgtaactggcctccagtctattaacacgcatcagactaacctcaactggaccaatgtgcatgcgatcaatttaactctggtgaacgtcacgtctgaagacaacgggtttacattaacgtgcatagcagagaacgttgtcgggatgtctaacgcgtccgtcgcgctgacagtgtattatcctccccgtgtggtgtctctggaggaaccagagctacggttggagcactgtattgagttcgtggtgcggggaaacccccctccaacactccattggctgcataatggtcaaccccttagagaaagcaaaataatccacgttgaatactaccaggagggcgaaatctctgaggggtgcttgttgttcaacaaacccacacactacaataatggcaactacacgctgatcgctaagaacccactcgggaccgctaatcagactataaatggacatttccttaaggaacccttcccggagtctactgataacttcatcctattcgacgaggtgagtcccacccccccaatcaccgtgactcacaagccagaggaggatacctttggggtttcaatcgcagtgggcctggcggctttcgcatgtgttctgctggttgttctgttcgtcatgatcaacaagtatggaagacgcagcaagttcgggatgaagggtcccgtcgcggtgatcagcggtgaagaggactccgcttcccctttgcatcatatcaatcacggaattacgacaccaagcagtctcgacgctggtcccgacaccgtcgtgataggcatgacccgaattcctgtgatagaaaacccacagtatttccgccagggtcacaattgtcacaagcccgacacttacgtgcagcatataaaacgcagagacatcgtgttgaaaagagagttaggtgagggcgcattcggaaaagtcttcctggccgagtgctataatctctctccaacaaaagacaagatgcttgtcgctgtgaaagcccttaaggaccctactctggccgcacgcaaggattttcaacgtgaggccgaactcctgactaacctgcagcacgaacacatagtcaaattctatggggtttgcggagatggggatcctcttataatggtgttcgagtatatgaaacatggtgatttaaataagttcctgcgggcacatggacccgatgccatgattctcgttgacgggcagccccgacaggctaagggcgagttgggtcttagccagatgttgcacattgcctcccagatcgcctcgggaatggtttatcttgcctcacagcacttcgtgcatagggatctggcaactcgtaactgcttggtcggtgcaaatctccttgtaaagataggcgactttgggatgagtcgggatgtctattccactgactattaccgggtggggggacacactatgctccccatcagatggatgcctccagaatccatcatgtaccgaaagtttacaaccgagagcgacgtgtggtcctttggcgtcatcctttgggaaatattcacttacgggaagcagccctggttccagctgtcgaataccgaggtgatcgagtgtatcacgcagggacgcgtactggaacggccaagagtgtgtcccaaagaggtttacgacgtgatgctcggatgctggcagcgcgaacctcagcaacgcctgaacatcaaagaaatttataagatcctccatgccctggggaaagctacgccaatttatctcgacattttaggata

SEQ ID NO: 129509 - DNA, 2478 bp, Artificial Sequence
  derived and/or modified sequence
atggacgtgagcctgtgccccgccaagtgcagcttctggagaatcttcctgctgggcagcgtgtggctggactacgtgggcagcgtgctggcctgccccgccaactgcgtgtgcagcaagaccgagatcaactgcagaagacccgacgacggcaacctgttccccctgctggagggccaggacagcggcaacagcaacggcaacgccagcatcaacatcaccgacatcagcagaaacatcaccagcatccacatcgagaactggagaagcctgcacaccctgaacgccgtggacatggagctgtacaccggcctgcagaagctgaccatcaagaacagcggcctgagaagcatccagcccagagccttcgccaagaacccccacctgagatacatcaacctgagcagcaacagactgaccaccctgagctggcagctgttccagaccctgagcctgagagagctgcagctggagcagaacttcttcaactgcagctgcgacatcagatggatgcagctgtggcaggagcagggcgaggccaagctgaacagccagaacctgtactgcatcaacgccgacggcagccagctgcccctgttcagaatgaacatcagccagtgcgacctgcccgagatcagcgtgagccacgtgaacctgaccgtgagagagggcgacaacgccgtgatcacctgcaacggcagcggcagccccctgcccgacgtggactggatcgtgaccggcctgcagagcatcaacacccaccagaccaacctgaactggaccaacgtgcacgccatcaacctgaccctggtgaacgtgaccagcgaggacaacggcttcaccctgacctgcatcgccgagaacgtggtgggcatgagcaacgccagcgtggccctgaccgtgtactacccccccagagtggtgagcctggaggagcccgagctgagactggagcactgcatcgagttcgtggtgagaggcaaccccccccccaccctgcactggctgcacaacggccagcccctgagagagagcaagatcatccacgtggagtactaccaggagggcgagatcagcgagggctgcctgctgttcaacaagcccacccactacaacaacggcaactacaccctgatcgccaagaaccccctgggcaccgccaaccagaccatcaacggccacttcctgaaggagcccttccccgagagcaccgacaacttcatcctgttcgacgaggtgagccccaccccccccatcaccgtgacccacaagcccgaggaggacaccttcggcgtgagcatcgccgtgggcctggccgccttcgcctgcgtgctgctggtggtgctgttcgtgatgatcaacaagtacggcagaagaagcaagttcggcatgaagggccccgtggccgtgatcagcggcgaggaggacagcgccagccccctgcaccacatcaaccacggcatcaccacccccagcagcctggacgccggccccgacaccgtggtgatcggcatgaccagaatccccgtgatcgagaacccccagtacttcagacagggccacaactgccacaagcccgacacctacgtgcagcacatcaagagaagagacatcgtgctgaagagagagctgggcgagggcgccttcggcaaggtgttcctggccgagtgctacaacctgagccccaccaaggacaagatgctggtggccgtgaaggccctgaaggaccccaccctggccgccagaaaggacttccagagagaggccgagctgctgaccaacctgcagcacgagcacatcgtgaagttctacggcgtgtgcggcgacggcgaccccctgatcatggtgttcgagtacatgaagcacggcgacctgaacaagttcctgagagcccacggccccgacgccatgatcctggtggacggccagcccagacaggccaagggcgagctgggcctgagccagatgctgcacatcgccagccagatcgccagcggcatggtgtacctggccagccagcacttcgtgcacagagacctggccaccagaaactgcctggtgggcgccaacctgctggtgaagatcggcgacttcggcatgagcagagacgtgtacagcaccgactactacagagtgggcggccacaccatgctgcccatcagatggatgccccccgagagcatcatgtacagaaagttcaccaccgagagcgacgtgtggagcttcggcgtgatcctgtgggagatcttcacctacggcaagcagccctggttccagctgagcaacaccgaggtgatcgagtgcatcacccagggcagagtgctggagagacccagagtgtgccccaaggaggtgtacgacgtgatgctgggctgctggcagagagagccccagcagagactgaacatcaaggagatctacaagatcctgcacgccctgggcaaggccacccccatctacctggacatcctgggctag

SEQ ID NO: 129510 - protein, 418 aa, Artificial Sequence
  derived and/or modified sequence
MRLNSSAPGTPGTPAADPFQRAQAGLEEALLAPGFGNASGNASERVLAAPSSELDVNTDIYSKVLVTAVYLALFVVGTVGNTVTAFTLARKKSLQSLQSTVHYHLGSLALSDLLTLLLAMPVELYNFIWVHHPWAFGDAGCRGYYFLRDACTYATALNVASLSVERYLAICHPFKAKTLMSRSRTKKFISAIWLASALLAVPMLFTMGEQNRSADGQHAGGLVCTPTIHTATVKVVIQVNTFMSFIFPMVVISVLNTIIANKLTVMVRQAAEQGQVCTVGGEHSTFSMAIEPGRVQALRHGVRVLRAVVIAFVVCWLPYHVRRLMFCYISDEQWTPFLYDFYHYFYMVTNALFYVSSTINPILYNLVSANFRHIFLATLACLCPVWRRRRKRPAFSRKADSVSSNHTLSSNATRETLY

SEQ ID NO: 129511 - DNA, 1257 bp, Artificial Sequence
  derived and/or modified sequence
atgaggctgaacagcagtgcgccagggacgcccggaacccccgctgccgacccattccagagggcacaagctggtctggaagaggcccttctggcacccggcttcggtaatgcatctgggaacgctagcgaacgcgttctggccgcgccatccagcgagctcgacgtgaatactgacatttactccaaagtcctggtgacagcagtttacctcgctttgtttgttgtggggacagtgggcaataccgttaccgcgttcacactcgccagaaagaaaagcctgcagtctctccagagtaccgtgcactatcacttaggatcgcttgcgctgagcgacctgctgacactcttgctagctatgcctgttgagctgtataactttatctgggtccaccatccctgggcatttggagacgccggttgtagaggctattacttcctgcgcgacgcctgtacctacgctactgcgctgaatgtggccagtctgtcagttgagagatatctggctatatgccacccttttaaggcaaaaactctgatgtcgcgatcccgtactaaaaaattcatatcagccatatggctcgccagcgctctactggctgtgcctatgttgttcaccatgggtgagcagaatagatccgcagacgggcaacatgctggaggactcgtctgcacccccactatacatacagctacggtcaaggtcgtcattcaggttaatacttttatgtcctttattttccctatggtggtcatttccgttctgaacaccattattgcaaacaagctgaccgtgatggtgaggcaggcagccgaacagggtcaagtttgcactgttgggggagagcattcaactttcagtatggccatcgagcctgggagggtgcaggccctcagacacggtgtgcgcgtgctccgggctgttgtcattgcgttcgtggtgtgctggttgccttaccacgtgcggcgtctcatgttctgttacataagtgatgagcagtggaccccgtttttgtacgatttttatcactacttctacatggtcactaatgccctattttacgtctcctcaacaatcaacccgattctttacaacctggtcagcgctaatttccgccacattttcttggcaaccctagcctgcctatgccccgtttggcgaagacgaagaaagcgtcccgccttctccagaaaagccgacagcgtgtcttcgaaccacacgcttagttccaatgctacccgggagaccctgtattag

SEQ ID NO: 129512 - DNA, 1257 bp, Artificial Sequence
  derived and/or modified sequence
atgaggctgaacagcagcgcccctggcaccccaggcaccccagctgctgaccccttccagagggcccaggccggcctggaggaggccctgctggcccctggctttggaaatgccagcggaaatgccagcgagcgggtgctggccgcccccagcagcgagctggatgtgaacacagacatctacagcaaggtgctggtgacagctgtgtacctggccctgtttgtggtgggcaccgtgggcaacacagtgacagccttcaccctggccaggaagaagagcctgcagagcctgcagagcacagtgcactaccacctgggcagcctggccctgagtgacctgctgaccctgctgctggccatgcctgtggagctgtacaacttcatctgggtgcaccacccctgggcctttggagatgctggctgccggggctactacttcctgagagatgcctgcacctacgccacagccctgaatgtggccagcctgtctgtggagcgctacctggccatctgccaccccttcaaggccaagaccctgatgagccgcagcaggaccaagaagttcatcagcgccatctggctggccagcgccctgctggccgtgcccatgctgttcaccatgggagagcagaacagatctgcagatggccagcacgccggcggcctggtgtgcacccccaccatccacacagccaccgtgaaggtggtgatccaggtgaacaccttcatgtccttcatcttccccatggtggtgatctctgtgctgaacaccatcatcgccaacaagctgactgtgatggtgcggcaggccgctgagcagggccaggtgtgcaccgtgggcggggagcacagcaccttctccatggccatcgagcccggccgggtgcaggccctgcggcatggagtgcgggtgctgcgggctgtggtgattgcctttgtggtgtgctggctgccctaccacgtgcggcggctgatgttctgctacatcagtgatgagcagtggacccccttcctgtatgacttctaccactacttctacatggtgaccaatgccctcttctacgtgagcagcaccatcaaccccatcctgtacaacctggtgtctgccaacttccgccacatcttcctggccaccctggcctgcctgtgccctgtgtggaggagaagaaggaagaggcctgccttcagcaggaaggctgacagcgtgagcagcaaccacaccctgagcagcaatgccacccgggagaccctgtactag

SEQ ID NO: 129513 - DNA, 1257 bp, Artificial Sequence
  derived and/or modified sequence
atgcggctgaacagcagcgcccccggcacccccggcacccccgccgctgacccttttcagcgggcccaagccggtctagaggaagcccttcttgctcccgggtttggcaatgcctccggcaacgcctccgaaagagtactggccgctccttcgtctgaattggacgtcaataccgacatttactctaaggtgttggtgacagccgtgtatcttgctctattcgttgtgggcaccgtaggcaacacggtgacagcgtttacgctggcacgcaagaaaagccttcaatcactgcaaagcactgtgcactaccatctgggatccctcgcgctgagtgatctcttaactttgctcttggctatgcccgttgaactctacaatttcatctgggtgcatcacccatgggccttcggcgatgccggctgtaggggctactacttcctgcgtgatgcgtgcacttacgctacagcactgaatgtagccagtctgtccgtcgagagatacttggccatttgccaccccttcaaagcaaagactttgatgagccgcagtcgcactaaaaaatttattagcgctatctggctggccagtgctctgctggctgtgcccatgctgtttacaatgggggagcagaatagaagcgcagacggccaacacgctggaggtctggtttgtaccccgacaatccacactgcaacggtcaaggtggttatccaggttaacacttttatgagcttcattttccccatggtggttatcagcgttcttaacacaatcatcgcgaataagcttaccgttatggtccggcaggccgcagagcagggtcaggtgtgtacagtggggggagagcatagcaccttctcaatggcgattgaacctgggcgggtgcaggcccttcggcacggtgtgcgcgtcctgcgggcggtggtgatcgcatttgtggtctgctggctaccgtaccacgtcagaaggctcatgttttgttatatctccgatgaacaatggacgccgttcctctatgatttctaccattacttttatatggtgacgaatgcactgttttacgtgtcatccacaatcaaccccatattgtataatttggtgtctgcaaattttagacacattttcttggccactcttgcttgtctatgccccgtttggaggagaagaaggaaaaggccagccttttccaggaaagccgattccgtgagctccaatcacaccctgtctagtaatgcgactcgcgagaccctctactag

SEQ ID NO: 129514 - DNA, 4132 bp, Artificial Sequence
  derived and/or modified sequence
caagctcgccccgcgcagcccgagccgggctgggcgctgtcctcgggggcctggggaaccgcgcggtttggagatcggaggcacctggaacccgtggcaagcgccgagccgggagacagcccgaggaaccacgggttctggagctaggagccggaagctgggagtccggaggagagcggagcccggagcccggagcccggggcggcgcgtctgggtctggcgcttcccgactggacggcgcgcccgctggtcttcgccacgcgccctcccctgggctcccgttcatcggtccccgcctgagacgcgcccactcctgcccggacttccagccccggaggcgccggacagagccgcggactccagcgcccaccatgcgcctcaacagctccgcgccgggaaccccgggcacgccggccgccgaccccttccagcgggcgcaggccggactggaggaggcgctgctggccccgggcttcggcaacgcttcgggcaacgcgtcggagcgcgtcctggcggcacccagcagcgagctggacgtgaacaccgacatctactccaaggtgctggtgaccgccgtgtacctggcgctcttcgtggtgggcacggtgggcaacacggtgacggcgttcacgctggcgcggaagaagtcgctgcagagcctgcagagcacggtgcattaccacctgggcagcctggcgctgtccgacctgctcaccctgctgctggccatgcccgtggagctgtacaacttcatctgggtgcaccacccctgggccttcggcgacgccggctgccgcggctactacttcctgcgcgacgcctgcacctacgccacggccctcaacgtggccagcctgagtgtggagcgctacctggccatctgccaccccttcaaggccaagaccctcatgtcccgaagccgcaccaagaagttcatcagcgccatctggctcgcctcggccctgctggcggtgcctatgctgttcaccatgggcgagcagaaccgcagcgccgacggccagcacgccggcggcctggtgtgcacccccaccatccacactgccaccgtcaaggtcgtcatacaggtcaacaccttcatgtccttcatattccccatggtggtcatctcggtcctgaacaccatcatcgccaacaagctgaccgtcatggtacgccaggcggccgagcagggccaagtgtgcacggtcgggggcgagcacagcacattcagcatggccatcgagcctggcagggtccaggccctgcggcacggcgtgcgcgtcctacgtgcagtggtcatcgcctttgtggtctgctggctgccctaccacgtgcggcgcctcatgttctgctacatctcggatgagcagtggactccgttcctctatgacttctaccactacttctacatggtgaccaacgcactcttctacgtcagctccaccatcaaccccatcctgtacaacctcgtctctgccaacttccgccacatcttcctggccacactggcctgcctctgcccggtgtggcggcgcaggaggaagaggccagccttctcgaggaaggccgacagcgtgtccagcaaccacaccctctccagcaatgccacccgcgagacgctgtactaggctgtgcgccccggaacgtgtccaggaggagcctggccatgggtccttgcccccgacagacagagcagcccccacccgggagccttgatgggggtcaggcagaggccagcctgcactggagtctgaggcctgggacccccccctcccaccccctaacccatgtttctcattagtgtctcccgggcctgtccccaactcctccccacccctcccccatctcctctttgaaagccagaacaagagagcgctcctctcccagataggaaaagggcctctaacaaggagaaattagtgtgcggcaaaaggcagttttctttgttctcagactaatggatggttccagagaaggaaatgaaaggtgctgggtggggccgggcctccggcggcccggctgctgttcccatgtccacatctctgaggcctgcaccccctctgtctagctcggggagtccagccccagtcccgcaggctccgtggctttgggcctcacgtgcagaccctgccatgcagacccatgcccccctcccccaggcagctccaagaaagctccctgactcgccccttcaggcctggcaagctgggggcccatcgccgtggggagtccctcccaccaccctcgccgcaggcagctgcagcccccagaggggaccacaagcccaaaaaggacaaaaatgggctggcctggaatggcccagaccccagcctcccctcctccctcccatcctcacccaggccaaggcccaggggctctgccaggacaccacatgggagggggctcaggcctcagcctcaagatcttcagctgtggcctctcgggctcggcagaagggacgccggatcaggggcctggtctccagcacctgcccgagtggccgtggccaggatggggtgcgcattccgtgtgctttgcttgtggctgtgcaggctgaggtctggagccaggcccagagctggcttcagggtggggccttgagaaggggaatgtgggacaggggcgatggtgcctggtctctgagtaagatgccaggtcccaggaactcaggcttcaggtgagaaggagcggtgtgtccaggcaccgctggccggcagccctgggctgaggcacagactcatttgtcaccttctggcggcggcagccctggccccggcctccaagcagttgaaaaagctggcgcctccttggtctctaggatccaggctccacagagcacatgactagccaggcccctggcttaagaaggtcgcctaagcctaagagaagacagtcccaggagaagctggccgggaccagccaggagctgggagccacaggaagcaaaagtcagccttttcttcaagggatttccctgtctcagagcagcctttgccccagggaaatgggctctgggctggctgcctgcaccggccatgtcgacccaggacccggacacctggtcttgggctgtgttcagccactttgccttctctggactcagtttccccgtctgagaaatgagagtcgaatgctacagtatctgcagtcgcttggatctggctgttgagttgacgggttccttgaaccccacaaaatccctctccaaccacaggacccttcggctcaccaagaacagggcccaggggagtcaggcctattcgctgcacttcctgccaaactttgcccccacaagcctggtcatcagccaggcagccctcccagtgcccaagggccaccaaccccagggaaacagggccagcacagaggggccttcctcccccacagagcccccatgacatagtctgctctgggcggaagagctttgctgccagccagggatgtccagaggtcagtgcagcccctacccctgctcaggagtgggctcagagtctagcaaatgctaaggcccctcaggctgggctctgaacgaggacctggactcagagccagacagggcagcctcagacccttctctggggctcctggaccttgggccataatttctgagcctcggtttccccatctaaggaacagatgtggtcgttccgccctctcagctggatgagactgtcctggaggatccaccccggaacagacagaatggtgtctctcaggatggtgctctgagagagggcagagtggatgccccactgccctagaccctcggtagacgtggggtctctggggcggggtctgtggctgtgactgaagtcggcttttcccgttgatgtcttgatgctcctatctgtgcacttaccgtaggtagggacacgtgtccacgcaccacagacacacccacgacacctgatctcgtatcactagcttgcggccaggtcatgatgtggccccggaagctggccctgcgtgccatgagtgcgtcggtcatggagtccggagcccctgagccggcccctggtgacggcacagccctcacagctcaaacgcccacccccactcccaccatctgcaggtggtgaaaacaaaccccgtgtatctctcaataaaggtggccgaagggcctcgatgtgga

SEQ ID NO: 129515 - DNA, 1257 bp, Artificial Sequence
  derived and/or modified sequence
atgcggctgaattcgagcgctccaggtaccccagggactccagctgcagacccattccagcgcgctcaagccggactggaggaggcactcctggcaccaggcttcggaaacgcatccggcaatgcctccgagagggttctggccgcaccaagtagtgagctagatgtaaacaccgatatttactcaaaggtcttggtcaccgcagtctacctggctttattcgtggtgggtaccgtgggcaatactgttacggcattcaccctagctcgcaagaagtcactacagagccttcaatctaccgtgcactatcatctaggctccctcgccctgagcgatttgctgactctacttctagccatgccagtcgagttatataattttatctgggtgcaccatccctgggcattcggtgatgcgggatgcagaggatactactttctgagagacgcctgtacctatgccacagccctgaatgtcgcatcgctgtccgtggagcggtatctcgccatctgccacccttttaaagctaagactctgatgagccgttctagaactaagaaatttatttcagccatctggctggcctcggcactgctcgctgtaccgatgctctttaccatgggcgaacagaaccggagcgctgatggacagcacgctggcggtctggtgtgcacccccacgattcacactgccactgtcaaggtggtgatacaggtcaatacatttatgtccttcatcttccctatggtggttatatccgttcttaataccatcatcgctaataagcttactgtgatggttaggcaggctgcagagcagggccaggtgtgcactgtgggaggcgagcattccacgttttcaatggccatagaacctgggagggttcaagctcttagacatggcgtgagagtcctgagggctgtggtgatcgctttcgtggtatgttggctcccataccatgtgcgccgactgatgttttgctacatatcagacgagcaatggacaccctttctgtatgatttttaccattatttctacatggttacaaacgcccttttctacgtgtcttcgactattaatcctatattatataatctggtctcggcaaattttaggcacattttccttgccacccttgcctgtctttgcccagtgtggcgaaggcggcgaaagcgtcccgcttttagtcgtaaggcggatagcgtcagcagcaatcacaccttatccagtaatgcaactagggagactctgtattag

SEQ ID NO: 129516 - DNA, 1257 bp, Artificial Sequence
  derived and/or modified sequence
atgagactgaacagcagcgcccccggcacccccggcacccccgccgccgaccccttccagagagcccaggccggcctggaggaggccctgctggcccccggcttcggcaacgccagcggcaacgccagcgagagagtgctggccgcccccagcagcgagctggacgtgaacaccgacatctacagcaaggtgctggtgaccgccgtgtacctggccctgttcgtggtgggcaccgtgggcaacaccgtgaccgccttcaccctggccagaaagaagagcctgcagagcctgcagagcaccgtgcactaccacctgggcagcctggccctgagcgacctgctgaccctgctgctggccatgcccgtggagctgtacaacttcatctgggtgcaccacccctgggccttcggcgacgccggctgcagaggctactacttcctgagagacgcctgcacctacgccaccgccctgaacgtggccagcctgagcgtggagagatacctggccatctgccaccccttcaaggccaagaccctgatgagcagaagcagaaccaagaagttcatcagcgccatctggctggccagcgccctgctggccgtgcccatgctgttcaccatgggcgagcagaacagaagcgccgacggccagcacgccggcggcctggtgtgcacccccaccatccacaccgccaccgtgaaggtggtgatccaggtgaacaccttcatgagcttcatcttccccatggtggtgatcagcgtgctgaacaccatcatcgccaacaagctgaccgtgatggtgagacaggccgccgagcagggccaggtgtgcaccgtgggcggcgagcacagcaccttcagcatggccatcgagcccggcagagtgcaggccctgagacacggcgtgagagtgctgagagccgtggtgatcgccttcgtggtgtgctggctgccctaccacgtgagaagactgatgttctgctacatcagcgacgagcagtggacccccttcctgtacgacttctaccactacttctacatggtgaccaacgccctgttctacgtgagcagcaccatcaaccccatcctgtacaacctggtgagcgccaacttcagacacatcttcctggccaccctggcctgcctgtgccccgtgtggagaagaagaagaaagagacccgccttcagcagaaaggccgacagcgtgagcagcaaccacaccctgagcagcaacgccaccagagagaccctgtactag

SEQ ID NO: 129517 - protein, 741 aa, Artificial Sequence
  derived and/or modified sequence
MAAAEGPVGDGELWQTWLPNHVVFLRLREGLKNQSPTEAEKPASSSLPSSPPPQLLTRNVVFGLGGELFLWDGEDSSFLVVRLRGPSGGGEEPALSQYQRLLCINPPLFEIYQVLLSPTQHHVALIGIKGLMVLELPKRWGKNSEFEGGKSTVNCSTTPVAERFFTSSTSLTLKHAAWYPSEILDPHVVLLTSDNVIRIYSLREPQTPTNVIILSEAEEESLVLNKGRAYTASLGETAVAFDFGPLAAVPKTLFGQNGKDEVVAYPLYILYENGETFLTYISLLHSPGNIGKLLGPLPMHPAAEDNYGYDACAVLCLPCVPNILVIATESGMLYHCVVLEGEEEDDHTSEKSWDSRIDLIPSLYVFECVELELALKLASGEDDPFDSDFSCPVKLHRDPKCPSRYHCTHEAGVHSVGLTWIHKLHKFLGSDEEDKDSLQELSTEQKCFVEHILCTKPLPCRQPAPIRGFWIVPDILGPTMICITSTYECLIWPLLSTVHPASPPLLCTREDVEVAESPLRVLAETPDSFEKHIRSILQRSVANPAFLKASEKDIAPPPEECLQLLSRATQVFREQYILKQDLAKEEIQRRVKLLCDQKKKQLEDLSYCREERKSLREMAERLADKYEEAKEKQEDIMNRMKKLLHSFHSELPVLSDSERDMKKELQLIPDQLRHLGNAIKQVTMKKDYQQQKMEKVLSLPKPTIILSAYQRKCIQSILKEEGEHIREMVKQINDIRNHVNF

SEQ ID NO: 129518 - DNA, 2226 bp, Artificial Sequence
  derived and/or modified sequence
atggccgccgcggaggggcctgtaggagatggagaactgtggcaaacttggctgcccaaccacgtggtgtttttacggctgagggagggcctcaaaaaccaatctccgactgaggctgagaagccagcaagttcgagcctgccttctagtccaccaccacagctcttaacacgcaacgtggtcttcgggctcgggggagagctgttcttatgggatggcgaagactcttcgtttctggttgtgcgtctgaggggcccttctggtggcggcgaagagcctgccctgagccaatatcagcggctgctctgtattaacccccccctgttcgagatctatcaagtccttctctctccaactcaacatcacgtagccctcatcggcatcaaagggcttatggtgctcgaactgcctaaacggtggggcaaaaattccgaattcgaagggggaaaatcaactgtgaactgttcaaccaccccggtggccgaaagattcttcacatcgtccacttctctcaccctgaaacacgctgcatggtatccatctgaaatattagacccccatgtggtgctgctaacatccgataatgtgattcggatctacagcttgcgcgaaccacaaacccccacaaatgttatcatattgagtgaggctgaagaggagtctcttgtgctgaacaagggccgcgcctacacagccagtttgggcgaaacagctgtcgctttcgactttggcccgcttgcagccgtcccgaaaactctcttcgggcaaaacggcaaagatgaagtcgtggcatatccattatatattctctatgagaacggagagacattcctgacttatatttccctgctgcattcccccgggaacatcggcaaactgctcggacctctgcccatgcacccagcggccgaggacaattacggatacgatgcatgcgccgtactctgtctgccttgtgtaccaaacatactggttatcgcaacagaatcagggatgctttaccattgcgtagtgctggagggagaggaggaggatgatcatacttctgaaaagagttgggatagtaggatcgatctgattccgtcactgtacgtttttgagtgcgtggagcttgaactcgctttaaagctggctagtggagaagacgaccccttcgactccgacttctcctgcccggtcaaactgcacagagacccaaaatgtccgtcgagataccactgtactcacgaggccggtgtacacagtgttggcctgacatggattcacaagttgcacaagttcttaggatccgatgaggaggacaaagattcactgcaggagctgtccacagaacaaaaatgtttcgtcgaacacatcttgtgtacaaagcctttaccttgccgacagccggccccaatcagggggttttggattgttccagacattctcgggccaaccatgatttgcattacctccacctatgagtgtcttatttggcccctcctttctaccgtgcacccagcttcccccccactcctatgcactcgcgaggatgtggaggttgccgagagtcctctgagggtcctggcagaaacacctgactcttttgaaaagcacatccgatcgattctacagcggagcgttgcaaaccccgcgtttctaaaggcctcggaaaaggatatagccccacccccagaagagtgcctccaactgctttcccgcgccacacaggtgttccgtgaacaatacattctcaagcaggaccttgcaaaagaggaaatccaaaggagagtgaagttgctgtgtgaccaaaagaagaagcaattggaggatctatcttactgcagggaagaaaggaagtccctgagggagatggcagagcggcttgctgataaatatgaagaagctaaggagaagcaggaagatattatgaatcgaatgaagaaactcctgcactcttttcactccgaattgccagtgctgtccgatagcgaaagggatatgaaaaaggaactccagctcattccagaccaactccgtcacctggggaatgccattaagcaggtgacaatgaaaaaagactatcagcagcagaagatggagaaagtcctttctttgcctaaaccgactatcattctgtccgcataccagagaaaatgtatccagtccatcctgaaggaagaaggtgagcacatcagggagatggttaaacagattaacgacattcgcaaccatgtgaacttttag

SEQ ID NO: 129519 - DNA, 2226 bp, Artificial Sequence
  derived and/or modified sequence
atggcagcggctgagggtccagtgggagacggcgagctctggcaaacttggctccccaaccatgtcgtctttctcagactccgcgaaggactcaagaaccaaagccccacagaagccgaaaaacctgcctcatcttcccttccctctagtccccccccccagctgctaacaaggaacgtcgtcttcgggttaggcggtgagctgttcctttgggacggcgaagattctagttttctggtggtgcgacttcgcggtcccagtgggggtggcgaggaacctgcgttgtcacaataccagagactgctatgtattaaccccccactcttcgaaatttaccaggtactactcagcccgacacaacaccacgtggccctgatcggcattaagggcttgatggtgctagagcttcccaagaggtggggcaagaacagtgagttcgaaggaggaaagtcaactgtgaactgctctacgacccccgttgcggagcgcttcttcacctcctccacctcactcacactgaagcatgccgcttggtatccgtcagagatcctcgatccccacgtggtcctcttgacctccgataacgttattcgcatatacagcctgagggagccgcagactcctaccaacgtgataattttgtctgaagctgaagaagaatcccttgtgctgaataagggaagggcatataccgcttcattgggtgagactgccgtcgcgtttgacttcggcccattagccgctgtgcctaagacgctgtttgggcagaacggaaaagacgaagtggtcgcatacccactctacatcctgtacgaaaacggcgaaaccttcctgacatacatcagtctgctgcatagccccggtaacatagggaaattacttggcccacttcctatgcacccagccgccgaggataactatggctatgacgcctgtgctgtcctgtgtctgccatgcgtgcctaatatcttggtgattgcgacagaatcaggcatgctgtatcactgcgtggttctagagggcgaagaggaggacgatcatacctcagagaagagctgggactcccgcattgatctgatcccatctctttacgtctttgaatgcgtcgagctagagctcgccttgaaactcgcttcaggagaagacgatccgttcgactcagacttttcctgcccggtgaaactgcaccgggatcccaagtgcccatctcgatatcactgcacgcatgaggctggggtgcattccgtgggccttacctggatacataaactccacaagtttctgggtagtgacgaggaagacaaggacagcctacaagaacttagcactgagcaaaagtgctttgtcgaacatatcctctgcaccaaacctctaccgtgcagacaacccgcaccaatcagggggttctggatagtcccagatatcctgggtcctacgatgatttgtattacaagtacatacgaatgtctgatttggcctctgctttctactgttcacccagcatccccccctctactctgcacgcgcgaagacgttgaggttgccgagagcccattaagggtgctggcagagactccagatagcttcgagaagcacatcaggtctatcctgcagcgctccgtggccaaccccgccttcctcaaagctagtgagaaggatattgcccctcctcccgaggagtgccttcagctgctgtcgcgcgccacacaggtttttcgagaacagtacattctaaagcaagacctagccaaggaggagatccagagaagggtcaaactcctgtgtgatcaaaagaagaaacagttagaggatctgtcctactgtcgggaggagaggaaatctcttcgggaaatggccgagcgcttagccgataaatacgaggaagctaaggaaaaacaagaggacataatgaaccgcatgaagaagctgctgcacagtttccacagcgagctgccagtcctaagtgactctgaaagagacatgaaaaaagagctccagctgatacccgaccagcttcgccatctggggaacgccataaagcaggtgaccatgaagaaggactaccaacagcagaaaatggaaaaggtcctctccttgcctaaacccaccatcatcctatctgcctatcagcgcaagtgtattcagtctatacttaaagaagaaggggaacacatccgcgagatggttaagcagatcaatgacattagaaatcacgtgaacttttag

SEQ ID NO: 129520 - DNA, 2226 bp, Artificial Sequence
  derived and/or modified sequence
atggctgctgctgagggccctgtgggagatggagagctgtggcagacctggctgcccaaccacgtggtgttcctgcggctgcgggagggcctgaagaaccagagccccacagaagctgagaagccagccagcagcagcctgcccagcagccccccaccccagctgctgaccagaaatgtggtgtttggcctgggcggggagctgttcctgtgggatggagaggacagcagcttcctggtggtgcggctgcggggccccagcggcggcggggaggagcccgccctgagccagtaccagaggctgctgtgcatcaacccccccctgtttgagatctaccaggtgctgctgagccccacccagcaccacgtggccctgattggcatcaagggcctgatggtgctggagctgcccaagcgctggggcaagaacagcgagtttgagggcggcaagagcacagtgaactgcagcaccacccctgtggccgagcgcttcttcaccagcagcaccagcctgaccctgaagcacgccgcctggtaccccagcgagatcctggacccccacgtggtgctgctgaccagtgacaacgtcatccgcatctacagcctgcgggagccccagacccccaccaacgtcatcatcctgtctgaggccgaggaggagagcctggtgctgaacaagggccgggcctacacagccagcctgggggagacagctgtggcctttgattttggccccctggccgctgtgcccaagaccctgtttggccagaatggcaaggatgaggtggtggcctaccccctgtacatcctgtatgaaaatggagagaccttcctgacctacatcagcctgctgcacagccctggcaacatcggcaagctgctgggccccctgcccatgcaccctgctgctgaggacaactacggctatgatgcctgtgctgtgctgtgcctgccctgtgtgcccaacatcctggtgattgccacagagagcggcatgctgtaccactgtgtggtgctggagggggaggaggaggatgaccacaccagcgagaagtcctgggacagcagaattgacctgatccccagcctgtatgtgtttgaatgtgtggagctggagctggccctgaagctggccagcggagaagatgacccctttgacagcgacttcagctgccctgtgaagctgcaccgggaccccaagtgccccagccgctaccactgcacccatgaagctggggtgcacagcgtgggcctgacctggatccacaagctgcacaagttcctgggcagtgatgaggaggacaaggacagcctgcaggagctgagcacagagcagaagtgctttgtggagcacatcctgtgcaccaagcccctgccctgccggcagcctgcccccatccggggcttctggatcgtgcctgacatcctgggccccaccatgatctgcatcaccagcacctatgagtgcctgatctggcccctgctgagcacagtgcacccagccagcccccccctgctgtgcacccgggaggatgtggaggtggccgagagccccctgcgggtgctggccgagaccccagacagctttgagaagcacatccgcagcatcctgcagaggtctgtggccaacccagccttcctgaaggccagcgagaaggacatcgcccctcctcctgaggagtgcctgcagctgctgagccgggccacccaggtgttccgggagcagtacatcctgaagcaggacctggccaaggaggagatccagaggagagtgaagctgctgtgtgaccagaagaagaagcagctggaggacctgagctactgccgggaggagaggaagagcctgcgggagatggccgagcggctggccgacaagtatgaggaggccaaggagaagcaggaggacatcatgaacaggatgaagaagctgctgcacagcttccacagcgagctgcctgtgctgagtgacagcgagcgggacatgaagaaggagctgcagctgatcccagaccagctgcggcacctgggcaatgccatcaagcaggtgaccatgaagaaggactaccagcagcagaagatggagaaggtgctgagcctgcccaagcccaccatcatcctgagcgcctaccagaggaagtgcatccagagcatcctgaaggaggagggggagcacatccgggagatggtgaagcagatcaatgacatccggaaccacgtgaacttctag

SEQ ID NO: 129521 - DNA, 2226 bp, Artificial Sequence
  derived and/or modified sequence
atggccgccgccgagggccccgtgggcgacggcgagctgtggcagacctggctgcctaaccacgtggtattccttcgtctgcgggaaggtctgaaaaaccaaagcccaaccgaggccgagaaaccagcaagcagctctttgccgagctccccaccaccccagcttctgacgcggaatgtggtgttcggccttggcggtgaactgtttctgtgggatggtgaagacagcagtttcctggtcgtcaggctgcgcggcccgtccggtggcggagaagagccagccctcagccagtaccagcgtcttctatgcatcaatcccccacttttcgagatctaccaagtgctattgtctcctacccagcatcatgtcgctctgattggaattaagggtctgatggtgttagaacttccaaagaggtgggggaaaaattccgaattcgagggcggcaaatcaacggtcaactgcagcactacaccggttgcagagcgcttctttacatccagcacctccctgactttgaaacacgctgcctggtacccgtctgagatactggacccccatgtggtgcttctgacttctgacaatgtcataagaatttactctctcagggaacctcagacccccacaaatgtgataatactctctgaggctgaagaagagtcccttgtcctgaataaaggcagggcttacaccgcatcactcggtgagaccgcagtggccttcgattttggcccgctggcagccgttcctaaaaccctcttcggacagaacggcaaagatgaagtcgtcgcatacccattatatatcctgtacgaaaatggggaaactttcctaacttatatctcgctgttacactcccccggcaatatcggaaaactcctggggcccctgcctatgcatccggcagcggaggacaattacggctacgatgcctgcgctgtgctctgcctcccctgcgtacctaacattctcgttattgccacggagtcaggaatgctgtatcattgtgtggttcttgagggggaagaagaggatgaccacacgtctgagaagagttgggattcacggatcgatctgatcccttcattgtacgtttttgagtgcgtagagttggaactggctctcaaactggctagcggagaagacgacccgtttgattccgatttctcctgccctgttaaacttcatagggatcctaagtgtccctctcgttaccattgcactcacgaggctggagtccactcagtgggacttacttggattcacaagctgcacaaatttctggggagcgacgaggaagacaaggatagcctccaggaactgtctacagagcagaagtgctttgtggaacacatcttgtgcactaagccgttaccatgtcgccagccagcgcctatcaggggcttctggattgttccagatatattgggcccgaccatgatctgcatcacctctacatacgagtgcctcatatggcctctgctgagtactgtccacccagcttcccccccactgctatgcacccgggaggacgtggaggtggcagaatcccccttgagggtcctggcagaaacaccagatagtttcgaaaagcacattagatccatcttgcaacgttccgtggcaaaccctgcttttcttaaagcctcagaaaaagacatcgctccacctcctgaagagtgcctgcagctactctccagggccactcaagtgttccgggagcaatacatcctgaaacaagatctggcaaaagaggagatccaaagacgggtgaaactgttgtgcgaccagaagaagaagcagctggaggatctgtcatattgcagagaggaacgcaagagcctaagagagatggccgagaggctagctgacaaatacgaggaagccaaggagaaacaggaagatatcatgaaccgtatgaaaaaacttctccacagtttccattctgaactgcccgtgcttagcgattctgagcgtgatatgaagaaagagctccagctcatcccagaccagttaaggcatctgggaaacgccattaaacaagtcaccatgaagaaagattaccaacaacaaaaaatggaaaaggtcctaagcctgcctaagcctactattattctcagcgcctatcaacgaaaatgcattcagtctatcctgaaagaggaaggtgagcacatccgcgaaatggtgaaacagatcaacgatattcgcaatcatgtcaatttttag

SEQ ID NO: 129522 - DNA, 2226 bp, Artificial Sequence
  derived and/or modified sequence
atggccgccgccgagggccccgtgggcgacggcgagctgtggcagacttggctgcccaatcacgtggtgttcctgaggcttcgcgagggcttaaaaaaccagtcgccgaccgaggctgagaaacctgcatcctctagtttaccatcatccccccccccccagttgctcacccgaaacgtggtattcggactgggaggagagttattcctgtgggatggcgaagactcatccttccttgtggtgcgtctccggggtccctcagggggcggcgaagagcccgcgctaagccaataccagcggctgctttgcattaatccacccttgtttgaaatctaccaggtcctgctctcgccaacgcaacaccatgtggctctcataggcatcaagggactcatggtgttagagctacctaagcggtggggtaagaatagtgagttcgagggaggcaaatcaacagtgaactgctccactactcctgtcgcagaacgctttttcacgtccagtacctctctcacccttaaacatgccgcatggtacccctcagagatactggatccacacgttgtacttcttacctctgacaatgtgatcagaatctacagcctgcgggagccccagactcccaccaatgtgattattctttccgaagccgaggaagaatcactagtgcttaacaaggggcgggcttacacagccagtctaggagagactgcggtcgcattcgattttggtccactggcggccgtgcccaagacattgttcggtcaaaatgggaaggatgaagtggttgcctatcccctgtatatcctgtacgagaatggcgagacttttctcacctacatatctttgcttcactcacctggcaacatcggtaaactgcttgggccactgccaatgcatcccgccgccgaggacaactacggatacgatgcgtgcgccgtcctctgtcttccatgcgtgccaaatatcctggtgatcgccactgaatcggggatgctataccactgtgtggttttggaaggcgaggaagaagatgaccacacttccgagaaaagttgggactctcgcattgacttaatacctagtttgtatgtcttcgagtgtgttgaattagaacttgccctgaaactggcttccggggaggatgatcctttcgattctgacttcagctgtcctgtgaagctccatcgggaccctaagtgcccttcacgatatcactgtacgcacgaagctggcgtgcactcagtaggattgacatggatccataagctccataaattcctcggatctgacgaggaggacaaggatagcttgcaggaattgtctacagaacaaaaatgttttgtagagcatatactgtgcacaaaaccactgccttgccgccagccagcacccatcagaggcttttggatcgtgcccgatatccttggccccaccatgatctgtatcaccagtacctacgaatgcctgatttggcccctgttgtcgactgtgcaccctgcatctcccccactgttatgcaccagggaggacgtggaagtggctgaatcacccctgcgggtcttagcagagactcctgattctttcgaaaaacacattagatctatactccaacggtccgtcgcaaatccggcttttctgaaagctagcgaaaaggacatcgcaccccctcctgaagagtgcctgcaacttttgagtcgggccacccaggttttccgcgaacaatatatcctaaagcaggatctggcgaaggaagaaatacagcgtcgcgtaaagttgctgtgtgatcagaagaagaagcagttggaagatctgagctattgccgcgaagagagaaagagtttgcgcgaaatggctgagaggctcgctgataaatatgaagaagctaaggaaaagcaagaagacataatgaatcggatgaaaaaacttttgcacagtttccacagtgagcttcccgtgctttcagactccgagcgcgacatgaagaaagaactgcaacttatccccgatcagctgcggcacttgggaaacgcaattaaacaggtcactatgaagaaagactatcagcaacaaaagatggaaaaagtgctctccctgcccaaaccaactatcattctgtctgcctaccagaggaagtgcatccagtcaattctcaaggaagagggagagcatatacgcgagatggtgaagcagattaacgacatccggaatcatgtgaacttttag

SEQ ID NO: 129523 - DNA, 2436 bp, Artificial Sequence
  derived and/or modified sequence
aactggagtgaggggagcagttgggccaagatggcggccgccgagggaccggtgggcgacggcgagctgtggcagacctggcttcctaaccacgtcgtgttcttgcggctccgggagggactgaaaaaccagagtccaaccgaagctgagaaaccagcttcttcgtcgttgccttcgtcgccgccgccgcagttgctgacgagaaacgtggtctttggcctcggcggagagcttttcctgtgggacggagaagacagctccttcttagtcgttcgccttcggggccccagcggcggcggcgaagagcccgccctgtcccagtaccagagattgctttgcataaatccacccctgtttgaaatctatcaagtcttgttaagcccaacacaacatcatgtagcacttataggaataaaaggacttatggtattagaattacctaaaagatgggggaagaattctgaatttgaaggtggaaaatcaacagtgaattgtagtaccactccagttgcggagagatttttcaccagttccacctctctgactctaaagcatgctgcatggtatccaagtgaaatcctggatccccacgtagtgctgttaacatcagacaacgtaatcagaatttactcactacgtgagccgcagacacccactaacgtgataatactttcagaagccgaagaggaaagtctagtactcaataaaggaagggcgtataccgcatctctaggagagacagcagttgcatttgactttgggccattggcagcagtcccaaagactctatttggacaaaacggcaaagatgaagtagtggcatacccactgtacatcttatatgaaaatggagagactttcctgacatacatcagtctgttacacagccctggaaatattggaaagctgttgggtccattgcccatgcatcctgcggctgaagataactatggttatgatgcgtgtgctgtactctgcttaccctgtgtccccaatatcttagtgatcgctactgaatcaggaatgctgtatcactgtgtcgtgctagaaggggaagaagaagatgaccacacgtcagaaaagtcctgggattccaggattgacctcattccttctctgtatgtgtttgaatgtgttgagttggagcttgctttgaaactggcatctggagaggatgacccttttgattctgacttttcttgtccagtcaaacttcatagagatcccaagtgtccttcaagatatcactgtactcatgaagctggtgtacatagtgttgggctaacttggattcataaacttcacaaatttcttggatcagatgaagaagataaggatagtttacaggaactctctacagaacagaaatgctttgttgaacacatcctttgtacgaagccattgccctgcaggcagccagctccaattcgaggattttggattgtacctgacattctgggacccacgatgatctgcatcaccagtacctatgaatgcctcatatggccgttattaagtacagtccatccagcgtctcctcccctgctttgtactcgagaagatgttgaagtggcagagtctcccctccgtgttctggctgaaaccccagattcctttgaaaagcatattagaagcattttgcaacgtagtgttgccaatccagcatttttgaaagcttctgaaaaggacatagcccctcctcctgaagaatgccttcagctcctcagcagagccacccaggtgttcagagagcagtacattctcaaacaggacttggcaaaggaggagattcagcggagggtcaaattattatgtgaccaaaaaaagaaacaactagaagatctcagttattgtcgagaagagaggaaaagtctgcgggaaatggctgagcgtttagctgacaaatatgaggaagctaaagaaaaacaagaggatatcatgaacaggatgaaaaaactacttcacagttttcactctgagctcccagttctctctgatagtgagcgagacatgaagaaagaattacagctgatacctgatcaacttcgacatttgggcaatgccatcaaacaggttactatgaaaaaggattatcaacagcaaaagatggagaaggtgttgagtcttccaaaacccaccattattctcagtgcctaccagcgaaagtgcattcagtccatcctgaaagaggagggtgaacatataagggaaatggtgaagcaaatcaatgatatccgcaatcatgtaaacttctgacaccaccaggagctgactcacacctgaactgaacaccattgaaggcttaaacccatattgtaaaacaggtagaattatctaatttataaaaaggtgttttgatgacctttggtgtggttcatctttttaaatatgttgttttataataattgagtaaatgcttttatttaaaatttggaa

SEQ ID NO: 129524 - DNA, 2916 bp, Artificial Sequence
  derived and/or modified sequence
acagacccctgggaggtgtactttccgggtgcagaccgcgaatggatcgcagcgtattctgggaagtgttgttttatcgaccggccccacgtggagacagatttaggcatccaagcgaaatgcgtgaggccagcccgacctgcactgagggaggtaagtcttgagggaaagttctggatgcctgggtttacccagatggaggtgtccaataggcaattagatacacaagtctcaggctctccccaggtgctagatttccagcagcaccaccattatgttgacttctcgtcccgcccccttgggcttcagaaataatggtgattggctttcccttggtgacgcccctgcttggtgggctggcctcgccttcgccccccgacctggcacgagcctctcgagcttccgggccgtctgctcggtgattggccgaaacagtgagtggacggccgcggattggctgtgctcagcggcgggctgagcaactggagtgaggggagcagttgggccaagatggcggccgccgagggaccggtgggcgacggcgagctgtggcagacctggcttcctaaccacgtcgtgttcttgcggctccgggagggactgaaaaaccagagtccaaccgaagctgagaaaccagcttcttcgtcgttgccttcgtcgccgccgccgcagttgctgacgagaaacgtggtctttggcctcggcggagagcttttcctgtgggacggagaagacagctccttcttagtcgttcgccttcggggccccagcggcggcggcgaagagcccgccctgtcccagtaccagagattgctttgcataaatccacccctgtttgaaatctatcaagtcttgttaagcccaacacaacatcatgtagcacttataggaataaaaggacttatggtattagaattacctaaaagatgggggaagaattctgaatttgaaggtggaaaatcaacagtgaattgtagtaccactccagttgcggagagatttttcaccagttccacctctctgactctaaagcatgctgcatggtatccaagtgaaatcctggatccccacgtagtgctgttaacatcagacaacgtaatcagaatttactcactacgtgagccgcagacacccactaacgtgataatactttcagaagccgaagaggaaagtctagtactcaataaaggaagggcgtataccgcatctctaggagagacagcagttgcatttgactttgggccattggcagcagtcccaaagactctatttggacaaaacggcaaagatgaagtagtggcatacccactgtacatcttatatgaaaatggagagactttcctgacatacatcagtctgttacacagccctggaaatattggaaagctgttgggtccattgcccatgcatcctgcggctgaagataactatggttatgatgcgtgtgctgtactctgcttaccctgtgtccccaatatcttagtgatcgctactgaatcaggaatgctgtatcactgtgtcgtgctagaaggggaagaagaagatgaccacacgtcagaaaagtcctgggattccaggattgacctcattccttctctgtatgtgtttgaatgtgttgagttggagcttgctttgaaactggcatctggagaggatgacccttttgattctgacttttcttgtccagtcaaacttcatagagatcccaagtgtccttcaagatatcactgtactcatgaagctggtgtacatagtgttgggctaacttggattcataaacttcacaaatttcttggatcagatgaagaagataaggatagtttacaggaactctctacagaacagaaatgctttgttgaacacatcctttgtacgaagccattgccctgcaggcagccagctccaattcgaggattttggattgtacctgacattctgggacccacgatgatctgcatcaccagtacctatgaatgcctcatatggccgttattaagtacagtccatccagcgtctcctcccctgctttgtactcgagaagatgttgaagtggcagagtctcccctccgtgttctggctgaaaccccagattcctttgaaaagcatattagaagcattttgcaacgtagtgttgccaatccagcatttttgaaagcttctgaaaaggacatagcccctcctcctgaagaatgccttcagctcctcagcagagccacccaggtgttcagagagcagtacattctcaaacaggacttggcaaaggaggagattcagcggagggtcaaattattatgtgaccaaaaaaagaaacaactagaagatctcagttattgtcgagaagagaggaaaagtctgcgggaaatggctgagcgtttagctgacaaatatgaggaagctaaagaaaaacaagaggatatcatgaacaggatgaaaaaactacttcacagttttcactctgagctcccagttctctctgatagtgagcgagacatgaagaaagaattacagctgatacctgatcaacttcgacatttgggcaatgccatcaaacaggttactatgaaaaaggattatcaacagcaaaagatggagaaggtgttgagtcttccaaaacccaccattattctcagtgcctaccagcgaaagtgcattcagtccatcctgaaagaggagggtgaacatataagggaaatggtgaagcaaatcaatgatatccgcaatcatgtaaacttctgacaccaccaggagctgactcacacctgaactgaacaccattgaaggcttaaacccatattgtaaaacaggtagaattatctaatttataaaaaggtgttttgatgacctttggtgtggttcatctttttaaatatgttgttttataataattgagtaaatgcttttatttaaaatttggaa

SEQ ID NO: 129525 - DNA, 2226 bp, Artificial Sequence
  derived and/or modified sequence
atggctgccgcagagggaccggtaggagacggtgaactgtggcagacctggttacccaaccatgtggtttttttgcggcttcgcgagggcctgaagaaccagagccccaccgaagcagaaaagcccgcaagtagcagtttaccaagttcccctcccccacagctgctcaccagaaatgtggtatttggactaggcggtgagctgttcctctgggatggagaagactccagctttctagtggtcaggctgagaggcccttcaggcggtggcgaggaaccagctctgtctcaataccagcgcctgctgtgcattaacccacccctatttgaaatataccaggttctcctctcaccaacccagcaccacgtcgccctgatcggcattaaagggctgatggttctggaacttcctaagcgatggggtaaaaacagcgaatttgagggcggtaagtcaacagtgaattgtagcacaaccccagttgcagaacgatttttcacatcatccacatctctcaccctgaaacatgccgcttggtatccctctgaaattctggatccccatgttgtcctgcttacatctgataatgtgatccgcatctacagcctcagagagccgcaaactcctacaaacgtgattatcctgagcgaggctgaggaggagagcctggttctgaataaagggagagcttataccgcatccttgggagaaactgctgttgcttttgactttgggccacttgctgcagtacccaaaacactgttcggtcaaaacggaaaagacgaagtggtggcctatccgctctacatcctctacgagaatggcgaaaccttcctgacatatattagcctgctccattccccaggtaacatagggaagctgctgggccctctgcctatgcacccggcagccgaagataactatgggtacgacgcctgtgcagtgctgtgcctcccatgcgtgcctaatattctggtaatcgccaccgagagcggtatgctgtaccactgtgtggttctagaaggcgaagaagaggacgatcacaccagcgagaagtcgtgggattcgcgcatagacttaatcccatccttgtacgtgtttgaatgcgtggagctggaactcgccctcaagttggccagcggtgaggatgatcctttcgactcagactttagctgtccagtaaagttgcaccgcgaccctaaatgcccttcccgctatcattgtacccatgaggcaggggttcacagcgtaggactgacgtggattcacaagttgcacaagtttctgggctccgatgaagaggacaaagactcactgcaagaactgagcactgaacaaaagtgcttcgtggaacatattctctgcaccaaacccctcccttgccggcagcccgctcccatccggggattttggatagtcccagatattctaggaccaacgatgatctgcatcacctctacctacgagtgtcttatatggcccctattgtccaccgtccaccccgcatcacctcctcttctgtgcacacgcgaagacgtggaagttgcggagtctcccctccgagtcctcgccgagacaccggattcgtttgaaaagcatattcgttccatcctgcaaagaagcgttgctaatcctgcctttctgaaggcatccgagaaggatattgcaccccctcccgaggaatgtttacagcttttgtcacgcgctactcaggtcttcagagagcagtatatccttaagcaggatctggccaaagaagaaatccagcggcgagtgaagcttctctgcgatcagaagaagaaacagctcgaggatttgagctactgtcgggaagagcgcaaatcactcagggaaatggcggaacgcttggctgacaagtacgaggaagccaaggaaaagcaagaagacatcatgaatcgcatgaaaaaactgcttcactcatttcattcggagctcccagtgcttagcgattccgagcgcgacatgaagaaagagctccaactgatcccggatcagctgcgacatttggggaatgcaattaaacaggtgacaatgaaaaaggactaccagcagcagaaaatggaaaaagtgctgagtctgcctaagccgacgatcattttatcggcgtaccagaggaaatgtatccagtctatcttgaaggaggaaggagaacatattcgcgagatggttaagcagatcaatgacattcgcaaccatgtcaatttctag

SEQ ID NO: 129526 - DNA, 2226 bp, Artificial Sequence
  derived and/or modified sequence
atggccgctgctgaaggcccagtgggagatggtgagttatggcagacctggttacccaaccacgtagtttttctacgcttaagggaaggcctgaagaatcagtcccccactgaggctgagaagccagcttcctcctcgcttcctagcagtccaccaccccagcttctcacccggaacgtcgtatttggtctcggaggagaattgtttttatgggacggcgaagattcttcattcctcgtagtgagactgcggggaccctccggcggaggggaagagccagccctatcacagtaccaacgtctgttatgcatcaatcccccactatttgagatatatcaggtcctcctcagtccaacgcagcaccatgtggctctgattgggatcaagggcctcatggtgctggagttacccaagaggtgggggaagaacagcgaattcgagggaggtaaatctacagtgaactgcagcactacccccgttgccgaacgcttttttacttcatcaaccagcctcactctgaagcatgcagcttggtacccatcagagatcctggaccctcacgtggtgctgctgacctcggacaacgtgattcgaatttatagcttacgggagccgcagacaccaacaaacgtcattatcctgtctgaggctgaagaggaatcattggtcttgaacaaaggacgggcatacacggcaagcctcggtgagactgctgttgcgtttgatttcggacctctcgccgctgtacctaaaacgctttttgggcaaaatggaaaagacgaggtggtggcatatccactgtatatcctttatgagaatggagagacatttctgacttacatcagtctcctgcactcaccgggaaacatcgggaaactgcttgggcctttgccgatgcacccagcagccgaagacaactacgggtacgacgcctgtgcggtcctatgtcttccatgtgtgccaaacatcctggtcatcgctacagaatcaggcatgctctaccattgtgtggtactcgagggtgaagaggaggatgaccacacgagcgagaagagttgggatagtcggatcgatctgataccaagcctctacgtgttcgagtgcgtggaactcgagctggcacttaagcttgctagtggggaagacgacccctttgattctgatttttcttgtcccgtgaagcttcacagagatcctaaatgcccaagccggtaccattgtactcacgaagccggtgtgcatagtgttgggctcacctggatccacaaactccataaattcctcggatccgatgaggaagataaggactccctccaggagctaagcacagaacagaagtgcttcgtagaacatattctgtgtacgaagccactaccttgtcgccagcctgctcccattaggggtttctggatcgtccccgatatattaggtccaacaatgatctgcattacaagcacatatgagtgcctgatttggccacttctgtcaacagtgcaccccgcttccccgccactgctttgcactagggaggatgtagaggtggccgagtctccccttcgggtgctggcagagaccccagattccttcgagaagcacattcgcagtattctgcaacgatctgtagcaaatccagcttttctgaaggcatccgaaaaagatatagccccacctccggaggagtgtctgcagctgctaagccgagctacacaggtcttcagagaacagtatattctgaagcaggaccttgctaaggaggagatacagcgaagggtgaagctcctgtgtgaccagaagaagaagcagctggaggacctgtcctactgtcgggaagagaggaagagcctgagggagatggccgaacgtctggccgacaaatatgaagaggctaaagagaagcaggaagatatcatgaatagaatgaaaaaacttttacactcttttcatagtgagctgcctgtgttgagtgactccgaaagggacatgaagaaagagttgcagttgattccagaccagctgaggcacctggggaatgcaatcaaacaggttacaatgaagaaagactaccaacagcagaaaatggaaaaggttctctccctgccgaaacctaccattattctcagcgcctatcagcgcaaatgcatccagtccattctgaaggaggagggcgaacatatccgggaaatggtcaagcagattaacgatatcagaaatcacgttaacttctag

SEQ ID NO: 129527 - DNA, 2226 bp, Artificial Sequence
  derived and/or modified sequence
atggccgccgccgagggccccgtgggcgacggcgagctgtggcagacctggctgcccaaccacgtggtgttcctgagactgagagagggcctgaagaaccagagccccaccgaggccgagaagcccgccagcagcagcctgcccagcagcccccccccccagctgctgaccagaaacgtggtgttcggcctgggcggcgagctgttcctgtgggacggcgaggacagcagcttcctggtggtgagactgagaggccccagcggcggcggcgaggagcccgccctgagccagtaccagagactgctgtgcatcaacccccccctgttcgagatctaccaggtgctgctgagccccacccagcaccacgtggccctgatcggcatcaagggcctgatggtgctggagctgcccaagagatggggcaagaacagcgagttcgagggcggcaagagcaccgtgaactgcagcaccacccccgtggccgagagattcttcaccagcagcaccagcctgaccctgaagcacgccgcctggtaccccagcgagatcctggacccccacgtggtgctgctgaccagcgacaacgtgatcagaatctacagcctgagagagccccagacccccaccaacgtgatcatcctgagcgaggccgaggaggagagcctggtgctgaacaagggcagagcctacaccgccagcctgggcgagaccgccgtggccttcgacttcggccccctggccgccgtgcccaagaccctgttcggccagaacggcaaggacgaggtggtggcctaccccctgtacatcctgtacgagaacggcgagaccttcctgacctacatcagcctgctgcacagccccggcaacatcggcaagctgctgggccccctgcccatgcaccccgccgccgaggacaactacggctacgacgcctgcgccgtgctgtgcctgccctgcgtgcccaacatcctggtgatcgccaccgagagcggcatgctgtaccactgcgtggtgctggagggcgaggaggaggacgaccacaccagcgagaagagctgggacagcagaatcgacctgatccccagcctgtacgtgttcgagtgcgtggagctggagctggccctgaagctggccagcggcgaggacgaccccttcgacagcgacttcagctgccccgtgaagctgcacagagaccccaagtgccccagcagataccactgcacccacgaggccggcgtgcacagcgtgggcctgacctggatccacaagctgcacaagttcctgggcagcgacgaggaggacaaggacagcctgcaggagctgagcaccgagcagaagtgcttcgtggagcacatcctgtgcaccaagcccctgccctgcagacagcccgcccccatcagaggcttctggatcgtgcccgacatcctgggccccaccatgatctgcatcaccagcacctacgagtgcctgatctggcccctgctgagcaccgtgcaccccgccagcccccccctgctgtgcaccagagaggacgtggaggtggccgagagccccctgagagtgctggccgagacccccgacagcttcgagaagcacatcagaagcatcctgcagagaagcgtggccaaccccgccttcctgaaggccagcgagaaggacatcgcccccccccccgaggagtgcctgcagctgctgagcagagccacccaggtgttcagagagcagtacatcctgaagcaggacctggccaaggaggagatccagagaagagtgaagctgctgtgcgaccagaagaagaagcagctggaggacctgagctactgcagagaggagagaaagagcctgagagagatggccgagagactggccgacaagtacgaggaggccaaggagaagcaggaggacatcatgaacagaatgaagaagctgctgcacagcttccacagcgagctgcccgtgctgagcgacagcgagagagacatgaagaaggagctgcagctgatccccgaccagctgagacacctgggcaacgccatcaagcaggtgaccatgaagaaggactaccagcagcagaagatggagaaggtgctgagcctgcccaagcccaccatcatcctgagcgcctaccagagaaagtgcatccagagcatcctgaaggaggagggcgagcacatcagagagatggtgaagcagatcaacgacatcagaaaccacgtgaacttctag

SEQ ID NO: 129528 - protein, 856 aa, Artificial Sequence
  derived and/or modified sequence
MKPRPAGFVDNKLKQRVIQYLTSNKCGKYVDIGVLASDLQRVYSIDYGRRKRNAFRIQVEKVFSIISSEKELKNLTELEDEHLAKRARQGEEDNEYTESYSDDDSSMEDYPDPQSANHMNSSLLSLYRKGNPDSVSNTPEMEQRETTSSTPRISSKTGSIPLKTPAKDSEGGWFIDKTPSVKKDSFFLDLSCEKSNPKKPITEIQDSKDSSLLESDMKRKGKLKNKGSKRKKEDLQEVDGEIEAVLQKKAKARGLEFQISNVKFEDVGGNDMTLKEVCKMLIHMRHPEVYHHLGVVPPRGVLLHGPPGCGKTLLAHAIAGELDLPILKVAAPEIVSGVSGESEQKLRELFEQAVSNAPCIIFIDEIDAITPKREVASKDMERRIVAQLLTCMDDLNNVAATARVLVIGATNRPDSLDPALRRAGRFDREICLGIPDEASRERILQTLCRKLRLPQAFDFCHLAHLTPGFVGADLMALCREAAMCAVNRVLMKLQEQQKKNPEMEDLPSKGVQEERLGTEPTSETQDELQRLLGLLRDQDPLSEEQMQGLCIELNDFIVALSSVQPSAKREGFVTVPNVTWADIGALEDIREELTMAILAPVRNPDQFKALGLVTPAGVLLAGPPGCGKTLLAKAVANESGLNFISVKGPELLNMYVGESERAVRQVFQRAKNSAPCVIFFDEVDALCPRRSDRETGASVRVVNQLLTEMDGLEARQQVFIMAATNRPDIIDPAILRPGRLDKTLFVGLPPPADRLAILKTITKNGTKPPLDADVNLEAIAGDLRCDCYTGADLSALVREASICALRQEMARQKSGNEKGELKVSHKHFEEAFKKVRSSISKKDQIMYERLQESLSR

SEQ ID NO: 129529 - protein, 589 aa, Artificial Sequence
  derived and/or modified sequence
MEDYPDPQSANHMNSSLLSLYRKGNPDSVSNTPEMEQRETTSSTPRISSKTGSIPLKTPAKDSEGGWFIDKTPSVKKDSFFLDLSCEKSNPKKPITEIQDSKDSSLLESDMKRKGKLKNKGSKRKKEDLQEVDGEIEAVLQKKAKARGLEFQISNVKFEDVGGNDMTLKEVCKMLIHMRHPEVYHHLGVVPPRGVLLHGPPGCGKTLLAHAIAGELDLPILKVAAPEIVSGVSGESEQKLRELFEQAVSNAPCIIFIDEIDAITPKREVASKDMERRIVAQLLTCMDDLNNVAATARVLVIGATNRPDSLDPALRRAGRFDREICLGIPDEASRERILQTLCRKLRLPQAFDFCHLAHLTPGFVGADLMALCREAAMCAVNRVLMKLQEQQKKNPEMEDLPSKGVQEERLGTEPTSETQDELQRLLGLLRDQDPLSEEQMQGLCIELNDFIVALSSVQPSAKREGFVTVPNVTWADIGALEDIREELTMAILAPVRNPDQFKALGLVTPAGVLLAGPPGCGKTLLAKAVANESGLNFISVKGPELLNMYVGESERAVRQVFQRAKNSAPCVIFFDEVDALCPRRSDREI

SEQ ID NO: 129530 - protein, 750 aa, Artificial Sequence
  derived and/or modified sequence
MEDYPDPQSANHMNSSLLSLYRKGNPDSVSNTPEMEQRETTSSTPRISSKTGSIPLKTPAKDSEGGWFIDKTPSVKKDSFFLDLSCEKSNPKKPITEIQDSKDSSLLESDMKRKGKLKNKGSKRKKEDLQEVDGEIEAVLQKKAKARGLEFQISNVKFEDVGGNDMTLKEVCKMLIHMRHPEVYHHLGVVPPRGVLLHGPPGCGKTLLAHAIAGELDLPILKVAAPEIVSGVSGESEQKLRELFEQAVSNAPCIIFIDEIDAITPKREVASKDMERRIVAQLLTCMDDLNNVAATARVLVIGATNRPDSLDPALRRAGRFDREICLGIPDEASRERILQTLCRKLRLPQAFDFCHLAHLTPGFVGADLMALCREAAMCAVNRVLMKLQEQQKKNPEMEDLPSKGVQEERLGTEPTSETQDELQRLLGLLRDQDPLSEEQMQGLCIELNDFIVALSSVQPSAKREGFVTVPNVTWADIGALEDIREELTMAILAPVRNPDQFKALGLVTPAGVLLAGPPGCGKTLLAKAVANESGLNFISVKGPELLNMYVGESERAVRQVFQRAKNSAPCVIFFDEVDALCPRRSDRETGASVRVVNQLLTEMDGLEARQQVFIMAATNRPDIIDPAILRPGRLDKTLFVGLPPPADRLAILKTITKNGTKPPLDADVNLEAIAGDLRCDCYTGADLSALVREASICALRQEMARQKSGNEKGELKVSHKHFEEAFKKVRSSISKKDQIMYERLQESLSR

SEQ ID NO: 129531 - DNA, 2571 bp, Artificial Sequence
  derived and/or modified sequence
atgaagccccgcccagccggttttgtggacaacaagctcaaacagagagtaatccagtatttgacctccaacaaatgcggcaagtatgtggatatcggcgtcctggctagtgacctgcaaagggtttatagtatagattacgggaggcgcaagagaaacgcattccgtatccaggttgagaaagtgttttctatcatctcctcagaaaaggagcttaagaacctgactgaattggaggacgaacacttggctaagcgggcccggcagggcgaggaggacaacgaatacaccgaatcctattccgatgacgactctagcatggaggactatcccgatccccagtctgccaatcacatgaacagctctctgctttcgctgtatcgtaaaggcaaccccgattctgttagcaacactcctgaaatggagcagcgtgagaccacgtctagcactccgagaatctctagcaagacgggttcaatacccctcaagacacccgcgaaggacagtgaggggggatggttcattgataaaacgccgtcagtcaaaaaagattccttctttcttgacttgtcttgtgaaaagtccaaccctaaaaagcccattaccgagatccaagactccaaggattctagccttctggaatccgatatgaaacggaaaggaaaacttaaaaataagggctcaaaacgcaagaaagaggaccttcaggaggttgacggggagatcgaggccgtcctgcagaagaaagcgaaagctcgaggcctcgagttccagatctccaatgtgaaatttgaggacgtaggcgggaatgacatgacgctgaaggaagtgtgcaaaatgctgatccatatgcggcaccccgaggtctaccaccacctgggggtcgtcccacctcgaggggtcctcctacatggcccaccagggtgcggaaagacattgttggctcacgccatagctggggagctcgatctcccgatcctgaaagtcgcggctccggagatcgtgtctggggtgtcaggcgaatctgaacagaagctccgagaactttttgagcaagccgtttcaaatgcaccatgcattatcttcatcgacgaaatcgatgcgattacccccaaacgagaagttgcctccaaggacatggagagacgcattgtggctcagctgctcacctgtatggatgacctgaacaacgtagccgctacagcacgagtattggtcataggtgctacgaacaggccggatagtctggacccagcactccgccgagctgggaggttcgatcgggagatttgcctggggatcccggacgaagcctcgcgggaaagaatcctgcaaaccctttgtagaaagctgcggctgccccaggctttcgacttttgccacctggcccacctcacccctggattcgtgggagcagatctcatggctctgtgtcgggaggccgctatgtgtgctgttaacagagtgctgatgaagcttcaagagcagcaaaaaaaaaatcctgagatggaagatctgccctcgaagggtgtccaagaagagcgattgggtactgaacctacaagcgagactcaggatgagttgcagcggctgctgggactgctgcgggatcaggacccgctgtccgaagagcagatgcaggggctgtgcattgagctgaacgattttattgtcgccctgagctccgttcagcctagcgccaagcgcgaaggttttgttacagttccaaatgtgacctgggccgacattggcgccctggaggacatcagggaggagttgactatggcaatcctggctcctgtgcgcaatcctgaccagtttaaggccctggggctggtcacgccagccggggtactgttggccggtcctcccggatgcggaaagaccctgctcgccaaggcagtggcgaacgagagcggtttgaacttcattagcgtgaaaggaccagagctgctgaacatgtacgtcggggagtctgaaagggccgtgcgccaagttttccagcgggcgaaaaacagtgccccctgcgtcatcttctttgatgaggtggatgccttatgtccgcgccgcagcgatagggagacaggggccagcgttcgcgtggtcaaccaactactcacagagatggacggactggaggcaagacagcaggtgtttatcatggctgcgacaaatcgtcccgacatcatagaccccgcaatcctgagacctggacgcctagataaaactttgtttgttggactgcctccccccgctgatcgcctagcgattttaaaaaccattacaaaaaacggcactaaaccccccctggatgctgatgtgaatctcgaggccattgccggggacctacgttgcgattgctataccggcgcggacctttccgctctggtccgcgaggcaagcatctgtgcgctccggcaggagatggcccgacagaaatctgggaacgaaaaaggagagcttaaggtctcacacaagcacttcgaggaggcctttaaaaaggtgcggtcttccatttcaaaaaaagaccagattatgtacgagcgtcttcaggagagtttgtctcgatag

SEQ ID NO: 129532 - DNA, 1770 bp, Artificial Sequence
  derived and/or modified sequence
atggaagattatcccgacccccagagcgctaaccacatgaatagctcccttctcagcttatatagaaaaggaaaccccgactctgtgagcaatacaccggaaatggagcagcgagagacaacatcctccaccccaagaatatcaagtaaaacgggatcaatccccctgaaaacacccgccaaggactccgagggaggatggtttatcgacaagactccctccgtcaaaaaagattcattctttcttgatctctcctgtgagaagtccaaccctaaaaagcccatcaccgagatacaagactccaaggacagctccttattggagagtgacatgaaaagaaaagggaagctaaagaacaaaggtagcaagcggaagaaggaagatcttcaggaggtggacggtgaaatcgaggcagtgctgcaaaagaaggctaaggcccgcggcctcgaatttcagatttcgaacgttaaattcgaggacgttggtggaaacgatatgacactcaaggaggtttgcaagatgctgatccacatgaggcatcctgaagtgtatcatcaccttggcgttgtaccaccccgcggggtgctgcttcacggtccacccggctgtggcaaaacacttctggctcacgcaattgctggtgaactggacctaccaatcttaaaagtcgccgccccagagattgtcagtggagtttccggagagtcagagcagaagctgcgcgagctcttcgaacaagctgtgagcaatgcgccttgcatcatctttatagatgagatcgatgcaatcaccccgaagcgtgaggtcgccagcaaagacatggaacgtaggattgtggctcaactgctcacctgcatggacgacttgaataatgtggccgctacagcccgcgtgttagtgataggagctacgaacaggccagactcattagatcccgcactgaggcgcgctggtcgcttcgatcgggaaatttgcttaggaatacccgacgaggcgagccgcgaacgtattctccaaaccctgtgtcggaaattgagactgccgcaggcttttgatttctgccatctcgcacacctaacccccggcttcgtgggcgcggacctgatggcactctgtcgcgaggccgccatgtgcgctgtaaatagagtgctgatgaagctccaggaacagcaaaaaaaaaaccccgagatggaagacctgccctcgaaaggtgttcaagaggagcgcctgggcacagagccaactagcgagacccaggacgaactccagagactcctgggtttgcttcgtgatcaggacccactgagcgaggaacaaatgcagggcctatgcatcgaactcaacgactttatagtggctctctccagtgtgcagccctctgccaagagagaggggtttgtgacggtgcctaatgtcacttgggccgacatcggcgcattggaggatatccgggaggaactcacgatggcgatactcgcacccgtccggaacccagaccagtttaaggctttagggcttgtgactccagccggcgtgctccttgccggccctcctggctgcggtaagacattactcgccaaggccgtcgccaacgagtctggactgaatttcatcagtgtgaaggggcccgagctgctgaacatgtacgtgggggaatccgaaagagctgtcaggcaggtatttcagcgagccaaaaattcagcaccttgtgttatcttttttgacgaggtcgatgctctgtgccccaggagatctgatagggaaatctag

SEQ ID NO: 129533 - DNA, 2253 bp, Artificial Sequence
  derived and/or modified sequence
atggaagactaccccgatcctcagtccgctaatcatatgaattcctcattactaagtctttaccgcaaaggtaacccagacagcgtgtccaacacacctgaaatggagcagcgagagacaacatcatcaactccccgcatttcatctaagaccggtagtattcctttaaaaaccccagcaaaggattcagaggggggctggttcatcgacaaaactccctcagtcaagaaggatagcttctttctggacctgtcctgcgagaagagtaaccccaagaaacccataactgaaatccaggattcaaaggactcttcccttctggagtccgacatgaagagaaaggggaaactgaaaaataaaggcagtaagcgcaagaaagaggatcttcaggaggtggatggtgaaattgaggcagtacttcaaaagaaagcaaaagccagaggtctcgaatttcagatcagtaatgttaagttcgaagatgtgggcggaaatgatatgacccttaaagaggtgtgtaaaatgcttatccatatgagacaccctgaagtttaccaccacctgggcgttgttccaccgcgaggagtgttattacatggtccccctggatgcggcaaaaccctcctcgcacacgccattgcaggagagctcgatctgccgatactgaaagtagccgcccccgaaattgtctctggtgtcagtggggagtctgagcagaagctcagagaactctttgagcaggccgtgtctaatgcgccctgtatcatattcatcgacgagattgatgccataactcccaagagggaagtcgcctcaaaggacatggaacgccgaattgtggcgcaactccttacctgtatggacgatcttaataatgtcgctgcaaccgcaagggtacttgtcattggagcaaccaaccgcccagattctctggatccagcgctgagaagggctgggcgcttcgaccgcgagatctgccttggcatccccgacgaagccagccgcgagagaatattacagacactgtgtcggaaactacgcttaccccaggcctttgatttttgccacctcgctcacctgacacctgggtttgtgggagctgatctgatggctttatgtcgagaggccgctatgtgcgccgtaaatcgcgtgctcatgaagctccaagaacagcaaaagaaaaatcctgaaatggaggacttgccaagcaaaggggtgcaggaagaaagattgggtacagagccgacgtctgagacccaggacgaactgcagcggctgttgggattactgcgcgaccaggatcccctgagtgaggaacagatgcagggcttgtgcattgaactgaatgatttcatagtagctctaagctccgtgcaaccatctgccaagcgtgagggcttcgtgactgtccctaacgtgacctgggcagacattggggccctggaggatatccgggaagagctcacgatggccattttagctcccgtacgcaatccagaccaattcaaagctttgggactcgtaacgcccgctggtgtcttactcgctggccctcctggctgtggaaaaactctgctggcgaaggccgttgcaaatgagtcaggcctcaactttatctccgtgaagggccctgaactcctgaatatgtacgttggcgaatccgaaagagcagtgagacaagtgttccaacgtgccaagaactcagccccttgcgtgatcttcttcgacgaggtggatgccctttgtccaaggagatccgacagggagactggagcttcggtgcgcgtggtaaaccagctgctcactgaaatggatggtcttgaagcccgacagcaagtgtttatcatggcagcaaccaacaggccagatataattgatcccgcaattctccgcccagggcgccttgacaagacgctgtttgtggggcttccaccacctgcggacagactggccatactcaagaccatcacaaagaacgggaccaagcccccgctagatgccgacgttaacctggaggccatcgctggcgatctcaggtgcgattgttatactggcgctgacctgtcagccttagtgcgggaggcatccatctgtgccctccgccaggagatggcccgccagaagagcggaaacgaaaaaggggagctcaaagtgagtcataagcactttgaggaagcctttaagaaagtgaggtcatccatttctaagaaggaccaaattatgtatgagcgtctccaggagagtctgtctcggtag

SEQ ID NO: 129534 - DNA, 2571 bp, Artificial Sequence
  derived and/or modified sequence
atgaagcccaggcctgctggctttgtggacaacaagctgaagcagagggtcatccagtacctgaccagcaacaagtgtgggaagtatgtggacatcggcgtgctggccagtgacctgcagagggtgtacagcattgattatggaagaaggaagagaaatgccttccgcatccaggtggagaaggtgttcagcatcatcagcagcgagaaggagctgaagaacctgacagagctggaggatgagcacctggccaagagggcccggcagggcgaggaggacaatgagtacacagagagctacagtgatgatgacagctccatggaggactacccagacccccagagcgccaaccacatgaacagcagcctgctgagcctgtacagaaaaggaaatccagacagcgtgagcaacaccccagagatggagcagcgggagaccaccagcagcaccccccgcatcagcagcaagacaggcagcatccccctgaagaccccagccaaggacagcgagggcggctggttcatcgacaagacccccagcgtgaagaaggacagcttcttcctggacctgagctgtgagaagagcaaccccaagaagcccatcacagagatccaggacagcaaggacagcagcctgctggagagtgacatgaagaggaagggcaagctgaagaacaagggcagcaagaggaagaaggaggacctgcaggaggtggatggagaaattgaggccgtgctgcagaagaaggccaaggcccggggcctggagttccagatcagcaatgtgaagtttgaagatgtgggcggcaatgacatgaccctgaaggaggtgtgcaagatgctgatccacatgaggcaccctgaggtgtaccaccacctgggcgtggtgcccccccggggcgtgctgctgcacggccccccaggctgcggcaagaccctgctggcccacgccatcgccggggagctggacctgcccatcctgaaggtggccgcccctgagatcgtgtctggagtgtctggagagagcgagcagaagctgcgggagctgtttgagcaggccgtgtccaatgccccctgcatcatcttcattgatgaaattgatgccatcacccccaagcgggaggtggccagcaaggacatggagcggcgcatcgtggcccagctgctgacctgcatggatgacctgaacaacgtggccgccacagcccgggtgctggtgattggagccaccaacagaccagacagcctggaccctgccctgcggcgggccggccgctttgaccgggagatctgcctgggcatcccagatgaggccagccgggagcgcatcctgcagaccctgtgcaggaagctgcggctgccccaggcctttgacttctgccacctggcccacctgaccccaggctttgtgggcgctgacctgatggccctgtgccgggaggccgccatgtgtgctgtgaacagagtgctgatgaagctgcaggagcagcagaagaagaaccctgagatggaggacctgcccagcaaaggagtgcaggaggagcggctgggcacagagcccaccagcgagacccaggatgagctgcagaggctgctgggcctgctgcgggaccaggaccccctgtctgaggagcagatgcagggcctgtgcatcgagctgaatgacttcatcgtggccctgagctctgtgcagcccagcgccaagcgggagggctttgtgacagtgcccaacgtgacctgggccgacattggagccctggaggacatccgggaggagctgaccatggccatcctggcccctgtgaggaacccagaccagttcaaggccctgggcctggtgaccccagctggggtgctgctggccggccccccaggctgtgggaagaccctgctggccaaggctgtggccaatgaaagtggcctgaacttcatctctgtgaagggccctgagctgctgaacatgtatgtgggggagagcgagagagctgtgcggcaggtgttccagagggccaagaacagcgccccctgcgtcatcttctttgatgaggtggatgccctgtgccccaggagaagtgaccgggagactggagcctctgtgcgggtggtgaaccagctgctgacagagatggatggcctggaggcccggcagcaggtgttcatcatggccgccaccaacagaccagacatcatcgaccctgccatcctgcggcccggccgcctggacaagaccctgtttgtgggcctgcccccacctgctgaccggctggccatcctgaagaccatcaccaagaatggcaccaagccacccctggatgctgatgtgaacctggaggccatcgccggggacctgcgctgtgactgctacacaggagctgacctgagcgccctggtgcgggaggccagcatctgtgccctgcggcaggagatggcccggcagaagtctggaaatgagaagggggagctgaaggtgagccacaagcactttgaggaggccttcaagaaggtgcgcagcagcatcagcaagaaggaccagatcatgtatgagcggctgcaggagagcctgagcaggtag

SEQ ID NO: 129535 - DNA, 1770 bp, Artificial Sequence
  derived and/or modified sequence
atggaggactacccagacccccagagcgccaaccacatgaacagcagcctgctgagcctgtacagaaaaggaaatccagacagcgtgagcaacaccccagagatggagcagcgggagaccaccagcagcaccccccgcatcagcagcaagacaggcagcatccccctgaagaccccagccaaggacagcgagggcggctggttcatcgacaagacccccagcgtgaagaaggacagcttcttcctggacctgagctgtgagaagagcaaccccaagaagcccatcacagagatccaggacagcaaggacagcagcctgctggagagtgacatgaagaggaagggcaagctgaagaacaagggcagcaagaggaagaaggaggacctgcaggaggtggatggagaaattgaggccgtgctgcagaagaaggccaaggcccggggcctggagttccagatcagcaatgtgaagtttgaagatgtgggcggcaatgacatgaccctgaaggaggtgtgcaagatgctgatccacatgaggcaccctgaggtgtaccaccacctgggcgtggtgcccccccggggcgtgctgctgcacggccccccaggctgcggcaagaccctgctggcccacgccatcgccggggagctggacctgcccatcctgaaggtggccgcccctgagatcgtgtctggagtgtctggagagagcgagcagaagctgcgggagctgtttgagcaggccgtgtccaatgccccctgcatcatcttcattgatgaaattgatgccatcacccccaagcgggaggtggccagcaaggacatggagcggcgcatcgtggcccagctgctgacctgcatggatgacctgaacaacgtggccgccacagcccgggtgctggtgattggagccaccaacagaccagacagcctggaccctgccctgcggcgggccggccgctttgaccgggagatctgcctgggcatcccagatgaggccagccgggagcgcatcctgcagaccctgtgcaggaagctgcggctgccccaggcctttgacttctgccacctggcccacctgaccccaggctttgtgggcgctgacctgatggccctgtgccgggaggccgccatgtgtgctgtgaacagagtgctgatgaagctgcaggagcagcagaagaagaaccctgagatggaggacctgcccagcaaaggagtgcaggaggagcggctgggcacagagcccaccagcgagacccaggatgagctgcagaggctgctgggcctgctgcgggaccaggaccccctgtctgaggagcagatgcagggcctgtgcatcgagctgaatgacttcatcgtggccctgagctctgtgcagcccagcgccaagcgggagggctttgtgacagtgcccaacgtgacctgggccgacattggagccctggaggacatccgggaggagctgaccatggccatcctggcccctgtgaggaacccagaccagttcaaggccctgggcctggtgaccccagctggggtgctgctggccggccccccaggctgtgggaagaccctgctggccaaggctgtggccaatgaaagtggcctgaacttcatctctgtgaagggccctgagctgctgaacatgtatgtgggggagagcgagagagctgtgcggcaggtgttccagagggccaagaacagcgccccctgcgtcatcttctttgatgaggtggatgccctgtgccccaggagaagtgaccgggagatctag

SEQ ID NO: 129536 - DNA, 2253 bp, Artificial Sequence
  derived and/or modified sequence
atggaggactacccagacccccagagcgccaaccacatgaacagcagcctgctgagcctgtacagaaaaggaaatccagacagcgtgagcaacaccccagagatggagcagcgggagaccaccagcagcaccccccgcatcagcagcaagacaggcagcatccccctgaagaccccagccaaggacagcgagggcggctggttcatcgacaagacccccagcgtgaagaaggacagcttcttcctggacctgagctgtgagaagagcaaccccaagaagcccatcacagagatccaggacagcaaggacagcagcctgctggagagtgacatgaagaggaagggcaagctgaagaacaagggcagcaagaggaagaaggaggacctgcaggaggtggatggagaaattgaggccgtgctgcagaagaaggccaaggcccggggcctggagttccagatcagcaatgtgaagtttgaagatgtgggcggcaatgacatgaccctgaaggaggtgtgcaagatgctgatccacatgaggcaccctgaggtgtaccaccacctgggcgtggtgcccccccggggcgtgctgctgcacggccccccaggctgcggcaagaccctgctggcccacgccatcgccggggagctggacctgcccatcctgaaggtggccgcccctgagatcgtgtctggagtgtctggagagagcgagcagaagctgcgggagctgtttgagcaggccgtgtccaatgccccctgcatcatcttcattgatgaaattgatgccatcacccccaagcgggaggtggccagcaaggacatggagcggcgcatcgtggcccagctgctgacctgcatggatgacctgaacaacgtggccgccacagcccgggtgctggtgattggagccaccaacagaccagacagcctggaccctgccctgcggcgggccggccgctttgaccgggagatctgcctgggcatcccagatgaggccagccgggagcgcatcctgcagaccctgtgcaggaagctgcggctgccccaggcctttgacttctgccacctggcccacctgaccccaggctttgtgggcgctgacctgatggccctgtgccgggaggccgccatgtgtgctgtgaacagagtgctgatgaagctgcaggagcagcagaagaagaaccctgagatggaggacctgcccagcaaaggagtgcaggaggagcggctgggcacagagcccaccagcgagacccaggatgagctgcagaggctgctgggcctgctgcgggaccaggaccccctgtctgaggagcagatgcagggcctgtgcatcgagctgaatgacttcatcgtggccctgagctctgtgcagcccagcgccaagcgggagggctttgtgacagtgcccaacgtgacctgggccgacattggagccctggaggacatccgggaggagctgaccatggccatcctggcccctgtgaggaacccagaccagttcaaggccctgggcctggtgaccccagctggggtgctgctggccggccccccaggctgtgggaagaccctgctggccaaggctgtggccaatgaaagtggcctgaacttcatctctgtgaagggccctgagctgctgaacatgtatgtgggggagagcgagagagctgtgcggcaggtgttccagagggccaagaacagcgccccctgcgtcatcttctttgatgaggtggatgccctgtgccccaggagaagtgaccgggagactggagcctctgtgcgggtggtgaaccagctgctgacagagatggatggcctggaggcccggcagcaggtgttcatcatggccgccaccaacagaccagacatcatcgaccctgccatcctgcggcccggccgcctggacaagaccctgtttgtgggcctgcccccacctgctgaccggctggccatcctgaagaccatcaccaagaatggcaccaagccacccctggatgctgatgtgaacctggaggccatcgccggggacctgcgctgtgactgctacacaggagctgacctgagcgccctggtgcgggaggccagcatctgtgccctgcggcaggagatggcccggcagaagtctggaaatgagaagggggagctgaaggtgagccacaagcactttgaggaggccttcaagaaggtgcgcagcagcatcagcaagaaggaccagatcatgtatgagcggctgcaggagagcctgagcaggtag

SEQ ID NO: 129537 - DNA, 2571 bp, Artificial Sequence
  derived and/or modified sequence
atgaagccccggcccgccggcttcgtggacaacaagctgaagcagagggttatccagtatttgacctccaacaagtgtggcaagtacgtagatatcggcgtactcgcgtccgacttacagcgcgtctatagtattgactacgggaggaggaaacggaatgcatttaggatacaggtggaaaaggtcttcagtataatcagttcagaaaaagaactgaagaatctgactgagctcgaggatgagcatcttgcaaaacgggcccgccagggcgaggaggataacgagtacaccgaatcttactcagatgatgatagcagcatggaagattatcctgacccccagtctgccaaccacatgaacagttcactcctcagtttataccggaaggggaacccagactccgtatctaatacccctgagatggagcagagggagaccacctcgtccacgcctcgaatctccagtaagacaggcagcatccctcttaaaacgccggcgaaggacagcgagggcgggtggttcatcgataaaactccctcggtcaaaaaggacagcttcttcctggacttgtcttgtgagaagagtaatcccaaaaaaccaatcacggagatccaagactcaaaggactcatcactgctggagagcgatatgaagagaaaaggcaagctaaaaaacaaaggatccaagagaaagaaggaggacctgcaagaagttgacggcgagatcgaagcagtcctgcagaagaaagccaaagctcgcggtctggaattccagatctcaaatgtgaaatttgaggacgttggtgggaatgacatgaccctcaaggaggtatgcaagatgttgatacacatgaggcacccggaagtgtatcaccatctgggcgtggttcccccgagaggtgttttattgcacggtcctccaggatgcgggaaaacgctgctggcacatgctattgcaggagagctagacttacctatcttgaaagtggcggccccagaaatcgtgtctggcgtttcaggggagtcggaacaaaagctgcgggaactcttcgaacaggccgtctctaatgccccctgcatcatatttattgacgaaattgatgccatcaccccgaaaagggaagtagcaagtaaagatatggagcggagaatcgtcgcacagctccttacctgcatggatgaccttaataatgtagcggccaccgcccgggttctggtcatcggcgctacgaataggccggacagtctggatcccgccctgaggagagctggccgctttgatcgagaaatttgtctcggaatccctgatgaagccagccgcgaacgaatacttcagaccctgtgccgtaaactgcgcctgccacaagcgttcgacttctgtcacctggcccacctgacccctggattcgtcggggccgacctgatggccctgtgccgagaggcagcaatgtgcgcagtgaacagagttctgatgaaactgcaggagcagcagaagaagaatcccgagatggaagacctgcccagcaaaggagtgcaggaagagcgtttgggtacagagccaacttcagagacacaggacgagttgcagcgcttattaggtctgctcagagatcaagatcccttatccgaagaacagatgcagggtctttgcattgagctgaacgacttcatcgtggctctctctagcgttcagcccagtgcaaagcgcgaagggttcgtaaccgtacctaatgtaacctgggccgacattggggccctggaggacatacgtgaggagctgaccatggcaatcctggcccccgtcagaaaccccgaccaattcaaagctttggggctcgtgacgccggctggagtgttgcttgccgggcccccaggctgtggtaagactttattggctaaggccgtagccaatgaatctggcttgaacttcataagtgtgaaaggccctgagctgctgaacatgtatgtgggcgagagcgagcgggccgtgagacaagtctttcagcgggctaaaaattcggcaccctgcgtaatctttttcgacgaggtggatgcgctgtgccctcgccgtagtgaccgggagacgggcgctagcgttagagtggtaaaccagttactcactgaaatggacggccttgaggctcggcagcaggtgtttatcatggctgccaccaaccgcccggatattattgatccagcaatacttcgccccggcaggctcgataaaacactcttcgtcggactgccccctcctgccgacagactagctattctcaagactatcaccaagaatggtactaaaccacccttggatgcagatgtcaacctggaggccatagcgggcgaccttcggtgcgactgttacactggagccgacctttctgctctggtccgggaggcctctatctgtgccttacgccaagaaatggctagacagaaatccggaaacgagaagggagagctgaaggtgagccacaagcattttgaagaggcatttaaaaaggtgagatcatctatcagcaagaaagaccaaatcatgtatgaaaggctgcaggagagtctctctcgatag

SEQ ID NO: 129538 - DNA, 1770 bp, Artificial Sequence
  derived and/or modified sequence
atggaggactaccccgacccccagagcgccaaccacatgaacagctccctcttgtcactgtacaggaagggcaatcccgacagtgtctctaacacacccgagatggagcagcgagagacaacatcctccacaccccgcatcagttccaagacaggatccatccccctgaagacaccagccaaagactcagagggaggctggttcattgacaaaacgccctccgtcaagaaggattcctttttcttggacctctcatgcgagaaaagtaatccaaaaaaacccatcacagagatccaagatagtaaggattctagcctgctggagtccgacatgaagaggaagggcaagttgaaaaacaaaggcagcaagcgaaagaaagaagatctccaagaggttgatggggaaatcgaagccgttctgcaaaagaaagcaaaagccagaggactggagtttcagatatccaacgttaaattcgaagatgtgggggggaatgacatgacgctgaaggaggtctgcaaaatgctgatccatatgcgtcatccagaggtttatcatcatctcggggtggtaccaccccggggcgtgttgcttcatgggccacccgggtgtgggaaaacccttttagcccacgccatcgctggagagctggacttgcctattcttaaagtggccgctcctgagattgttagtggcgtatctggagagtcagaacaaaagttgcgagaactctttgaacaggctgtttcaaatgccccctgcattatcttcatcgatgagatcgatgccattactccaaaacgcgaagtcgcctctaaagatatggaacggaggatcgtcgcccagctgctcacatgcatggatgatctcaataacgtggccgctactgctagggtcctggttattggggctaccaatcgacccgatagtctggacccggctctgcggcgcgcaggacggtttgatagagagatctgcctaggaatcccagatgaggctagccgcgaaagaatcttgcaaactttgtgccggaaactgaggctgcctcaggcgtttgacttttgccacctggctcacctgaccccgggctttgttggcgcggatttgatggctttatgtcgagaagctgcaatgtgcgctgtcaacagggtgctgatgaaactacaggagcagcagaagaagaatccggaaatggaagacttgcctagcaaaggcgtccaggaggagcggttaggaaccgaacctacttccgagacccaggacgagttacagagactgctggggctcttacgtgaccaggaccccctcagcgaagagcagatgcagggtctttgtatagagttaaacgactttattgtcgcactgagtagtgttcagccatctgccaaacgcgaggggttcgtaacggtccccaatgtgacctgggccgatattggggctctggaggatatccgcgaagaactcaccatggctattttggcaccagtgcgtaaccctgaccaattcaaggcactgggcctggttacccctgctggagtacttctcgctggccccccaggctgtgggaaaaccttgctggcaaaggcggtcgcaaacgaatctgggcttaactttatcagcgtcaaagggcccgagcttcttaacatgtacgtgggagagtcagaacgtgctgttaggcaggtcttccagcgggctaaaaacagtgctccatgtgttattttctttgatgaggtagacgcactctgccctcgtcggagcgatcgtgaaatatag

SEQ ID NO: 129539 - DNA, 2253 bp, Artificial Sequence
  derived and/or modified sequence
atggaggactaccccgacccccagagcgccaaccacatgaacagctcactgctgtctctttatcgaaaaggcaaccccgattctgtgtcaaatacccctgagatggagcagcgagagactacctcttccacacccaggatttcctccaagactgggagtatcccattgaaaaccccagcaaaagactctgagggaggctggttcattgataaaactcctagcgtcaaaaaagacagcttctttctggacttgagctgcgagaagagtaatcccaagaaacccataacggagatccaagattccaaggattctagccttttggaaagtgacatgaaacggaaaggaaaactgaaaaacaaggggtctaagcgaaagaaagaagacttgcaggaggtggacggtgaaattgaggccgtccttcagaagaaagccaaagctcgtggacttgagttccagatctctaacgtgaagttcgaagatgttggagggaatgatatgaccctaaaggaagtgtgcaagatgctgatacatatgcggcatcctgaagtctaccaccatctcggagtcgtgccaccacgcggagttttattgcacggaccgccaggctgcgggaaaactttactggcccatgctatcgccggtgaacttgacttacccattcttaaggtcgctgcgcccgagatcgtgagtggagtctccggggaaagtgagcaaaagctgagggagctgttcgagcaggcggtctccaatgccccatgcatcatctttattgatgagatcgatgctatcacccctaagagagaagttgcctctaaggacatggagagacgaattgtcgcacagttactaacgtgcatggacgatctgaataacgtcgctgccactgctcgagtgctggttattggagccaccaatagacccgattctctggatccagctctgcgaagggccggcagattcgatagggaaatctgcctcggcatccccgacgaggctagccgggaaagaatactgcagaccctgtgtcggaagctcaggctgccccaggcatttgacttctgtcatctagcccatctgacgcccggctttgtcggagcagacttaatggcactctgtcgggaagctgcaatgtgtgccgtgaacagggttctgatgaagctccaggagcagcagaaaaagaatcccgagatggaagatctgccgagtaagggggtgcaagaagaacggctgggtacggaaccaacatcggaaactcaagacgagctccagcgacttttgggcttgctgagggaccaggatcccctctcagaagagcagatgcagggactctgtatcgagttgaacgacttcattgtcgctctgtcctcagttcagccttctgctaagcgggaaggcttcgtgactgtgcccaatgtcacttgggctgacattggagccctcgaagacatcagggaggaacttaccatggccattctggcgcctgttcgtaacccggatcagtttaaggccctcggcctcgtcacccccgctggtgtgttgctggcgggaccgcccggatgcggcaaaacactgcttgcaaaggccgtcgcaaacgagagcggcctgaactttattagtgtgaagggtcctgagctgctgaacatgtatgtgggcgagagcgaacgtgctgtcaggcaggtctttcagagggctaaaaactccgccccgtgcgtgatcttcttcgatgaggtcgacgcactctgccctcgccggtctgacagagagactggggcttctgtccgggtcgtcaatcagttgctgaccgaaatggacggcctggaagctcgacagcaagtttttattatggcggccactaacagacccgacatcatcgaccccgccattctgcgcccaggccggttggacaagactctctttgtggggctgccccctccagctgacagattagccatcctgaagacgatcacgaaaaacggcaccaagcctcccttagatgccgatgtcaacctcgaggctatagcgggagatctcagatgcgattgctacaccggcgctgacctttctgcattagtgagggaggcctcgatctgcgccctgcgccaggaaatggcccggcagaaatccggtaatgaaaagggcgagctgaaggtatctcataagcactttgaggaggcttttaagaaggtgcgtagctccatatcaaagaaagaccagattatgtacgaaaggttacaagaatctctttctcgatag

SEQ ID NO: 129540 - DNA, 3123 bp, Artificial Sequence
  derived and/or modified sequence
aatcttccagggtccactgggcaggcctgcaaaataaggcccctagaaactccctgaggttttcaagtcttctccctctcctcggaattttttccccttcattcgcattacttttattctgacggaaacggcgcgggctaggccccaggaggggcgcatttcaggtgcaactggcccggcgatcgcggcgggcaacccctacgaggcccccggttgactaggagctggcggtccgagctgtggcttggaagaccgacgcgatgaagcccagacctgcagggttcgtggataataaactcaagcagcgagtcatccagtaccttaccagtaacaaatgtggcaaatatgtggacattggagtcttagcgtctgatttacaaagagtgtacagtatagactatggtcgaagaaaaagaaatgcttttaggattcaggtagaaaaagtatttagcataattagtagtgagaaggaacttaagaatttaacagaattagaagatgaacatttggcaaaaagggcaagacaaggtgaagaggataatgagtatactgaaagctattctgatgatgattcaagtatggaagactacccagatccacagtcagcaaatcacatgaacagttccctgctgtctttatatcggaaaggaaatcctgattctgtttcaaatactcctgagatggagcaaagagaaaccacctcttcaacaccacggataagttccaaaacaggctccattcccttgaagacccctgccaaagattctgaaggaggatggtttattgacaaaaccccaagtgtaaagaaagacagttttttcttggacctgtcatgtgagaaaagtaatcctaagaagccaataactgagatacaggattcaaaagattcttctcttttggagagtgatatgaaacggaaaggcaagctaaagaataaaggaagcaaaaggaagaaagaagatcttcaggaagtagatggagaaattgaagctgtcctgcaaaagaaagctaaagccagggggttagaattccagatctccaacgtgaagtttgaagatgtgggaggcaatgatatgacattaaaagaggtctgcaagatgctcatacacatgcgtcacccggaggtgtaccaccacctgggcgtcgtgccccctcgtggagttctccttcatggaccaccaggctgtgggaagacattacttgcacatgcaattgctggggaacttgacctgccaattttgaaagtggctgctccagagattgtgtctggagtatccggagagtctgagcagaagctgagagaactatttgagcaagctgtgtcaaatgcaccatgtatcattttcattgatgaaattgatgctattacccccaaaagagaagtggcttcaaaagatatggaacgaagaattgtagcccaactcctaacctgcatggatgatctgaataatgtggctgctacagcccgggtcctagttattggagctactaatcgaccagactcgttagaccctgctttgagacgtgcgggaaggttcgaccgagaaatatgcctaggtatcccagatgaagcatccagggaaagaatacttcaaacattgtgcagaaaactgaggcttcctcaagcttttgatttctgtcacttagcacacctaactccaggctttgttggtgctgatctcatggcactgtgccgagaggcagcaatgtgtgcagtcaatagagtcttaatgaagctacaggaacagcagaagaaaaatcctgaaatggaagatttgccatctaaaggagtccaggaggaaaggctgggaactgagcccacttctgaaacacaggatgaattacaaaggctgctggggttgctaagagaccaagatcccctctcagaggagcagatgcaaggactgtgcattgaactgaatgatttcattgttgctctatcctcagtccaaccctctgccaaaagggaaggctttgtcactgtccctaatgtgacatgggcagatattggtgccctggaagacattagagaggagctcaccatggcaatattggcaccagtacgcaacccagaccagttcaaagctcttggattggtgactccagctggggtcctccttgctggtcctcctggctgtgggaagactctgctggcgaaggctgttgcaaatgagtccggactaaattttatatctgtcaagggccccgaattactaaacatgtatgttggtgagagtgaacgtgctgtgcgacaagtttttcaacgagccaagaactcagcaccctgtgtgatattctttgatgaagtggatgctttatgtcctcgaagatcagaccgagagacaggggcaagtgtccgagtggtgaatcagctacttacagagatggatggtctggaagcacgccagcaggtttttattatggcagccactaacaggccagatataattgaccctgcaatcctgcgcccgggccgcctggacaaaacactgtttgtgggtttaccgccccctgcagatcgccttgccatcttaaaaactatcacaaaaaatggtaccaaaccaccactggatgcagatgtaaatttggaagcaattgctggtgaccttcgctgtgattgctatacgggcgcagatctctctgctttggtacgagaagcttctatctgtgccctgagacaggaaatggcaagacagaagagtggaaatgaaaaaggtgaactcaaggttagtcataagcattttgaagaagctttcaagaaagtaagatcatctatatcaaaaaaggatcaaatcatgtatgaacgtttgcaggagtccctcagccggtgatgtctccagcagccggcttagaggagctagcccatcaagccggcagagaatcccccacacgctctgaaggacccactttcagctggacacaggcgcggcctcatgtaaacattttattttcaaatgaatgaggccaagctgaagctgaagctgaagattcttcccatctggccagccttgtgtgaaaatgccttcttcctctttaagaaaaaggacaatttttaaactgctgaaataaaatgactgttacatttttcaaataaaacttttactttgaactattttgactata

SEQ ID NO: 129541 - DNA, 2289 bp, Artificial Sequence
  derived and/or modified sequence
ggaagaccgacgcgatgaagcccagacctgcagggttcgtggataataaactcaagcagcgagtcatccagtatagactatggtcgaagaaaaagaaatgcttttaggattcaggtagaaaaagtatttagcataattagtagtgagaaggaacttaagaatttaacagaattagaagatgaacatttggcaaaaagggcaagacaaggtgaagaggataatgagtatactgaaagctattctgatgatgattcaagtatggaagactacccagatccacagtcagcaaatcacatgaacagttccctgctgtctttatatcggaaaggaaatcctgattctgtttcaaatactcctgagatggagcaaagagaaaccacctcttcaacaccacggataagttccaaaacaggctccattcccttgaagacccctgccaaagattctgaaggaggatggtttattgacaaaaccccaagtgtaaagaaagacagttttttcttggacctgtcatgtgagaaaagtaatcctaagaagccaataactgagatacaggattcaaaagattcttctcttttggagagtgatatgaaacggaaaggcaagctaaagaataaaggaagcaaaaggaagaaagaagatcttcaggaagtagatggagaaattgaagctgtcctgcaaaagaaagctaaagccagggggttagaattccagatctccaacgtgaagtttgaagatgtgggaggcaatgatatgacattaaaagaggtctgcaagatgctcatacacatgcgtcacccggaggtgtaccaccacctgggcgtcgtgccccctcgtggagttctccttcatggaccaccaggctgtgggaagacattacttgcacatgcaattgctggggaacttgacctgccaattttgaaagtggctgctccagagattgtgtctggagtatccggagagtctgagcagaagctgagagaactatttgagcaagctgtgtcaaatgcaccatgtatcattttcattgatgaaattgatgctattacccccaaaagagaagtggcttcaaaagatatggaacgaagaattgtagcccaactcctaacctgcatggatgatctgaataatgtggctgctacagcccgggtcctagttattggagctactaatcgaccagactcgttagaccctgctttgagacgtgcgggaaggttcgaccgagaaatatgcctaggtatcccagatgaagcatccagggaaagaatacttcaaacattgtgcagaaaactgaggcttcctcaagcttttgatttctgtcacttagcacacctaactccaggctttgttggtgctgatctcatggcactgtgccgagaggcagcaatgtgtgcagtcaatagagtcttaatgaagctacaggaacagcagaagaaaaatcctgaaatggaagatttgccatctaaaggagtccaggaggaaaggctgggaactgagcccacttctgaaacacaggatgaattacaaaggctgctggggttgctaagagaccaagatcccctctcagaggagcagatgcaaggactgtgcattgaactgaatgatttcattgttgctctatcctcagtccaaccctctgccaaaagggaaggctttgtcactgtccctaatgtgacatgggcagatattggtgccctggaagacattagagaggagctcaccatggcaatattggcaccagtacgcaacccagaccagttcaaagctcttggattggtgactccagctggggtcctccttgctggtcctcctggctgtgggaagactctgctggcgaaggctgttgcaaatgagtccggactaaattttatatctgtcaagggccccgaattactaaacatgtatgttggtgagagtgaacgtgctgtgcgacaagtttttcaacgagccaagaactcagcaccctgtgtgatattctttgatgaagtggatgctttatgtcctcgaagatcagaccgagagatataattgaccctgcaatcctgcgcccgggccgcctggacaaaacactgtttgtgggtttaccgccccctgcagatcgccttgccatcttaaaaactatcacaaaaaatggtaccaaaccaccactggatgcagatgtaaatttggaagcaattgctggtgaccttcgctgtgattgctatacgggcgcagatctctctgctttggtacgagaagcttctatctgtgccctgagacaggaaatggcaagacagaagagtggaaatg

SEQ ID NO: 129542 - DNA, 2832 bp, Artificial Sequence
  derived and/or modified sequence
ctaggagctggcggtccgagctgtggcttggaagaccgacgcgatgaagcccagacctgcagggttcgtggataataaactcaagcagcgagtcatccagtatagactatggtcgaagaaaaagaaatgcttttaggattcaggtagaaaaagtatttagcataattagtagtgagaaggaacttaagaatttaacagaattagaagatgaacatttggcaaaaagggcaagacaaggtgaagaggataatgagtatactgaaagctattctgatgatgattcaagtatggaagactacccagatccacagtcagcaaatcacatgaacagttccctgctgtctttatatcggaaaggaaatcctgattctgtttcaaatactcctgagatggagcaaagagaaaccacctcttcaacaccacggataagttccaaaacaggctccattcccttgaagacccctgccaaagattctgaaggaggatggtttattgacaaaaccccaagtgtaaagaaagacagttttttcttggacctgtcatgtgagaaaagtaatcctaagaagccaataactgagatacaggattcaaaagattcttctcttttggagagtgatatgaaacggaaaggcaagctaaagaataaaggaagcaaaaggaagaaagaagatcttcaggaagtagatggagaaattgaagctgtcctgcaaaagaaagctaaagccagggggttagaattccagatctccaacgtgaagtttgaagatgtgggaggcaatgatatgacattaaaagaggtctgcaagatgctcatacacatgcgtcacccggaggtgtaccaccacctgggcgtcgtgccccctcgtggagttctccttcatggaccaccaggctgtgggaagacattacttgcacatgcaattgctggggaacttgacctgccaattttgaaagtggctgctccagagattgtgtctggagtatccggagagtctgagcagaagctgagagaactatttgagcaagctgtgtcaaatgcaccatgtatcattttcattgatgaaattgatgctattacccccaaaagagaagtggcttcaaaagatatggaacgaagaattgtagcccaactcctaacctgcatggatgatctgaataatgtggctgctacagcccgggtcctagttattggagctactaatcgaccagactcgttagaccctgctttgagacgtgcgggaaggttcgaccgagaaatatgcctaggtatcccagatgaagcatccagggaaagaatacttcaaacattgtgcagaaaactgaggcttcctcaagcttttgatttctgtcacttagcacacctaactccaggctttgttggtgctgatctcatggcactgtgccgagaggcagcaatgtgtgcagtcaatagagtcttaatgaagctacaggaacagcagaagaaaaatcctgaaatggaagatttgccatctaaaggagtccaggaggaaaggctgggaactgagcccacttctgaaacacaggatgaattacaaaggctgctggggttgctaagagaccaagatcccctctcagaggagcagatgcaaggactgtgcattgaactgaatgatttcattgttgctctatcctcagtccaaccctctgccaaaagggaaggctttgtcactgtccctaatgtgacatgggcagatattggtgccctggaagacattagagaggagctcaccatggcaatattggcaccagtacgcaacccagaccagttcaaagctcttggattggtgactccagctggggtcctccttgctggtcctcctggctgtgggaagactctgctggcgaaggctgttgcaaatgagtccggactaaattttatatctgtcaagggccccgaattactaaacatgtatgttggtgagagtgaacgtgctgtgcgacaagtttttcaacgagccaagaactcagcaccctgtgtgatattctttgatgaagtggatgctttatgtcctcgaagatcagaccgagagacaggggcaagtgtccgagtggtgaatcagctacttacagagatggatggtctggaagcacgccagcaggtttttattatggcagccactaacaggccagatataattgaccctgcaatcctgcgcccgggccgcctggacaaaacactgtttgtgggtttaccgccccctgcagatcgccttgccatcttaaaaactatcacaaaaaatggtaccaaaccaccactggatgcagatgtaaatttggaagcaattgctggtgaccttcgctgtgattgctatacgggcgcagatctctctgctttggtacgagaagcttctatctgtgccctgagacaggaaatggcaagacagaagagtggaaatgaaaaaggtgaactcaaggttagtcataagcattttgaagaagctttcaagaaagtaagatcatctatatcaaaaaaggatcaaatcatgtatgaacgtttgcaggagtccctcagccggtgatgtctccagcagccggcttagaggagctagcccatcaagccggcagagaatcccccacacgctctgaaggacccactttcagctggacacaggcgcggcctcatgtaaacattttattttcaaatgaatgaggccaagctgaagctgaagctgaagattcttcccatctggccagccttgtgtgaaaatgccttcttcctctttaagaaaaaggacaatttttaaactgctgaaataaaatgactgttacatttttcaaataaaacttttactttgaactattttgactata

SEQ ID NO: 129543 - DNA, 2571 bp, Artificial Sequence
  derived and/or modified sequence
atgaagccaaggcccgctggcttcgtcgacaataagttaaagcagcgggtgatccaatacctgaccagtaataaatgtggtaaatacgtggacattggcgtcctggcctccgacttgcagagagtatatagcatagattacggccgacggaagaggaatgccttccgcatccaggtggaaaaggtgttttctattatcagctctgagaaggagctgaaaaatctgaccgaactggaagatgaacatctcgcaaaacgtgcaaggcagggagaggaagataacgagtacaccgaatcctattcagacgatgacagtagtatggaggactaccccgatccacaaagcgcgaatcatatgaactcatccctgctttctctgtatcgcaaaggcaaccctgattcagtgtcaaacactcctgagatggaacagagagaaactactagcagtaccccccgtatatcctcaaagaccggttctataccattaaagaccccggctaaggactcagagggtggctggttcatcgacaagactcctagtgttaagaaggacagcttctttttggatctgtcctgcgaaaaatctaacccaaagaaacctatcacagaaatacaggattccaaagactcctctctgttggagagcgatatgaagagaaaggggaagctgaagaataagggctccaaacggaaaaaggaagacctccaggaggtcgacggtgaaattgaggccgtacttcagaaaaaggccaaggcgaggggccttgaatttcagatctctaatgtgaagtttgaagatgtgggaggcaacgatatgacccttaaagaagtttgtaaaatgctgatccacatgaggcaccccgaggtttaccatcacctgggggttgtacctccaagaggggtcctcctacacggccctccaggctgcggaaaaaccctcctggcacatgccatagccggagaactggatctgcccatcctgaaggtcgcagctcccgaaatcgtgtccggagtcagtggcgagtctgaacagaaactgagagagttgtttgaacaggctgtctccaacgccccttgtattatatttattgatgagattgacgcgatcacaccaaaaagggaggttgcctcaaaggacatggaacgacgtatcgttgcgcaacttctaacttgtatggatgatctaaacaacgtggccgctaccgcacgcgtgcttgttatcggcgctaccaaccggccagatagcctcgaccccgcattacgacgagccggaaggtttgacagagaaatttgtttgggcatcccggacgaggcttccagggagcgcatccttcaaacactgtgtaggaaattgagactcccccaggcatttgatttctgccatcttgctcatctcacccccggatttgttggggcagacctcatggctctatgtcgagaagccgctatgtgcgcagtaaacagggtcttaatgaaattacaggaacagcagaagaaaaatcctgagatggaggaccttcctagtaagggcgtgcaggaagagcgccttggtaccgagcccacaagcgagacccaagatgagctgcagagacttctgggccttctgcgcgaccaggacccactgagcgaggagcagatgcagggactgtgtattgagctgaacgacttcattgtggcgttgagctctgttcaaccaagcgctaagagagaggggttcgtcactgtgcccaatgttacatgggccgatattggtgcattagaggacatccgcgaggagctgaccatggctattctcgctccagtgaggaaccccgatcagtttaaagcattgggactcgttaccccagccggagttctactggccggtcctccaggatgcggcaagacactgctagccaaagccgtcgctaatgagtctggcttaaacttcatttccgtcaaaggcccagagctgctcaacatgtacgtgggggagtcggagcgggcagtgcggcaggtgttccaacgcgcaaaaaactcagctccctgcgtgatattcttcgacgaagtggacgccctgtgcccccgtagatccgaccgggagacgggggcatccgtgagggtcgtgaaccagttgctcaccgagatggatggtttggaggctcgacagcaggtctttatcatggcggctactaacaggccagatattatagatcccgcaatcctgagaccagggagattggacaaaacgctcttcgtaggcctgccaccacccgctgacaggctcgccatcttaaagaccattacaaagaacggcacaaagccacccctcgacgcagacgtgaatcttgaggccatcgccggagacttgagatgcgactgctacaccggggcagacctttccgcactcgtgcgggaggcgtctatttgcgctctgcgccaggaaatggctaggcagaaatcaggtaacgaaaagggggagctgaaggttagccacaagcacttcgaagaagccttcaagaaggtgcgatcctccatatctaaaaaggatcagataatgtatgagcgacttcaggagtctctaagtcggtag

SEQ ID NO: 129544 - DNA, 1770 bp, Artificial Sequence
  derived and/or modified sequence
atggaagattatcccgaccctcagtctgctaaccacatgaatagttccttgcttagcctgtatagaaaaggcaacccagattcagtttctaatacgcccgagatggagcagcgcgagaccacaagttcaacacctcggatctcctctaagaccggctctattcctttgaagacccccgcaaaagacagcgaaggcggttggttcattgataagacccctagtgttaaaaaagattctttttttctcgacctgagctgtgagaagtctaaccctaagaagcccatcacggaaatccaggactccaaggattcctcactcttggaatcagatatgaaacgcaaggggaaacttaagaacaaaggcagcaagcgaaagaaagaagatcttcaagaagtggacggtgagattgaggcagttttacagaaaaaggctaaggcacggggacttgagttccagatttccaatgtgaaatttgaggacgttggaggaaatgacatgacccttaaagaggtgtgtaagatgctgatccatatgagacaccccgaggtctatcaccatctcggcgttgtgcctccccgaggcgttctgctccatggcccaccaggctgcggcaagacactgctggctcatgcgatcgcaggagaactggaccttcccatcctcaaggtcgctgctcccgaaatagtttccggcgtttccggcgagagtgagcaaaaactgcgtgaactgttcgaacaggcagtgagcaatgcaccatgcatcatctttatcgacgagatcgacgctattaccccgaagagggaagtcgcctcgaaggatatggagaggcggattgtagcccagctgctgacatgcatggatgaccttaacaatgtggccgcaaccgcgagggtgctggtcataggcgctacaaaccggccagacagtctagatcccgctcttcggagggcgggtagatttgatagagagatctgcttaggcattccagatgaagcgtcccgtgagcgaattctccaaaccctctgtcgtaagctgagattgccacaggcttttgacttctgccacctggctcacttaacccccggatttgttggagcagatctcatggctttatgccgggaggctgccatgtgtgccgtgaaccgagtcttaatgaagctccaggagcagcagaagaaaaatcccgagatggaggatttgccatccaaaggggtgcaagaagaacgtctgggaacagagccgaccagcgagactcaggacgaacttcagagactgttggggctcctgcgcgatcaggatccgttgtcagaggagcagatgcagggattgtgtatagagctcaacgactttatcgtggcactttcatccgtgcagcctagcgcaaagcgggagggctttgtgaccgtgccaaatgtcacatgggcagatattggagccctcgaggatattcgagaagagctgactatggcaatattagcacccgtccggaatcccgaccagttcaaagccctggggctcgtgacccctgccggagtcttattagccggacccccaggctgcggaaaaaccctcctggccaaggccgtggccaacgagtctgggctcaatttcatcagcgtgaagggacctgaactgttgaatatgtatgtgggcgagagcgagcgcgctgtccgtcaggtgttccagagggctaagaactcagccccttgtgttatctttttcgatgaggtagacgctctatgtccaagaaggagcgatagagagatttag

SEQ ID NO: 129545 - DNA, 2253 bp, Artificial Sequence
  derived and/or modified sequence
atggaggactaccctgatcctcagagcgctaatcatatgaatagttctctgctgagcctgtatcggaaaggcaacccggattctgtttccaatacacctgagatggaacaacgcgagactacgagcagtaccccacgcatcagctccaaaaccggctctattcccctgaagacccccgcaaaggatagtgaagggggatggttcatcgataagacgccctccgtcaagaaagactctttctttctggatttgtcctgtgaaaaatccaaccccaagaagcccatcaccgagatccaggattcgaaggattcatcactcctggaaagtgacatgaagagaaaagggaagctgaagaataaagggtctaaacgcaagaaggaagatttgcaagaggttgatggtgaaattgaagccgtgctgcagaaaaaagctaaggcccgtggacttgaatttcagatctcgaatgttaagttcgaagatgtgggtggcaatgacatgaccttaaaggaagtgtgtaagatgctaattcatatgcgccaccctgaggtctaccaccacctcggtgtggttccaccccgaggggtcctactccatggaccccctggctgtggcaaaacacttcttgctcacgctatcgccggagagctcgacctgcccatcctgaaagtggcggctcccgaaatcgtatcaggagtatctggcgaatcagagcagaaactcagggaactgttcgagcaggctgtttccaacgctccctgtattattttcatcgatgaaatcgacgccataactccaaaaagggaggtggcttccaaggacatggaacgacgcattgtcgcgcagctgctgacttgtatggacgacctgaacaacgtggccgcaaccgctcgggtgctcgtcataggcgctactaacagaccggattccctcgatccagcgttgcgtagagccggtcggttcgaccgggagatctgcctcggtatcccagatgaagccagtcgcgaacgcattctgcagacactgtgcaggaagttgcgtttgccgcaagccttcgatttttgtcatctggcccacttgactcccggatttgtcggcgcagatctcatggccttgtgccgggaagctgcaatgtgcgcagttaatcgagtcttgatgaagctccaagagcagcaaaaaaagaaccctgagatggaggacctgccctccaaaggggtgcaagaagagagactcgggaccgagccaacgagcgagacccaggacgagttacagaggttgttaggacttttgcgtgatcaggatccgctaagcgaggaacagatgcagggcctgtgtattgagcttaatgacttcattgtggctctctccagtgtacagccgtccgcaaaacgtgagggattcgtaacagtgccgaacgtcacttgggcagatataggcgctcttgaagacattagggaggaattaactatggcaatcctggctcctgtgcggaacccagaccagtttaaggccttaggattggtcaccccagctggggtcctgctcgccggtcctccaggatgtggaaaaacgctgttggccaaggccgttgcgaacgagagtggattaaattttataagcgtgaagggtcccgaattgctaaatatgtatgtgggggagtctgagcgcgcagtgaggcaggtgttccagcgggctaagaattcagcgccttgtgtgatcttttttgatgaagtggatgccctgtgccctcgacggtcagaccgcgagaccggggcttctgtgagggtggtgaaccaactgttgacggagatggatggcctggaggctcggcagcaagtgtttataatggcagcaactaataggcccgatatcattgatccagcaatcctacgcccagggcgattggacaagacactcttcgtcgggcttcctcctcccgctgacaggctcgctattctgaaaaccatcaccaagaatggcactaagccaccgctggacgccgacgtgaatctggaagctattgctggagacctaagatgcgactgttatacaggcgcagatctgtccgccctagtgcgagaggctagcatctgcgccctgcgacaagaaatggctcggcagaaatcgggaaacgaaaaaggcgaactgaaagtgtcacacaagcatttcgaggaggccttcaaaaaggtcaggagttccatttcaaagaaggatcagattatgtacgagcggttgcaagaatctctgtcaagatag

SEQ ID NO: 129546 - DNA, 2571 bp, Artificial Sequence
  derived and/or modified sequence
atgaagcccagacccgccggcttcgtggacaacaagctgaagcagagagtgatccagtacctgaccagcaacaagtgcggcaagtacgtggacatcggcgtgctggccagcgacctgcagagagtgtacagcatcgactacggcagaagaaagagaaacgccttcagaatccaggtggagaaggtgttcagcatcatcagcagcgagaaggagctgaagaacctgaccgagctggaggacgagcacctggccaagagagccagacagggcgaggaggacaacgagtacaccgagagctacagcgacgacgacagcagcatggaggactaccccgacccccagagcgccaaccacatgaacagcagcctgctgagcctgtacagaaagggcaaccccgacagcgtgagcaacacccccgagatggagcagagagagaccaccagcagcacccccagaatcagcagcaagaccggcagcatccccctgaagacccccgccaaggacagcgagggcggctggttcatcgacaagacccccagcgtgaagaaggacagcttcttcctggacctgagctgcgagaagagcaaccccaagaagcccatcaccgagatccaggacagcaaggacagcagcctgctggagagcgacatgaagagaaagggcaagctgaagaacaagggcagcaagagaaagaaggaggacctgcaggaggtggacggcgagatcgaggccgtgctgcagaagaaggccaaggccagaggcctggagttccagatcagcaacgtgaagttcgaggacgtgggcggcaacgacatgaccctgaaggaggtgtgcaagatgctgatccacatgagacaccccgaggtgtaccaccacctgggcgtggtgccccccagaggcgtgctgctgcacggcccccccggctgcggcaagaccctgctggcccacgccatcgccggcgagctggacctgcccatcctgaaggtggccgcccccgagatcgtgagcggcgtgagcggcgagagcgagcagaagctgagagagctgttcgagcaggccgtgagcaacgccccctgcatcatcttcatcgacgagatcgacgccatcacccccaagagagaggtggccagcaaggacatggagagaagaatcgtggcccagctgctgacctgcatggacgacctgaacaacgtggccgccaccgccagagtgctggtgatcggcgccaccaacagacccgacagcctggaccccgccctgagaagagccggcagattcgacagagagatctgcctgggcatccccgacgaggccagcagagagagaatcctgcagaccctgtgcagaaagctgagactgccccaggccttcgacttctgccacctggcccacctgacccccggcttcgtgggcgccgacctgatggccctgtgcagagaggccgccatgtgcgccgtgaacagagtgctgatgaagctgcaggagcagcagaagaagaaccccgagatggaggacctgcccagcaagggcgtgcaggaggagagactgggcaccgagcccaccagcgagacccaggacgagctgcagagactgctgggcctgctgagagaccaggaccccctgagcgaggagcagatgcagggcctgtgcatcgagctgaacgacttcatcgtggccctgagcagcgtgcagcccagcgccaagagagagggcttcgtgaccgtgcccaacgtgacctgggccgacatcggcgccctggaggacatcagagaggagctgaccatggccatcctggcccccgtgagaaaccccgaccagttcaaggccctgggcctggtgacccccgccggcgtgctgctggccggcccccccggctgcggcaagaccctgctggccaaggccgtggccaacgagagcggcctgaacttcatcagcgtgaagggccccgagctgctgaacatgtacgtgggcgagagcgagagagccgtgagacaggtgttccagagagccaagaacagcgccccctgcgtgatcttcttcgacgaggtggacgccctgtgccccagaagaagcgacagagagaccggcgccagcgtgagagtggtgaaccagctgctgaccgagatggacggcctggaggccagacagcaggtgttcatcatggccgccaccaacagacccgacatcatcgaccccgccatcctgagacccggcagactggacaagaccctgttcgtgggcctgcccccccccgccgacagactggccatcctgaagaccatcaccaagaacggcaccaagccccccctggacgccgacgtgaacctggaggccatcgccggcgacctgagatgcgactgctacaccggcgccgacctgagcgccctggtgagagaggccagcatctgcgccctgagacaggagatggccagacagaagagcggcaacgagaagggcgagctgaaggtgagccacaagcacttcgaggaggccttcaagaaggtgagaagcagcatcagcaagaaggaccagatcatgtacgagagactgcaggagagcctgagcagatag

SEQ ID NO: 129547 - DNA, 1770 bp, Artificial Sequence
  derived and/or modified sequence
atggaggactaccccgacccccagagcgccaaccacatgaacagcagcctgctgagcctgtacagaaagggcaaccccgacagcgtgagcaacacccccgagatggagcagagagagaccaccagcagcacccccagaatcagcagcaagaccggcagcatccccctgaagacccccgccaaggacagcgagggcggctggttcatcgacaagacccccagcgtgaagaaggacagcttcttcctggacctgagctgcgagaagagcaaccccaagaagcccatcaccgagatccaggacagcaaggacagcagcctgctggagagcgacatgaagagaaagggcaagctgaagaacaagggcagcaagagaaagaaggaggacctgcaggaggtggacggcgagatcgaggccgtgctgcagaagaaggccaaggccagaggcctggagttccagatcagcaacgtgaagttcgaggacgtgggcggcaacgacatgaccctgaaggaggtgtgcaagatgctgatccacatgagacaccccgaggtgtaccaccacctgggcgtggtgccccccagaggcgtgctgctgcacggcccccccggctgcggcaagaccctgctggcccacgccatcgccggcgagctggacctgcccatcctgaaggtggccgcccccgagatcgtgagcggcgtgagcggcgagagcgagcagaagctgagagagctgttcgagcaggccgtgagcaacgccccctgcatcatcttcatcgacgagatcgacgccatcacccccaagagagaggtggccagcaaggacatggagagaagaatcgtggcccagctgctgacctgcatggacgacctgaacaacgtggccgccaccgccagagtgctggtgatcggcgccaccaacagacccgacagcctggaccccgccctgagaagagccggcagattcgacagagagatctgcctgggcatccccgacgaggccagcagagagagaatcctgcagaccctgtgcagaaagctgagactgccccaggccttcgacttctgccacctggcccacctgacccccggcttcgtgggcgccgacctgatggccctgtgcagagaggccgccatgtgcgccgtgaacagagtgctgatgaagctgcaggagcagcagaagaagaaccccgagatggaggacctgcccagcaagggcgtgcaggaggagagactgggcaccgagcccaccagcgagacccaggacgagctgcagagactgctgggcctgctgagagaccaggaccccctgagcgaggagcagatgcagggcctgtgcatcgagctgaacgacttcatcgtggccctgagcagcgtgcagcccagcgccaagagagagggcttcgtgaccgtgcccaacgtgacctgggccgacatcggcgccctggaggacatcagagaggagctgaccatggccatcctggcccccgtgagaaaccccgaccagttcaaggccctgggcctggtgacccccgccggcgtgctgctggccggcccccccggctgcggcaagaccctgctggccaaggccgtggccaacgagagcggcctgaacttcatcagcgtgaagggccccgagctgctgaacatgtacgtgggcgagagcgagagagccgtgagacaggtgttccagagagccaagaacagcgccccctgcgtgatcttcttcgacgaggtggacgccctgtgccccagaagaagcgacagagagatctag

SEQ ID NO: 129548 - DNA, 2253 bp, Artificial Sequence
  derived and/or modified sequence
atggaggactaccccgacccccagagcgccaaccacatgaacagcagcctgctgagcctgtacagaaagggcaaccccgacagcgtgagcaacacccccgagatggagcagagagagaccaccagcagcacccccagaatcagcagcaagaccggcagcatccccctgaagacccccgccaaggacagcgagggcggctggttcatcgacaagacccccagcgtgaagaaggacagcttcttcctggacctgagctgcgagaagagcaaccccaagaagcccatcaccgagatccaggacagcaaggacagcagcctgctggagagcgacatgaagagaaagggcaagctgaagaacaagggcagcaagagaaagaaggaggacctgcaggaggtggacggcgagatcgaggccgtgctgcagaagaaggccaaggccagaggcctggagttccagatcagcaacgtgaagttcgaggacgtgggcggcaacgacatgaccctgaaggaggtgtgcaagatgctgatccacatgagacaccccgaggtgtaccaccacctgggcgtggtgccccccagaggcgtgctgctgcacggcccccccggctgcggcaagaccctgctggcccacgccatcgccggcgagctggacctgcccatcctgaaggtggccgcccccgagatcgtgagcggcgtgagcggcgagagcgagcagaagctgagagagctgttcgagcaggccgtgagcaacgccccctgcatcatcttcatcgacgagatcgacgccatcacccccaagagagaggtggccagcaaggacatggagagaagaatcgtggcccagctgctgacctgcatggacgacctgaacaacgtggccgccaccgccagagtgctggtgatcggcgccaccaacagacccgacagcctggaccccgccctgagaagagccggcagattcgacagagagatctgcctgggcatccccgacgaggccagcagagagagaatcctgcagaccctgtgcagaaagctgagactgccccaggccttcgacttctgccacctggcccacctgacccccggcttcgtgggcgccgacctgatggccctgtgcagagaggccgccatgtgcgccgtgaacagagtgctgatgaagctgcaggagcagcagaagaagaaccccgagatggaggacctgcccagcaagggcgtgcaggaggagagactgggcaccgagcccaccagcgagacccaggacgagctgcagagactgctgggcctgctgagagaccaggaccccctgagcgaggagcagatgcagggcctgtgcatcgagctgaacgacttcatcgtggccctgagcagcgtgcagcccagcgccaagagagagggcttcgtgaccgtgcccaacgtgacctgggccgacatcggcgccctggaggacatcagagaggagctgaccatggccatcctggcccccgtgagaaaccccgaccagttcaaggccctgggcctggtgacccccgccggcgtgctgctggccggcccccccggctgcggcaagaccctgctggccaaggccgtggccaacgagagcggcctgaacttcatcagcgtgaagggccccgagctgctgaacatgtacgtgggcgagagcgagagagccgtgagacaggtgttccagagagccaagaacagcgccccctgcgtgatcttcttcgacgaggtggacgccctgtgccccagaagaagcgacagagagaccggcgccagcgtgagagtggtgaaccagctgctgaccgagatggacggcctggaggccagacagcaggtgttcatcatggccgccaccaacagacccgacatcatcgaccccgccatcctgagacccggcagactggacaagaccctgttcgtgggcctgcccccccccgccgacagactggccatcctgaagaccatcaccaagaacggcaccaagccccccctggacgccgacgtgaacctggaggccatcgccggcgacctgagatgcgactgctacaccggcgccgacctgagcgccctggtgagagaggccagcatctgcgccctgagacaggagatggccagacagaagagcggcaacgagaagggcgagctgaaggtgagccacaagcacttcgaggaggccttcaagaaggtgagaagcagcatcagcaagaaggaccagatcatgtacgagagactgcaggagagcctgagcagatag

SEQ ID NO: 129549 - protein, 364 aa, Artificial Sequence
  derived and/or modified sequence
MMDLRNTPAKSLDKFIEDYLLPDTCFRMQINHAIDIICGFLKERCFRGSSYPVCVSKVVKGGSSGKGTTLRGRSDADLVVFLSPLTTFQDQLNRRGEFIQEIRRQLEACQRERAFSVKFEVQAPRWGNPRALSFVLSSLQLGEGVEFDVLPAFDALGQLTGGYKPNPQIYVKLIEECTDLQKEGEFSTCFTELQRDFLKQRPTKLKSLIRLVKHWYQNCKKKLGKLPPQYALELLTVYAWERGSMKTHFNTAQGFRTVLELVINYQQLCIYWTKYYDFKNPIIEKYLRRQLTKPRPVILDPADPTGNLGGGDPKGWRQLAQEAEAWLNYPCFKNWDGSPVSSWILLVRPPASSLPFIPAPLHEA

SEQ ID NO: 129550 - DNA, 1095 bp, Artificial Sequence
  derived and/or modified sequence
atgatggacctcaggaacacccctgccaaatctctggacaagtttatcgaggattacttactcccagatacttgctttcgcatgcagattaaccatgccatagatattatctgcgggtttttaaaggagcgctgttttcgcggttctagttatcctgtctgtgtgtccaaggtggtcaagggaggttccagcggcaagggcactaccttgcgtggccgcagtgatgcagacctggtagtgtttctgagtccattgactacatttcaagatcagctgaatcgcaggggggagttcatccaggagatcagaaggcagctggaggcctgtcagcgggagcgagccttcagtgtgaagttcgaagtccaggcccccaggtggggaaacccgagagctctgagctttgtgctcagcagcctccagctgggggaaggcgtggagtttgacgtactgcccgcttttgacgcgctaggccagctgacaggggggtacaagcccaatcctcagatatacgtcaagctgatcgaggagtgcactgatctacagaaggagggagagttcagtacttgctttaccgagttgcagcgcgatttcttgaaacaacgccccacaaagttaaaaagtctgatccggctcgtcaagcattggtaccagaactgcaagaagaaactcggcaaactcccacctcaatacgcactcgaactgcttaccgtttacgcctgggagcgaggttccatgaagactcattttaacaccgcacaggggttcaggaccgtgcttgagctcgttatcaattaccaacagttgtgtatctactggactaagtactacgacttcaagaatccgataattgagaaatacctccgacgccagctcacaaaaccaaggccagttatcctcgaccccgccgatccgaccggcaatcttggtggcggggatccaaagggatggaggcaactcgcccaggaggctgaggcgtggctcaactatccgtgttttaaaaactgggacggctcccccgtcagcagttggattcttctggtcaggcctcccgcaagttctctgcctttcattcccgcccccctacatgaagcctag

SEQ ID NO: 129551 - DNA, 1095 bp, Artificial Sequence
  derived and/or modified sequence
atgatggacctgaggaacaccccagccaagagcctggacaagttcatcgaggactacctgctgcctgacacctgcttcaggatgcagatcaaccacgccatcgacatcatctgtggcttcctgaaggagcgctgcttccggggcagcagctaccctgtgtgtgtgtccaaggtggtgaagggcggcagcagcggcaagggcaccaccctgcggggccgcagtgatgctgacctggtggtgttcctgagccccctgaccaccttccaggaccagctgaacagaagaggagagttcatccaggagatccggcggcagctggaggcctgccagcgggagcgggccttctctgtgaagtttgaggtgcaggccccccgctggggcaacccccgggccctgagctttgtgctgagcagcctgcagctgggggagggcgtggagtttgatgtgctgcctgcctttgatgccctgggccagctgaccggcggctacaagcccaacccccagatctacgtgaagctgattgaggagtgcacagacctgcagaaggagggggagttcagcacctgcttcacagagctgcagagggacttcctgaagcagaggcccaccaagctgaagagcctcatccggctggtgaagcactggtaccagaactgcaagaagaagctgggcaagctgcccccccagtatgccctggagctgctgactgtgtatgcctgggagcggggctccatgaagacccacttcaacacagcccagggcttcagaacagtgctggagctggtgatcaactaccagcagctgtgcatctactggaccaagtactatgacttcaagaaccccatcatcgagaagtacctgcggcggcagctgaccaagcccaggcctgtgatcctggaccctgctgaccccactggaaacctgggcggcggggaccccaagggctggaggcagctggcccaggaggccgaggcctggctgaactacccctgcttcaagaactgggatggcagccctgtgtcctcctggatcctgctggtgcggcccccagccagcagcctgcccttcatcccagcccccctgcacgaggcctag

SEQ ID NO: 129552 - DNA, 1095 bp, Artificial Sequence
  derived and/or modified sequence
atgatggacctgcggaacacccccgccaagagcctggacaagttcatagaggattatctattgcctgacacgtgctttaggatgcagataaaccatgccattgacatcatttgtggttttctgaaggaaagatgcttcagggggagctcctacccagtatgtgtgtcaaaagtggtgaaaggggggtccagtggcaagggaacaacattgcgaggccgctctgatgccgatcttgtcgtcttcctaagcccattaactacctttcaggaccagctaaaccggcgaggggaattcatccaggagatcaggaggcaactcgaggcctgtcagagagagcgtgcgttctcagtcaagttcgaagtccaggcacctcgatggggaaaccctcgagccttgtccttcgtcctgagcagccttcaattgggagagggcgtggaattcgatgttcttcctgcattcgatgcactagggcagttaactggaggatacaagcccaatccacagatatatgtgaagctgattgaggagtgtaccgacctacaaaaggaaggcgaattcagtacctgttttactgagctgcagcgggactttctgaaacagagacccaccaagcttaaatccctcatacgactagtcaaacattggtatcaaaattgtaaaaagaaacttggcaagttgcccccccagtacgctctagagctcctgaccgtctacgcctgggaacgaggaagcatgaagacgcactttaataccgcccaggggttccgaacggtgctggagctggtgatcaattaccagcagttgtgcatctattggacgaagtattatgacttcaaaaaccccattatcgaaaagtatctgcgacggcagctcacgaagcctcgtcccgtgatactggatcctgcggaccctaccggaaatctcgggggaggagacccaaaaggctggcgtcaactggcccaagaggctgaggcttggctcaactatccctgtttcaagaattgggacggatcgccagtgagttcatggatcctgcttgtgcgtccgcctgcatcaagcttgccctttattccggcaccactgcacgaggcttag

SEQ ID NO: 129553 - DNA, 1095 bp, Artificial Sequence
  derived and/or modified sequence
atgatggacctcaggaatacccctgccaaatccctcgataagtttatcgaggactaccttctgcctgacacctgcttcaggatgcagattaatcatgccatcgacatcatctgcggttttttgaaagagcgctgcttccgagggtcgtcctaccccgtgtgtgttagcaaagttgtgaagggcggatcatccggaaaaggtacaactcttaggggcagatcagacgctgatctagtggtttttttatcaccactcacaacatttcaagaccagctgaatcgtcggggtgagtttattcaggagattagacggcagctggaagcctgtcaacgcgaaagggcttttagtgtcaagtttgaagtccaggcaccccgttggggcaatcctagggctctgagtttcgtgttatcaagccttcaactgggagaaggtgtcgagtttgatgtgctccctgcctttgacgcactgggtcagttgactggtggctataaaccaaaccctcagatatatgtgaagctgatagaggagtgcacagatctccagaaagagggagaatttagcacctgctttaccgaactacagagagactttctaaagcaaagaccaacaaagttgaaatctctgatccgcctggtcaagcactggtaccagaattgcaaaaagaagctggggaagttgccgcctcagtacgccctcgaattattaacagtctacgcctgggagcgcggtagcatgaaaactcattttaacaccgctcagggatttcggaccgtgctggagttagtcatcaattaccagcagctgtgtatttactggacgaagtattacgatttcaaaaaccctatcattgagaaatatttacgcaggcagctgacaaaaccgcgaccagttatccttgacccagccgatccgacaggaaaccttggtggaggcgatcccaaaggatggcgccagttggcccaggaagccgaggcctggctcaactatccttgctttaaaaattgggacggctcccccgtcagctcgtggattcttttggtgaggccaccagcgtcatcgctgccctttattccagcgccactacatgaggcctag

SEQ ID NO: 129554 - DNA, 1990 bp, Artificial Sequence
  derived and/or modified sequence
gaagcagaagagtgagcagatgaaattcagcactgggatcaggggagtgtctgatttgcaaaaggaaagtgcaaagacagctcctcccttctgaggaaacgaaaccaacagcagtccaagctcagtcagcagaagagataaaagcaaacaggtctgggaggcagttctgttgccactctctctcctgtcaatgatggatctcagaaataccccagccaaatctctggacaagttcattgaagactatctcttgccagacacgtgtttccgcatgcaaatcaaccatgccattgacatcatctgtgggttcctgaaggaaaggtgcttccgaggtagctcctaccctgtgtgtgtgtccaaggtggtaaagggtggctcctcaggcaagggcaccaccctcagaggccgatctgacgctgacctggttgtcttcctcagtcctctcaccacttttcaggatcagttaaatcgccggggagagttcatccaggaaattaggagacagctggaagcctgtcaaagagagagagcattttccgtgaagtttgaggtccaggctccacgctggggcaacccccgtgcgctcagcttcgtactgagttcgctccagctcggggagggggtggagttcgatgtgctgcctgcctttgatgccctgggtcagttgactggcggctataaacctaacccccaaatctatgtcaagctcatcgaggagtgcaccgacctgcagaaagagggcgagttctccacctgcttcacagaactacagagagacttcctgaagcagcgccccaccaagctcaagagcctcatccgcctagtcaagcactggtaccaaaattgtaagaagaagcttgggaagctgccacctcagtatgccctggagctcctgacggtctatgcttgggagcgagggagcatgaaaacacatttcaacacagcccagggatttcggacggtcttggaattagtcataaactaccagcaactctgcatctactggacaaagtattatgactttaaaaaccccattattgaaaagtacctgagaaggcagctcacgaaacccaggcctgtgatcctggacccggcggaccctacaggaaacttgggtggtggagacccaaagggttggaggcagctggcacaagaggctgaggcctggctgaattacccatgctttaagaattgggatgggtccccagtgagctcctggattctgctggtgagacctcctgcttcctccctgccattcatccctgcccctctccatgaagcttgagacatatagctggagaccattctttccaaagaacttacctcttgccaaaggccatttatattcatatagtgacaggctgtgctccatattttacagtcattttggtcacaatcgagggtttctggaattttcacatcccttgtccagaattcattcccctaagagtaataataaataatctctaacaccatttattgactgtctgcttcgggctcaggttctgtcctaagccctttaatatgcactctctcattaaatagtcacaacaatcccatgaggcatttttaaaaattttttattattttagattcagagggcacatgtgccatttgttacacagctatattgtgtaatggtggggtttgggcctctattgatcctgtcgcccaaatagtgaacagagtacccaaaaagaattttttcaacctttgcctttctcccttcctcctccctgttggagtccctagtgtctattgttcccatctttagcagatgttaagtatttgattttctgtttctgggttaattcacttcggataatggcctccagctgcaaccatgatttcattctttcttatggctgcataatactccatggtgtagatataccacactttctttatccagttcacactgatgggcacttaagttgattccatgactttgctattgtgaatcgtactgcgataaacatacgagtgccgg

SEQ ID NO: 129555 - DNA, 1095 bp, Artificial Sequence
  derived and/or modified sequence
atgatggacctgagaaacacccccgccaagagcctggacaagttcatcgaggactacctgctgcccgacacctgcttcagaatgcagatcaaccacgccatcgacatcatctgcggcttcctgaaggagagatgcttcagaggcagcagctaccccgtgtgcgtgagcaaggtggtgaagggcggcagcagcggcaagggcaccaccctgagaggcagaagcgacgccgacctggtggtgttcctgagccccctgaccaccttccaggaccagctgaacagaagaggcgagttcatccaggagatcagaagacagctggaggcctgccagagagagagagccttcagcgtgaagttcgaggtgcaggcccccagatggggcaaccccagagccctgagcttcgtgctgagcagcctgcagctgggcgagggcgtggagttcgacgtgctgcccgccttcgacgccctgggccagctgaccggcggctacaagcccaacccccagatctacgtgaagctgatcgaggagtgcaccgacctgcagaaggagggcgagttcagcacctgcttcaccgagctgcagagagacttcctgaagcagagacccaccaagctgaagagcctgatcagactggtgaagcactggtaccagaactgcaagaagaagctgggcaagctgcccccccagtacgccctggagctgctgaccgtgtacgcctgggagagaggcagcatgaagacccacttcaacaccgcccagggcttcagaaccgtgctggagctggtgatcaactaccagcagctgtgcatctactggaccaagtactacgacttcaagaaccccatcatcgagaagtacctgagaagacagctgaccaagcccagacccgtgatcctggaccccgccgaccccaccggcaacctgggcggcggcgaccccaagggctggagacagctggcccaggaggccgaggcctggctgaactacccctgcttcaagaactgggacggcagccccgtgagcagctggatcctgctggtgagaccccccgccagcagcctgcccttcatccccgcccccctgcacgaggcctag

SEQ ID NO: 129556 - protein, 687 aa, Artificial Sequence
  derived and/or modified sequence
MGNGESQLSSVPAQKLGWFIQEYLKPYEECQTLIDEMVNTICDVLQEPEQFPLVQGVAIGGSYGRKTVLRGNSDGTLVLFFSDLKQFQDQKRSQRDILDKTGDKLKFCLFTKWLKNNFEIQKSLDGFTIQVFTKNQRISFEVLAAFNALSLNDNPSPWIYRELKRSLDKTNASPGEFAVCFTELQQKFFDNRPGKLKDLILLIKHWHQQCQKKIKDLPSLSPYALELLTVYAWEQGCRKDNFDIAEGVRTVLELIKCQEKLCIYWMVNYNFEDETIRNILLHQLQSARPVILDPVDPTNNVSGDKICWQWLKKEAQTWLTSPNLDNELPAPSWNVLPAPLFTTPGHLLDKFIKEFLQPNKCFLEQIDSAVNIIRTFLKENCFRQSTAKIQIVRGGSTAKGTALKTGSDADLVVFHNSLKSYTSQKNERHKIVKEIHEQLKAFWREKEEELEVSFEPPKWKAPRVLSFSLKSKVLNESVSFDVLPAFNALGQLSSGSTPSPEVYAGLIDLYKSSDLPGGEFSTCFTVLQRNFIRSRPTKLKDLIRLVKHWYKECERKLKPKGSLPPKYALELLTIYAWEQGSGVPDFDTAEGFRTVLELVTQYQQLCIFWKVNYNFEDETVRKFLLSQLQKTRPVILDPAEPTGDVGGGDRWCWHLLAKEAKEWLSSPCFKDGTGNPIPPWKVPVKVI

SEQ ID NO: 129557 - DNA, 2064 bp, Artificial Sequence
  derived and/or modified sequence
atgggcaacggcgaatcacaactgtcttccgtgccagctcagaagcttggctggttcattcaggaatacctaaagccatatgaagagtgccagacgcttatcgatgagatggtgaacactatctgcgacgtgctgcaagagcctgagcaattccccctggtgcagggggtcgctatcgggggctcgtacggccgtaaaacagtcctacggggcaattcagacgggacacttgtccttttctttagcgatctgaaacaatttcaggaccagaaaaggagtcagcgtgacattctggacaaaactggggacaagttaaaattctgtctctttactaaatggttgaagaataattttgaaattcagaagtctttggatgggtttacaatccaggtgttcaccaagaatcagaggatcagcttcgaggttttagccgctttcaacgccctaagcctaaacgacaacccttccccatggatctacagagagttgaaaagaagtctcgacaagaccaatgcttcccccggggagttcgctgtgtgcttcacagagctgcagcagaagttctttgacaatcgtcccgggaagcttaaagatctgattctcctgattaaacactggcatcagcaatgccaaaagaaaatcaaggatctgccttccctcagtccttacgctttagaactgttgaccgtgtatgcatgggaacaggggtgtcgaaaggacaactttgatatagccgaaggggtgcgaacagtgctcgaattgattaagtgtcaggagaaattatgtatttattggatggtcaattacaatttcgaggatgaaacaataagaaacatcttgttacaccagctgcaatctgccagacccgtgattctggaccccgtcgaccccaccaacaacgtgtccggggacaaaatatgctggcagtggctgaagaaagaagcccagacctggctgacatcacccaacttagataatgaacttccagctccatcatggaacgtcctaccggccccactgttcactactcctggacatctgttggacaaattcattaaggagtttttgcagcctaataaatgttttctggaacagatcgactcagctgtgaatattattcggacttttcttaaagagaattgtttccggcagagtaccgctaagatacagatcgttcgtggtggcagtaccgcaaaaggcactgcactcaaaacgggaagcgatgccgacctggtggtgtttcataatagcctgaaatcctacactagccagaaaaatgaacggcacaaaattgtcaaggaaatccatgaacagcttaaagctttttggagggagaaggaggaagagctggaagtgagcttcgagcctccaaagtggaaagccccacgagtgctttcctttagcttgaaatccaaagtgctcaatgaaagtgtatcgtttgacgttctgccggcatttaacgctctgggacagctctcaagcggcagtacgcccagtccggaggtgtatgcaggactaatcgatctatataagagttcagatttgcccggtggggaatttagtacttgttttacagtgttgcagaggaactttattcgctccaggcctaccaagctcaaagacctgatacgcctcgtgaagcattggtataaggagtgcgagcggaagcttaaaccaaaaggctccctgccacctaaatacgctcttgagctgctgaccatctatgcatgggagcaagggtcgggcgttcctgattttgacacagctgaaggttttcggaccgtgctggagctggtaacccagtatcagcagctctgtatcttctggaaggtcaactataacttcgaagatgagacagtgcggaaattccttttgtcccagctgcaaaaaacaaggcccgtcattttggacccggcagagcccaccggagacgtcggcggaggcgaccgatggtgttggcacctgttggccaaggaggcgaaggagtggctttcgagcccctgtttcaaggatgggaccggtaaccccattccaccatggaaagtcccagtgaaggtgatctag

SEQ ID NO: 129558 - DNA, 2064 bp, Artificial Sequence
  derived and/or modified sequence
atgggaaatggagagagccagctgagctctgtgcctgcccagaagctgggctggttcatccaggagtacctgaagccctatgaggagtgccagaccctgattgatgagatggtgaacaccatctgtgatgtgctgcaggagcctgagcagttccccctggtgcagggcgtggccatcggcggcagctatggcaggaagacagtgctgcggggcaacagtgatggcaccctggtgctcttcttcagtgacctgaagcagttccaggaccagaagaggagccagagggacatcctggacaagacaggagacaagctgaagttctgcctcttcaccaagtggctgaagaacaactttgagatccagaagagcctggatggcttcaccatccaggtgttcaccaagaaccagaggatcagctttgaggtgctggccgccttcaatgccctgagcctgaatgacaaccccagcccctggatctaccgggagctgaagaggagcctggacaagaccaatgccagccctggagaatttgctgtgtgcttcacagagctgcagcagaagttctttgacaacagacctgggaagctgaaggacctgatcctgctgatcaagcactggcaccagcagtgccagaagaagatcaaggacctgcccagcctgagcccctatgccctggagctgctgactgtgtatgcctgggagcagggctgcaggaaggacaactttgatattgctgagggcgtgaggacagtgctggagctgatcaagtgccaggagaagctgtgcatctactggatggtgaactacaactttgaagatgagaccatccggaacatcctgctgcaccagctgcagagcgcccggcctgtgatcctggaccctgtggaccccaccaacaacgtgtctggggacaagatctgctggcagtggctgaagaaggaggcccagacctggctgaccagccccaacctggacaatgagctgcctgcccccagctggaatgtgctgcctgcccccctcttcaccaccccaggccacctgctggacaagttcatcaaggagttcctgcagcccaacaagtgcttcctggagcagattgacagcgctgtgaacatcatccgcaccttcctgaaggagaactgcttccggcagagcacagccaagatccagatcgtgcggggcggcagcacagccaagggcacagccctgaagacaggcagtgatgctgacctggtggtgttccacaacagcctgaagagctacaccagccagaagaatgaaagacacaagatcgtgaaggagatccacgagcagctgaaggccttctggagggagaaggaggaggagctggaggtgtcctttgagccccccaagtggaaggccccccgggtgctgtccttcagcctgaagagcaaggtgctgaatgaatctgtgtcctttgatgtgctgcctgccttcaatgccctgggccagctgagcagcggcagcacccccagccctgaggtgtatgccggcctgattgacctgtacaagagcagtgacctgcccggcggggagttcagcacctgcttcaccgtgctgcagaggaacttcatccgcagccggcccaccaagctgaaggacctgatccggctggtgaagcactggtacaaggaatgtgagaggaagctgaagcccaagggcagcctgccccccaagtatgccctggagctgctgaccatctatgcctgggagcagggcagcggcgtgcctgactttgacacagctgagggcttcagaacagtgctggagctggtgacccagtaccagcagctgtgcatcttctggaaggtgaactacaactttgaagatgaaacagtgaggaagttcctgctgagccagctgcagaagaccaggcctgtgatcctggaccctgctgagcccactggagatgtgggcggcggggaccgctggtgctggcacctgctggccaaggaggccaaggagtggctgagcagcccctgcttcaaggatggcactggaaaccccatccccccctggaaggtgcctgtgaaggtgatctag

SEQ ID NO: 129559 - DNA, 2064 bp, Artificial Sequence
  derived and/or modified sequence
atgggcaacggcgagagccagctgagcagcgtgcccgcccagaagctcggatggttcattcaggagtacctaaagccttatgaagagtgccagacacttattgatgagatggtaaacacaatctgcgatgttctacaggaaccggaacaatttcccctggtccagggtgttgctatcggcggctcttatggccgaaaaaccgtactccgtgggaacagtgacggcactctcgtgctcttctttagcgacttgaagcagttccaagaccagaagcgatctcagcgggatatcctcgataagacaggggacaaactgaaattttgcctatttaccaagtggttgaagaacaatttcgagatccagaagtctctggatggctttacaatccaagtatttaccaagaaccagagaatctcttttgaagtgctggccgccttcaacgcactctctttgaacgacaatcctagcccatggatttacagggagctgaaaagatcacttgataaaaccaatgcgtccccgggtgagttcgcagtttgtttcacagagttacagcagaaattcttcgataatagaccaggcaaactcaaggacctgatcctgctaattaagcactggcaccagcaatgtcagaaaaaaattaaggatctcccgagcttgagcccatacgccctggagctgctgacggtttacgcttgggaacaggggtgtcggaaagataatttcgacatcgcagaaggagttcgaaccgtgctcgaactgattaaatgccaagagaagctgtgcatttattggatggtgaattataactttgaagatgaaacaatcaggaacattctccttcaccagctccagagcgctcgtcccgtgatcctcgatcccgtggacccaactaataacgtctcgggggataaaatctgctggcagtggctgaagaaggaagctcagacttggctgacatccccaaacctcgacaatgaactccccgcccccagctggaatgttttaccagctccactgttcacaacaccgggtcacctcctagacaaattcatcaaagaattcctgcaacctaacaaatgcttcttggagcaaatcgactcagccgtaaacatcattcgtaccttcctaaaagagaactgcttccggcagtcaacagcgaaaatccagatcgtcaggggaggctccactgcgaaagggactgccctcaaaaccggatccgacgcggacttggtagtctttcacaactctctgaagtcctatacctctcaaaaaaatgagcggcataaaatcgtgaaggaaattcacgagcaactaaaggccttctggcgtgagaaggaggaggaattggaagtctcttttgagcccccaaagtggaaggcccctagagtcctgtctttctccctaaagtcaaaggtgctaaatgagagtgtgagcttcgacgtgctaccagccttcaacgctcttgggcagctgtcttcaggctcaaccccttctcccgaagtatatgccggcctcatcgatctctataaatcatccgacctccccggaggcgagttttctacctgcttcaccgtgctccagagaaatttcatcaggagccgacccaccaagctgaaggacctgatcaggttggtgaagcactggtacaaagaatgcgagaggaagcttaaaccgaagggtagcctgccccccaagtacgcactcgaactcctcacaatttacgcttgggagcagggctctggagtgcctgactttgatacagctgaaggatttaggacagtgttggagctcgtgacacaatatcaacaattatgcattttctggaaggtgaattataacttcgaggacgagactgtcagaaaatttctccttagccaattgcagaaaaccaggcccgttatcttggaccccgctgagcctacaggagacgtcggcgggggcgataggtggtgttggcatcttctcgcaaaggaagctaaagagtggctgagttctccgtgtttcaaggacggcactggaaacccaatacccccatggaaggtccctgtgaaagtgatttag

SEQ ID NO: 129560 - DNA, 2064 bp, Artificial Sequence
  derived and/or modified sequence
atggggaacggtgagagccagctgagtagcgtgcctgctcaaaaacttggctggtttatccaagagtacctcaaaccttacgaagagtgccagacacttattgatgagatggtgaacactatctgcgacgtccttcaggagccagagcagttccctttggtccagggcgtggctatcggcggaagctacggacgaaagaccgtccttcgcggaaattccgatggaactctcgtcttgttttttagcgacttgaagcagttccaggatcagaagaggtctcagagggatattttggataaaactggggataagctgaaattctgcctgttcacaaaatggctgaagaacaattttgagattcagaagtccctggatggctttacgattcaggtctttaccaagaaccagaggattagcttcgaggtgctggccgcattcaatgccctctctcttaatgataatccttccccatggatctaccgcgagctcaaaagatccctcgataagacaaacgctagtcctggagagttcgccgtgtgctttacagagctgcagcagaagttcttcgacaatcggcctggcaagcttaaagacttaatcttgcttataaagcactggcatcagcagtgtcaaaaaaagattaaggatcttccatccctgagcccttatgctcttgagcttctgaccgtgtatgcttgggagcaaggttgtcggaaggacaatttcgacatagctgagggagtgaggactgttcttgaactaatcaagtgccaggaaaagctctgcatttactggatggtaaactataactttgaggacgaaactatccgaaatatcctcctgcaccagctgcaaagtgccaggcctgtcattctggacccagtggacccgacaaacaatgtgtccggtgataaaatctgctggcagtggttaaagaaagaagctcaaacctggctcacgtctcctaacctggacaatgagctgcctgctcctagttggaacgtgctgcccgcaccccttttcaccaccccaggccacctcctggacaagttcattaaggaatttcttcagcccaacaaatgtttcctggagcagatcgatagcgccgtcaacatcattcgcacttttctaaaggagaattgttttaggcagagcaccgctaaaattcagatcgtgcgtggtggtagcaccgctaaggggaccgctctgaagacgggatcagatgccgacctcgtggttttccataatagtctgaagtcttatacctcacagaaaaacgagagacacaaaatcgtcaaagaaatccatgagcaattgaaggcattctggcgtgaaaaagaggaagaactagaagtctcattcgagccaccaaagtggaaagcccctagagtgttgagcttcagcttaaaatcaaaagtgttgaatgagtccgtctccttcgatgtgctgccggcttttaatgctcttggccagctgagctctggaagtaccccctcacctgaggtttatgccggactcattgatctttataaatctagcgaccttccaggtggagaattttctacatgcttcacagtgctgcagcgcaattttatcagatccagaccgacaaaactgaaagatctaatcaggctcgtgaagcattggtataaagaatgcgaacgtaaattgaagcctaagggatcattgccccctaagtacgccttggaattattaacaatttacgcttgggagcaagggtcgggtgttcccgatttcgatactgctgaaggtttccgtactgttctggaactcgtgacacagtatcagcaactgtgtatcttctggaaggtcaattacaatttcgaggatgagaccgtgaggaaatttttactgtcccaactgcaaaagactcgcccagttattctagatcctgctgagcctactggtgacgtaggtgggggagaccgttggtgctggcacctgttggccaaggaggccaaggaatggctgagcagcccatgtttcaaagacggaacagggaatccaattccgccatggaaggtccctgtaaaggttatttag

SEQ ID NO: 129561 - DNA, 4734 bp, Artificial Sequence
  derived and/or modified sequence
aaactcactgcaaggggcagggcagagcctctgagcttaagttagttttgtttccctgtcccggatacaagagttggtaagctcgctgcagtgggtggagagaggcctctagacttcagtttcagtttcctggctctgggcagcagcaagaattcctctgcctcccatcctaccattcactgtcttgccggcagccagctgagagcaatgggaaatggggagtcccagctgtcctcggtgcctgctcagaagctgggttggtttatccaggaatacctgaagccctacgaagaatgtcagacactgatcgacgagatggtgaacaccatctgtgacgtcctgcaggaacccgaacagttccccctggtgcagggagtggccataggtggctcctatggacggaaaacagtcttaagaggcaactccgatggtacccttgtcctcttcttcagtgacttaaaacaattccaggatcagaagagaagccaacgtgacatcctcgataaaactggggataagctgaagttctgtctgttcacgaagtggttgaaaaacaatttcgagatccagaagtcccttgatgggttcaccatccaggtgttcacaaaaaatcagagaatctctttcgaggtgctggccgccttcaacgctctgagcttaaatgataatcccagcccctggatctatcgagagctcaaaagatccttggataagacaaatgccagtcctggtgagtttgcagtctgcttcactgaactccagcagaagttttttgacaaccgtcctggaaaactaaaggatttgatcctcttgataaagcactggcatcaacagtgccagaaaaaaatcaaggatttaccctcgctgtctccgtatgccctggagctgcttacggtgtatgcctgggaacaggggtgcagaaaagacaactttgacattgctgaaggcgtcagaaccgtactggagctgatcaaatgccaggagaagctgtgtatctattggatggtcaactacaactttgaagatgagaccatcaggaacatcctgctgcaccagctccaatcagcgaggccagtaatcttggatccagttgacccaaccaataatgtgagtggagataaaatatgctggcaatggctgaaaaaagaagctcaaacctggttgacttctcccaacctggataatgagttacctgcaccatcttggaatgttctgcctgcaccactcttcacgaccccaggccaccttctggataagttcatcaaggagtttctccagcccaacaaatgcttcctagagcagattgacagtgctgttaacatcatccgtacattccttaaagaaaactgcttccgacaatcaacagccaagatccagattgtccggggaggatcaaccgccaaaggcacagctctgaagactggctctgatgccgatctcgtcgtgttccataactcacttaaaagctacacctcccaaaaaaacgagcggcacaaaatcgtcaaggaaatccatgaacagctgaaagccttttggagggagaaggaggaggagcttgaagtcagctttgagcctcccaagtggaaggctcccagggtgctgagcttctctctgaaatccaaagtcctcaacgaaagtgtcagctttgatgtgcttcctgcctttaatgcactgggtcagctgagttctggctccacacccagccccgaggtttatgcagggctcattgatctgtataaatcctcggacctcccgggaggagagttttctacctgtttcacagtcctgcagcgaaacttcattcgctcccggcccaccaaactaaaggatttaattcgcctggtgaagcactggtacaaagagtgtgaaaggaaactgaagccaaaggggtctttgcccccaaagtatgccttggagctgctcaccatctatgcctgggagcaggggagtggagtgccggattttgacactgcagaaggtttccggacagtcctggagctggtcacacaatatcagcagctctgcatcttctggaaggtcaattacaactttgaagatgagaccgtgaggaagtttctactgagccagttgcagaaaaccaggcctgtgatcttggacccagccgaacccacaggtgacgtgggtggaggggaccgttggtgttggcatcttctggcaaaagaagcaaaggaatggttatcctctccctgcttcaaggatgggactggaaacccaataccaccttggaaagtgccggtaaaagtcatctaaaggaggcgttgtctggaaatagccctgtaacaggcttgaatcaaagaacttctcctactgtagcaacctgaaattaactcagacacaaataaaggaaacccagctcacaggagcttaaacagctggtcagccccctaagcccccactacaagtgatcctcaggcaggtaaccccagattcatgcactgtagggtgctgcgcagcatccctagtctctacccagtagatgccactagccctcctctcccagtgacaaccaaaagtcttcagacattgtcaaacgttcccctgggttcacagatctttctgcctttggcttttggctccaccctctttagctgttaatttgagtacttatggccctgaaagcggccacggtgcctccagatggcaggtttgcaatccaagcaggaagaaggaaaagatacccaaaggtcaagaacacagtgattttattagaagtttcatccgcaaattttcttccatttcattgctcagaaatgtcatgtggctacctgtaacttgaaggtggctacaaagatgactgtggacgtgggttgcactggccacccaaggatgtctgccacacctctccaaagccctccctacctaccaagatatacctgatatattccaccaggatatcctccctccagatatacttggttctctccaccaggttctttctttaaagcaggatttctcaactttgatacttactcacatttggggctagacagttctttgtttggaggctctcttgtgcattgtaggatgttgagcagcatctctggcctgtacccagtagatgccacccagttgtgacaattaaaagtgtcttgagactttatcatgtgtcttctgccctaggtgagaacccttgcactagaggaaccctacaccccaaccctggggggaatgtagggaagaggtggccaagccaaccgtggggttagctctaattattaagatatgcattataaataaataccaaaaaattgtctctggcaatagttaccttcccagatacaggtccccccttttttcccctaactcttttaagcaatgattgtaactattaggagacattgctctcccacgtatgtttttctttttagacaatgcagacaccaggaagttgtggagctaggatccatcctattgtcaatgagatgttctcatccagaagccatagaatcctgaataataattctaaaagaaacttctagagatcatctggcaatcgcttttaaagactcggctcaccgtgagaaagagtcactcacatccattcttcccttgatggtccctattcctccttcccttgcttcttggacttcttgaaatcaatcaagactgcaaaccctttcataaagtcttgccttgctgaactccctctctgcaggcagcctgcctttaaaaatagttgctgtcatccactttatgtgcatcttatttctgtcaacttgtattttttttcttgtatttttccaattagctcctcctttttccttccagtctaaaaaaggaatcctctgtgtcttcaaagcaaagctctttactttccccttggttctcataactctgtgatcttgctctcggtgcttccaactcatccacgtcctgtctgtttcctctgtatacaaaaccctttctgcccctgctgacacagacatcctctatgccagcagccagccaaccctttcattagaacttcaagctctccaaaggctcagattataactgttgtcatatttatatgaggctgttgtcttttccttctgagcctgcctttctcccccccacccaggagtatcctcttgccaaatcaaaagactttttccttgggctttagccttaaagatacttgaaggtctaggtgctttaacctcacataccctcacttaaacttttatcactgttgcatataccagttgtgatacaataaagaatgtatctggattttgtgcctagttcctagcacacagcttcaaaaattctagagtttcctgataggagtgtcttttgtattcataacaagcccttttcacccatgcctgggtttatgctaacaaggttacccatggtgggcccttagtttcaaggaaggagttggccaagccagaaagaccaagcatgtggttaaagcattggaattttcagccccatcccacccccaatctccaaggaggtgatggggctggaaattgagttcaattttaacatggccagtgatttaagcaatgctgcctatgtaaagaaaccccaataaaaactctggacagtgaggcttggggagcttcctgattggcagacattccaatgtactaggaaggtagcgcatcttgattccacagggacaaaggctcctgagctctgggcccttccagtgcttgccaccctacatactctttgtctggctcttcatttgtattctttataataaaatggtgattgtaagta

SEQ ID NO: 129562 - DNA, 2064 bp, Artificial Sequence
  derived and/or modified sequence
atgggcaacggcgagagccagctgagcagcgtgcccgcccagaagctgggctggttcatccaggagtacctgaagccctacgaggagtgccagaccctgatcgacgagatggtgaacaccatctgcgacgtgctgcaggagcccgagcagttccccctggtgcagggcgtggccatcggcggcagctacggcagaaagaccgtgctgagaggcaacagcgacggcaccctggtgctgttcttcagcgacctgaagcagttccaggaccagaagagaagccagagagacatcctggacaagaccggcgacaagctgaagttctgcctgttcaccaagtggctgaagaacaacttcgagatccagaagagcctggacggcttcaccatccaggtgttcaccaagaaccagagaatcagcttcgaggtgctggccgccttcaacgccctgagcctgaacgacaaccccagcccctggatctacagagagctgaagagaagcctggacaagaccaacgccagccccggcgagttcgccgtgtgcttcaccgagctgcagcagaagttcttcgacaacagacccggcaagctgaaggacctgatcctgctgatcaagcactggcaccagcagtgccagaagaagatcaaggacctgcccagcctgagcccctacgccctggagctgctgaccgtgtacgcctgggagcagggctgcagaaaggacaacttcgacatcgccgagggcgtgagaaccgtgctggagctgatcaagtgccaggagaagctgtgcatctactggatggtgaactacaacttcgaggacgagaccatcagaaacatcctgctgcaccagctgcagagcgccagacccgtgatcctggaccccgtggaccccaccaacaacgtgagcggcgacaagatctgctggcagtggctgaagaaggaggcccagacctggctgaccagccccaacctggacaacgagctgcccgcccccagctggaacgtgctgcccgcccccctgttcaccacccccggccacctgctggacaagttcatcaaggagttcctgcagcccaacaagtgcttcctggagcagatcgacagcgccgtgaacatcatcagaaccttcctgaaggagaactgcttcagacagagcaccgccaagatccagatcgtgagaggcggcagcaccgccaagggcaccgccctgaagaccggcagcgacgccgacctggtggtgttccacaacagcctgaagagctacaccagccagaagaacgagagacacaagatcgtgaaggagatccacgagcagctgaaggccttctggagagagaaggaggaggagctggaggtgagcttcgagccccccaagtggaaggcccccagagtgctgagcttcagcctgaagagcaaggtgctgaacgagagcgtgagcttcgacgtgctgcccgccttcaacgccctgggccagctgagcagcggcagcacccccagccccgaggtgtacgccggcctgatcgacctgtacaagagcagcgacctgcccggcggcgagttcagcacctgcttcaccgtgctgcagagaaacttcatcagaagcagacccaccaagctgaaggacctgatcagactggtgaagcactggtacaaggagtgcgagagaaagctgaagcccaagggcagcctgccccccaagtacgccctggagctgctgaccatctacgcctgggagcagggcagcggcgtgcccgacttcgacaccgccgagggcttcagaaccgtgctggagctggtgacccagtaccagcagctgtgcatcttctggaaggtgaactacaacttcgaggacgagaccgtgagaaagttcctgctgagccagctgcagaagaccagacccgtgatcctggaccccgccgagcccaccggcgacgtgggcggcggcgacagatggtgctggcacctgctggccaaggaggccaaggagtggctgagcagcccctgcttcaaggacggcaccggcaaccccatccccccctggaaggtgcccgtgaaggtgatctag

SEQ ID NO: 129563 - protein, 688 aa, Artificial Sequence
  derived and/or modified sequence
MATASGASDLSGSGAPPPGVGAQAAAAAEEEEREVVRVRVKKCESFLPPEFRSFAVDPQITSLDVLQHILIRAFDLSGKKNFGISYLGRDRLGQEVYLSLLSDWDLSTAFATASKPYLQLRVDIRPSEDSPLLEDWDIISPKDVIGSDVLLAEKRSSLTTAALPFTQSILTQVGRTLSKVQQVLSWSYGEDVKPFKPPLSDAEFHTYLNHEGQLSRPEELRLRIYHGGVEPSLRKVVWRYLLNVYPDGLTGRERMDYMKRKSREYEQLKSEWAQRANPEDLEFIRSTVLKDVLRTDRAHPYYAGPEDGPHLRALHDLLTTYAVTHPQVSYCQGMSDLASPILAVMDHEGHAFVCFCGIMKRLAANFHPDGRAMATKFAHLKLLLRHADPDFYQYLQEAGADDLFFCYRWLLLELKREFAFDDALRMLEVTWSSLPPDPPEHEVELVGPPSQVADAGFGGHRGWPVRQRHMLRPAGGGGSTFEDAVDHLATASQGPGGGGRLLRQASLDGLQQLRDNMGSRRDPLVQLPHPAALISSKSLSEPLLNSPDPLLSSFSHPDSPSSSSPPSTQEASPTGDMAVGSPLMQEVGSPKDPGKSLPPVPPMGLPPPQEFGRGNPFMLFLCLAILLEHRDHIMRNGLDYNELAMHFDRLVRKHHLGRVLRRARALFADYLQSEVWDSEEGAEATAAS

SEQ ID NO: 129564 - protein, 230 aa, Artificial Sequence
  derived and/or modified sequence
MATASGASDLSGSGAPPPGVGAQAAAAAEEEEREVVRVRVKHGDGAPGGLPHVFSPQKCESFLPPEFRSFAVDPQITSLDVLQHILIRAFDLSGKKNFGISYLGRDRLGQEVYLSLLSDWDLSTAFATASKPYLQLRVDIRPSEDSPLLEDWDIISPKDVIGSDVLLAEKRSSLTTAALPFTQSILTQVGRTLSKVQQVLSWSYGEDVKPFKPPLSDAEFHTYLNHEGQL

SEQ ID NO: 129565 - protein, 100 aa, Artificial Sequence
  derived and/or modified sequence
MATASGASDLSGSGAPPPGVGAQAAAAAEEEEREVVRVRVKKCESFLPPEFRSFAVDPQITSLDVLQHILIRAFDLSGPIARRLGHNQPQRCHWLRRVAG

SEQ ID NO: 129566 - protein, 434 aa, Artificial Sequence
  derived and/or modified sequence
MDYMKRKSREYEQLKSEWAQRANPEDLEFIRSTVLKDVLRTDRAHPYYAGPEDGPHLRALHDLLTTYAVTHPQVSYCQGMSDLASPILAVMDHEGHAFVCFCGIMKRLAANFHPDGRAMATKFAHLKLLLRHADPDFYQYLQEAGADDLFFCYRWLLLELKREFAFDDALRMLEVTWSSLPPDPPEHEVELVGPPSQVADAGFGGHRGWPVRQRHMLRPAGGGGSTFEDAVDHLATASQGPGGGGRLLRQASLDGLQQLRDNMGSRRDPLVQLPHPAALISSKSLSEPLLNSPDPLLSSFSHPDSPSSSSPPSTQEASPTGDMAVGSPLMQEVGSPKDPGKSLPPVPPMGLPPPQEFGRGNPFMLFLCLAILLEHRDHIMRNGLDYNELAMHFDRLVRKHHLGRVLRRARALFADYLQSEVWDSEEGAEATAAS

SEQ ID NO: 129567 - DNA, 2067 bp, Artificial Sequence
  derived and/or modified sequence
atggccaccgccagcggcgccagcgacctgagcggcagcggcgcccccccccccggcgtgggcgcccaggccgccgccgccgccgaggaggaggagagagaggtggtgagagtgagagtgaagaagtgcgagagcttcctgccccccgagttcagaagcttcgccgtggacccccagatcaccagcctggacgtgctgcagcacatcctgatcagagccttcgacctgagcggcaagaagaacttcggcatcagctacctgggcagagacagactgggccaggaggtgtacctgagcctgctgagcgactgggacctgagcaccgccttcgccaccgccagcaagccctacctgcagctgagagtggacatcagacccagcgaggacagccccctgctggaggactgggacatcatcagccccaaggacgtgatcggcagcgacgtgctgctggccgagaagagaagcagcctgaccaccgccgccctgcccttcacccagagcatcctgacccaggtgggcagaaccctgagcaaggtgcagcaggtgctgagctggagctacggcgaggacgtgaagcccttcaagccccccctgagcgacgccgagttccacacctacctgaaccacgagggccagctgagcagacccgaggagctgagactgagaatctaccacggcggcgtggagcccagcctgagaaaggtggtgtggagatacctgctgaacgtgtaccccgacggcctgaccggcagagagagaatggactacatgaagagaaagagcagagagtacgagcagctgaagagcgagtgggcccagagagccaaccccgaggacctggagttcatcagaagcaccgtgctgaaggacgtgctgagaaccgacagagcccacccctactacgccggccccgaggacggcccccacctgagagccctgcacgacctgctgaccacctacgccgtgacccacccccaggtgagctactgccagggcatgagcgacctggccagccccatcctggccgtgatggaccacgagggccacgccttcgtgtgcttctgcggcatcatgaagagactggccgccaacttccaccccgacggcagagccatggccaccaagttcgcccacctgaagctgctgctgagacacgccgaccccgacttctaccagtacctgcaggaggccggcgccgacgacctgttcttctgctacagatggctgctgctggagctgaagagagagttcgccttcgacgacgccctgagaatgctggaggtgacctggagcagcctgccccccgacccccccgagcacgaggtggagctggtgggcccccccagccaggtggccgacgccggcttcggcggccacagaggctggcccgtgagacagagacacatgctgagacccgccggcggcggcggcagcaccttcgaggacgccgtggaccacctggccaccgccagccagggccccggcggcggcggcagactgctgagacaggccagcctggacggcctgcagcagctgagagacaacatgggcagcagaagagaccccctggtgcagctgccccaccccgccgccctgatcagcagcaagagcctgagcgagcccctgctgaacagccccgaccccctgctgagcagcttcagccaccccgacagccccagcagcagcagcccccccagcacccaggaggccagccccaccggcgacatggccgtgggcagccccctgatgcaggaggtgggcagccccaaggaccccggcaagagcctgccccccgtgccccccatgggcctgccccccccccaggagttcggcagaggcaaccccttcatgctgttcctgtgcctggccatcctgctggagcacagagaccacatcatgagaaacggcctggactacaacgagctggccatgcacttcgacagactggtgagaaagcaccacctgggcagagtgctgagaagagccagagccctgttcgccgactacctgcagagcgaggtgtgggacagcgaggagggcgccgaggccaccgccgccagctag

SEQ ID NO: 129568 - DNA, 693 bp, Artificial Sequence
  derived and/or modified sequence
atggccaccgccagcggcgccagcgacctgagcggcagcggcgcccccccccccggcgtgggcgcccaggccgccgccgccgccgaggaggaggagagagaggtggtgagagtgagagtgaagcacggcgacggcgcccccggcggcctgccccacgtgttcagcccccagaagtgcgagagcttcctgccccccgagttcagaagcttcgccgtggacccccagatcaccagcctggacgtgctgcagcacatcctgatcagagccttcgacctgagcggcaagaagaacttcggcatcagctacctgggcagagacagactgggccaggaggtgtacctgagcctgctgagcgactgggacctgagcaccgccttcgccaccgccagcaagccctacctgcagctgagagtggacatcagacccagcgaggacagccccctgctggaggactgggacatcatcagccccaaggacgtgatcggcagcgacgtgctgctggccgagaagagaagcagcctgaccaccgccgccctgcccttcacccagagcatcctgacccaggtgggcagaaccctgagcaaggtgcagcaggtgctgagctggagctacggcgaggacgtgaagcccttcaagccccccctgagcgacgccgagttccacacctacctgaaccacgagggccagctgtag

SEQ ID NO: 129569 - DNA, 303 bp, Artificial Sequence
  derived and/or modified sequence
atggccaccgccagcggcgccagcgacctgagcggcagcggcgcccccccccccggcgtgggcgcccaggccgccgccgccgccgaggaggaggagagagaggtggtgagagtgagagtgaagaagtgcgagagcttcctgccccccgagttcagaagcttcgccgtggacccccagatcaccagcctggacgtgctgcagcacatcctgatcagagccttcgacctgagcggccccatcgccagaagactgggccacaaccagccccagagatgccactggctgagaagagtggccggctag

SEQ ID NO: 129570 - DNA, 1305 bp, Artificial Sequence
  derived and/or modified sequence
atggactacatgaagagaaagagcagagagtacgagcagctgaagagcgagtgggcccagagagccaaccccgaggacctggagttcatcagaagcaccgtgctgaaggacgtgctgagaaccgacagagcccacccctactacgccggccccgaggacggcccccacctgagagccctgcacgacctgctgaccacctacgccgtgacccacccccaggtgagctactgccagggcatgagcgacctggccagccccatcctggccgtgatggaccacgagggccacgccttcgtgtgcttctgcggcatcatgaagagactggccgccaacttccaccccgacggcagagccatggccaccaagttcgcccacctgaagctgctgctgagacacgccgaccccgacttctaccagtacctgcaggaggccggcgccgacgacctgttcttctgctacagatggctgctgctggagctgaagagagagttcgccttcgacgacgccctgagaatgctggaggtgacctggagcagcctgccccccgacccccccgagcacgaggtggagctggtgggcccccccagccaggtggccgacgccggcttcggcggccacagaggctggcccgtgagacagagacacatgctgagacccgccggcggcggcggcagcaccttcgaggacgccgtggaccacctggccaccgccagccagggccccggcggcggcggcagactgctgagacaggccagcctggacggcctgcagcagctgagagacaacatgggcagcagaagagaccccctggtgcagctgccccaccccgccgccctgatcagcagcaagagcctgagcgagcccctgctgaacagccccgaccccctgctgagcagcttcagccaccccgacagccccagcagcagcagcccccccagcacccaggaggccagccccaccggcgacatggccgtgggcagccccctgatgcaggaggtgggcagccccaaggaccccggcaagagcctgccccccgtgccccccatgggcctgccccccccccaggagttcggcagaggcaaccccttcatgctgttcctgtgcctggccatcctgctggagcacagagaccacatcatgagaaacggcctggactacaacgagctggccatgcacttcgacagactggtgagaaagcaccacctgggcagagtgctgagaagagccagagccctgttcgccgactacctgcagagcgaggtgtgggacagcgaggagggcgccgaggccaccgccgccagctag

SEQ ID NO: 129571 - DNA, 2067 bp, Artificial Sequence
  derived and/or modified sequence
atggctacagcatctggcgcttctgacctctccgggagcggtgctccaccccctggtgtgggtgcccaagctgctgcagccgctgaggaggaggagcgagaagtggtgcgggtcagagttaaaaaatgtgagagttttcttccccccgagtttagatctttcgctgttgacccccagattacctccctcgacgtcctgcagcacatcttaatcagggcattcgacctcagtgggaagaaaaactttggaatttcctatttaggccgggaccgtcttggccaggaagtttacctctcacttctctcagactgggacctttccaccgccttcgctaccgcctctaagccttatctccagctgagggtggatattcgccccagtgaggattcgccactgctggaggattgggacattatcagtccaaaagatgttatagggtccgatgtgcttctagcagaaaagagatccagcttgacaacggccgcactgccattcactcagtctatactgacccaagtaggtcgaaccttgagtaaggtgcagcaggtcctcagctggtcttacggggaggatgttaaacccttcaagccccccttgtccgatgccgagttccacacatatcttaatcatgagggtcagctcagccggcccgaagaacttcgactgaggatttaccacggcggtgtggaaccttctctgcggaaggtggtatggagatacctgctgaacgtctacccggatggactgacaggccgcgaaagaatggattacatgaaacgcaaatcccgcgagtacgagcagcttaagtccgagtgggcacagagagccaatcccgaggatcttgagtttatcaggagcaccgttctgaaggacgtcttacgaaccgacagggcccatccttattatgcaggcccagaagatggcccgcacttgcgggctctgcacgatttgctgaccacttacgctgtgactcatccccaggtcagctactgtcagggtatgtctgacctggcgtctccaatcctggcagtgatggaccatgaaggccacgcatttgtctgtttttgcgggataatgaaacggctcgccgcaaattttcaccctgacggccgcgctatggcaactaaattcgcgcaccttaaactcctcctgcgacacgccgaccccgatttttaccagtatctgcaggaggccggcgccgacgatctgttcttctgctatagatggctgcttctggagctcaaaagagagtttgcctttgatgacgcattgcgaatgctggaagttacatggtcctcgctgccccccgacccccccgagcatgaggtggaattggtgggcccaccttcccaggtagccgacgccggctttggtggccatagaggatggccagtcaggcagcgtcacatgctgcgtcccgctggcggaggaggttcaacatttgaagacgcagtggatcacctagcaacagcctcccagggacccggaggcgggggtcggctcctccggcaggcttctctcgacggtctgcaacaactccgagataacatgggtagcagaagggaccctcttgttcaattaccccaccccgctgctttgataagttctaaatcactctctgaacccctactcaatagcccggacccgctcctctccagcttttcccatccagattcccccagttcgtccagtccaccctcgacacaggaagcttctcccaccggcgacatggccgtgggatcccctctgatgcaagaggtggggtcacctaaagaccccggcaaatcactgccccccgtcccacccatgggccttccacctccccaggagtttggccgggggaatccgttcatgctctttctctgcctcgcgatcctgctggaacatcgggatcatataatgagaaatggacttgactacaatgagctggccatgcacttcgaccgtctagtgagaaagcatcatctgggacgcgtactcaggagggcacgggccttgtttgcagactacttgcaaagcgaagtgtgggatagcgaggagggcgcggaagccactgctgcaagttag

SEQ ID NO: 129572 - DNA, 693 bp, Artificial Sequence
  derived and/or modified sequence
atggcaaccgctagtggggcctctgacctgtcaggatcaggcgccccccccccaggagtcggggctcaggccgctgccgctgcagaggaagaggagcgggaggtcgtccgtgtcagagttaagcacggggatggcgcacctggcggcttgccacatgttttttcaccgcaaaagtgcgagtctttcttgccgcctgagtttcgctcttttgcagtcgaccctcagattacttcactggacgtcctccagcacatcctgattcgcgccttcgatctgagcggcaaaaagaacttcggaatcagttatctgggccgggacaggttgggtcaagaagtgtacctgtccttgctaagcgactgggacctttcaactgccttcgctaccgccagcaaaccttatcttcagttgagggtggatatcaggccatctgaagacagccctcttctggaagactgggatattatttcacccaaggacgtgattggctctgacgtgttactggctgagaaacgcagtagcttgaccacagccgcactcccttttacacagtccatcttgacccaggtgggtagaactctgtctaaagttcaacaggtgttgagctggagctatggcgaagacgtgaagcctttcaagccacctttgtctgatgccgaattccacacctatctgaaccatgaaggacagttgtag

SEQ ID NO: 129573 - DNA, 303 bp, Artificial Sequence
  derived and/or modified sequence
atggcaaccgcttcaggcgcatcagatctaagcggttcgggggcccctccaccgggagtgggcgcccaagcggctgcggccgcggaagaggaggaacgtgaggtggtacgggttagagtgaaaaagtgtgagagcttcctcccccccgaatttaggagcttcgccgtggatccgcagataacttctctggatgtcctgcagcacatcctgattagagctttcgatctctccgggcccattgctagaagacttggtcacaaccagccgcagcggtgtcattggctgcggcgcgtcgctggctag

SEQ ID NO: 129574 - DNA, 1305 bp, Artificial Sequence
  derived and/or modified sequence
atggattacatgaagcggaagtcaagggaatacgagcagttgaaatcggaatgggcccaaagagctaacccagaagaccttgagtttatcagaagcacagttcttaaggacgttcttcggaccgatcgagcacatccctactatgctggccctgaggatggaccacatctcagggcacttcacgacttgcttaccacctatgccgtgacacatccccaggtctcctactgccagggaatgtctgacctggcgtccccgattcttgccgtaatggaccatgagggccatgcctttgtgtgcttctgcgggatcatgaagcgcttagcagctaattttcatccggacggacgggctatggcaactaaattcgctcacttgaagctgctgctccgccatgcagatccagacttctaccagtaccttcaagaagctggagcggatgacttgtttttttgctatcgatggctgctcctggaactgaaacgtgagttcgcattcgacgacgcactccggatgctggaggtgacttggtccagtcttcccccagatccccctgagcacgaggtggaactggtggggccaccttcccaggtggctgacgccggatttggagggcatagaggatggcctgttcgacagagacatatgctgcgtcccgccgggggcgggggttctacatttgaagatgccgtggaccatctggccacggctagccagggccctgggggaggcggccgcctgttaagacaagcttcacttgatggactacagcagctcagagacaatatggggtcacggagggacccactggtacagctcccccacccagcggctctgattagctctaaatccctgtccgagccgctccttaacagtccggatccgctgctcagctccttttcccatccagatagtcctagttcttcctcaccaccgagcacccaggaggccagccctacaggggatatggccgtagggtctccgctgatgcaggaggtgggctcccccaaggatcctggtaaaagcctaccccctgtgccccccatgggcctgccacccccacaagagttcggcaggggtaatccatttatgctgttcctctgtttggccatcttgctggagcacagagatcatatcatgaggaacggcttagactacaatgagctggccatgcactttgacagactggtgcggaagcaccatctaggaagggtcctgcgccgggcccgggccctcttcgcggactatttgcaaagcgaggtgtgggattccgaagaaggggctgaggcaacggcggctagctag

SEQ ID NO: 129575 - DNA, 2067 bp, Artificial Sequence
  derived and/or modified sequence
atggccacagccagcggggccagtgacctgagcggcagcggggcccctcctcctggggtgggcgcccaggccgctgctgctgctgaggaggaggagcgggaggtggtgcgggtgcgggtgaagaagtgtgagagcttcctgcccccagagttccgcagctttgctgtggacccccagatcaccagcctggatgtgctgcagcacatcctgatccgggcctttgacctgagcggcaagaagaactttggcatctcctacctgggccgggaccggctgggccaggaggtgtacctgagcctgctgagtgactgggacctgagcacagcctttgccacagccagcaagccctacctgcagctgcgggtggacatccggcccagcgaggacagccccctgctggaggactgggacatcatcagccccaaggatgtgattggaagtgatgtgctgctggccgagaagaggagcagcctgaccacagctgccctgcccttcacccagagcatcctgacccaggtgggccgcaccctgagcaaggtgcagcaggtgctgtcctggagctatggagaagatgtgaagcccttcaagccacccctgagtgatgctgagttccacacctacctgaaccacgagggccagctgagcaggcctgaggagctgcggctgcgcatctaccacggcggcgtggagcccagcctgaggaaggtggtgtggagatacctgctgaatgtgtacccagatggcctgaccggccgggagaggatggactacatgaagaggaagagccgggagtatgagcagctgaagtctgagtgggcccagagggccaaccctgaggacctggagttcatccgcagcacagtgctgaaggatgtgctgaggacagaccgggcccacccctactatgccggcccagaagatggcccccacctgcgggccctgcatgacctgctgaccacctatgctgtgacccacccccaggtgtcctactgccagggcatgtctgacctggccagccccatcctggccgtgatggaccacgagggccacgcctttgtgtgcttctgtggcatcatgaagaggctggccgccaacttccacccagatggccgggccatggccaccaagtttgcccacctgaagctgctgctgcggcatgctgaccctgacttctaccagtacctgcaggaggccggggctgatgacctcttcttctgctaccgctggctgctgctggagctgaagcgggagtttgcctttgatgatgccctgaggatgctggaggtgacctggagcagcctgcccccagaccccccagagcacgaggtggagctggtgggcccccccagccaggtggctgatgctggctttggaggccaccggggctggcctgtgcggcagaggcacatgctgcggcctgctgggggcggcggcagcacctttgaagatgctgtggaccacctggccacagccagccagggccctgggggcggcggccgcctgctgcggcaggccagcctggatggcctgcagcagctgcgggacaacatgggcagccggcgggaccccctggtgcagctgccccaccctgctgccctgatcagcagcaagagcctgtctgagcccctgctgaacagcccagaccccctgctgagcagcttcagccacccagacagccccagcagcagcagcccccccagcacccaggaggccagccccaccggggacatggctgtgggcagccccctgatgcaggaggtgggcagccccaaggaccccgggaagagcctgccccctgtgccccccatgggcctgcccccaccccaggagtttggccggggcaaccccttcatgctgttcctgtgcctggccatcctgctggagcaccgggaccacatcatgagaaatggcctggactacaatgagctggccatgcactttgaccggctggtgaggaagcaccacctgggccgggtgctgcggcgggcccgggccctgtttgctgactacctgcagagcgaggtgtgggacagcgaggagggcgctgaggccacagctgccagctag

SEQ ID NO: 129576 - DNA, 693 bp, Artificial Sequence
  derived and/or modified sequence
atggccacagccagcggggccagtgacctgagcggcagcggggcccctcctcctggggtgggcgcccaggccgctgctgctgctgaggaggaggagcgggaggtggtgcgggtgcgggtgaagcatggagatggagcccctgggggcctgccccacgtgttcagcccccagaagtgtgagagcttcctgcccccagagttccgcagctttgctgtggacccccagatcaccagcctggatgtgctgcagcacatcctgatccgggcctttgacctgagcggcaagaagaactttggcatctcctacctgggccgggaccggctgggccaggaggtgtacctgagcctgctgagtgactgggacctgagcacagcctttgccacagccagcaagccctacctgcagctgcgggtggacatccggcccagcgaggacagccccctgctggaggactgggacatcatcagccccaaggatgtgattggaagtgatgtgctgctggccgagaagaggagcagcctgaccacagctgccctgcccttcacccagagcatcctgacccaggtgggccgcaccctgagcaaggtgcagcaggtgctgtcctggagctatggagaagatgtgaagcccttcaagccacccctgagtgatgctgagttccacacctacctgaaccacgagggccagctgtag

SEQ ID NO: 129577 - DNA, 303 bp, Artificial Sequence
  derived and/or modified sequence
atggccacagccagcggggccagtgacctgagcggcagcggggcccctcctcctggggtgggcgcccaggccgctgctgctgctgaggaggaggagcgggaggtggtgcgggtgcgggtgaagaagtgtgagagcttcctgcccccagagttccgcagctttgctgtggacccccagatcaccagcctggatgtgctgcagcacatcctgatccgggcctttgacctgagcggccccatcgcccggcggctgggccacaaccagccccagcgctgccactggctgcggcgggtggccggctag

SEQ ID NO: 129578 - DNA, 1305 bp, Artificial Sequence
  derived and/or modified sequence
atggactacatgaagaggaagagccgggagtatgagcagctgaagtctgagtgggcccagagggccaaccctgaggacctggagttcatccgcagcacagtgctgaaggatgtgctgaggacagaccgggcccacccctactatgccggcccagaagatggcccccacctgcgggccctgcatgacctgctgaccacctatgctgtgacccacccccaggtgtcctactgccagggcatgtctgacctggccagccccatcctggccgtgatggaccacgagggccacgcctttgtgtgcttctgtggcatcatgaagaggctggccgccaacttccacccagatggccgggccatggccaccaagtttgcccacctgaagctgctgctgcggcatgctgaccctgacttctaccagtacctgcaggaggccggggctgatgacctcttcttctgctaccgctggctgctgctggagctgaagcgggagtttgcctttgatgatgccctgaggatgctggaggtgacctggagcagcctgcccccagaccccccagagcacgaggtggagctggtgggcccccccagccaggtggctgatgctggctttggaggccaccggggctggcctgtgcggcagaggcacatgctgcggcctgctgggggcggcggcagcacctttgaagatgctgtggaccacctggccacagccagccagggccctgggggcggcggccgcctgctgcggcaggccagcctggatggcctgcagcagctgcgggacaacatgggcagccggcgggaccccctggtgcagctgccccaccctgctgccctgatcagcagcaagagcctgtctgagcccctgctgaacagcccagaccccctgctgagcagcttcagccacccagacagccccagcagcagcagcccccccagcacccaggaggccagccccaccggggacatggctgtgggcagccccctgatgcaggaggtgggcagccccaaggaccccgggaagagcctgccccctgtgccccccatgggcctgcccccaccccaggagtttggccggggcaaccccttcatgctgttcctgtgcctggccatcctgctggagcaccgggaccacatcatgagaaatggcctggactacaatgagctggccatgcactttgaccggctggtgaggaagcaccacctgggccgggtgctgcggcgggcccgggccctgtttgctgactacctgcagagcgaggtgtgggacagcgaggagggcgctgaggccacagctgccagctag

SEQ ID NO: 129579 - DNA, 2067 bp, Artificial Sequence
  derived and/or modified sequence
atggccaccgccagcggcgccagcgacctgagcggcagcggcgcccctccccccggcgttggcgcccaggctgccgccgctgccgaggaagaggagcgggaggtggtgcgtgtacgggttaagaagtgtgaatcattcttgccccctgaatttcgctcctttgccgtggacccgcagattacatccctcgatgtcttacaacacatcttgattcgcgctttcgacttaagcggcaagaaaaatttcggaataagttacctcgggcgcgataggctgggccaggaagtgtacctgagcctcctttctgactgggacctatcaacagcctttgccactgcgtcaaaaccctatctccagctgagggttgacatcagacctagtgaagattcccccctcttggaggactgggatataatcagcccaaaagacgtgattgggtcagacgtgctcctggccgaaaagagatcatccctcacaaccgcagccttgccttttacacagtcaatcctgacacaggttggccgtaccctttccaaagtgcagcaagttctgagctggtcatacggtgaggacgtgaagccttttaagccccctctctccgacgcagagtttcacacttatctgaaccatgagggacagcttagcagacctgaggagttgagacttcgcatttatcacggcggcgtcgaacctagcctgcggaaggtggtgtggaggtacctgctaaacgtttaccctgacgggcttacgggaagagagaggatggattatatgaaacgcaaaagccgtgagtatgagcaactgaaatctgaatgggcccaaagagctaatccagaggacttggaatttattaggtccaccgtgttgaaggatgtgctgagaaccgatcgcgctcacccctattacgccgggcctgaggatggaccccatctacgggcactgcacgatctgttaactacgtacgctgtgactcacccccaggtgagttattgccagggaatgtcagacctggccagcccaatactggccgtgatggaccacgagggacacgcgtttgtctgcttttgcggcataatgaagcgactggccgccaattttcaccctgacggacgcgcaatggccaccaagttcgctcacctgaaattactactccgccacgctgaccctgatttttatcagtacctgcaggaagcgggagccgatgatcttttcttttgttaccgatggctgttgttggagctaaagcgggaatttgctttcgacgatgctctccgaatgctggaggtcacttggagctccctgccacccgaccctcccgaacacgaagtggagttggtgggtccaccttcccaagtggctgacgcgggctttggaggccatcgtgggtggccagtacgccagcgccacatgctgcggcctgcgggcggcgggggttccactttcgaagatgctgttgaccacttggccacagcctcgcaggggcccggaggcggtgggaggcttctgagacaagctagcctcgatggtctacagcagcttcgggataacatgggctctcggagagacccactggtgcagttaccacatcctgccgcccttatcagctcaaaatcactgtctgagcccctgcttaactctccggacccactgctctctagtttctctcatccggattcccctagttcttccagccccccgtctacacaggaagcgtcacccacaggagacatggctgtcgggtccccactgatgcaggaggtgggatctccgaaggaccccggtaaaagtctgccccctgttcctccaatgggacttccaccacctcaggaatttggacgcgggaacccattcatgttatttctgtgcctcgccattttgctcgagcacagagatcatattatgcggaatggattggactataacgagctggcaatgcattttgaccgtctcgtgagaaaacaccatctcggccgcgtcctccggcgggctagggctctcttcgctgattacctccagtcagaggtatgggattcagaggagggcgcagaggccaccgccgcttcctag

SEQ ID NO: 129580 - DNA, 693 bp, Artificial Sequence
  derived and/or modified sequence
atggccaccgccagcggcgccagcgacctgagcggcagcggcgccccaccccccggcgtaggcgcacaagcagccgcagctgccgaggaagaagagagggaagttgtgagagtgagagttaagcacggtgacggagcgcctggaggattgccacatgtgttcagcccccaaaaatgcgaatccttcttgcctcctgaatttagaagtttcgctgttgaccctcaaatcacatcccttgacgttcttcagcacattctaatccgcgcatttgatttgagcggaaaaaagaattttggaatctcatatcttggccgggatcgactgggacaagaagtgtacctctctctcctgagcgactgggacctaagcacagccttcgctaccgcaagcaagccttaccttcagttgcgggtcgatattcgtccttccgaagattccccattgctggaggattgggatattattagccccaaagacgtgatcggctctgatgtgcttctcgctgaaaaaagaagctctctgacgaccgcagcactgcccttcacccagtcgatactgacacaagtgggcaggactctgtctaaagtgcagcaggtgctgtcctggtcttacggcgaggacgttaagccctttaagccccccttgagcgatgccgaattccacacttacctcaatcacgagggacagctttag

SEQ ID NO: 129581 - DNA, 303 bp, Artificial Sequence
  derived and/or modified sequence
atggccaccgccagcggcgccagcgacctgagcggcagcggcgcccccccaccaggcgttggcgcgcaggctgccgcggctgccgaggaagaggaacgagaagtagtgagagtgagggtaaaaaagtgtgagagcttcctgccgcccgagtttcgaagctttgcagttgatccgcagattacttctctggacgtgctgcagcatatccttatacgcgcgttcgacttgtcagggcccatcgcccgccggctcggccacaaccagcctcagcgctgtcattggcttcggcgtgtggcaggatag

SEQ ID NO: 129582 - DNA, 1305 bp, Artificial Sequence
  derived and/or modified sequence
atggactacatgaagcggaagagccgggagtacgagcagctgaagagtgagtgggcacagagagccaaccctgaggacctcgaatttatccggtcaactgtcttgaaggatgtgttaagaacagatcgggctcacccttactacgcaggcccagaggacggaccacacctgagggcccttcacgatctcctgacaacatatgctgtgacccatccccaggtttcatattgtcagggcatgtctgacctggcgagtccaatccttgcggtgatggatcatgaaggacacgcgttcgtctgcttttgtgggatcatgaagcgcttggccgccaacttccaccctgacgggagagcgatggccacaaaattcgcccacctgaaacttctgctgcgccatgccgacccagatttttatcagtatctgcaggaggctggtgctgacgatctgttcttttgttaccgctggctattactagagttgaagcgcgaattcgcttttgatgatgccctgcggatgctagaggtgacctggtcttctctgccgcctgaccccccagaacacgaggtggaactggtcggccccccctcacaggtggccgatgctggattcggtggtcataggggctggcctgtgcggcaacgtcacatgctgaggcctgctggtgggggcggatccacatttgaggacgccgtggatcacttggccacggccagccaaggtccaggtggggggggcaggctgctcaggcaggcctctctggacggcctacagcagctgcgagacaacatgggcagccggcgcgaccccttggtgcagctccctcatccagccgctttgataagttccaagtctctcagcgaacccctcctcaactcacccgaccccttgctgtcgagcttcagccatcccgatagccccagttcatccagcccccctagcacgcaagaagccagcccaacaggcgatatggctgtgggctctcccctgatgcaagaggtggggtccccgaaggacccaggtaaatcactgccacctgtgcccccaatgggtctgccacctccacaagagttcggaagggggaatccttttatgctgttcttgtgccttgctatccttttggagcatagagaccatattatgcgcaacgggttggactacaacgaacttgcgatgcactttgacagacttgttcggaaacaccacctcggtcgcgttctccgaagagcccgagccctctttgccgactacctgcagagtgaagtttgggactccgaagaaggcgccgaagccaccgctgcctcatag

SEQ ID NO: 129583 - DNA, 2067 bp, Artificial Sequence
  derived and/or modified sequence
atggctacggcctctggcgcatcagatttgagcgggagcggcgctcctcctcctggcgtgggtgctcaggcagccgcagctgctgaggaggaggagcgagaggtcgtcagagttcgcgttaagaagtgcgaatcttttcttcctcctgagttcaggtctttcgcagtcgacccacagataacctcccttgacgtcctgcagcacattctcatcagggcattcgacctgtccggcaaaaagaattttgggatctcatatcttggacgggacagactgggccaggaggtgtatctgtctctcctaagcgattgggatctgtccacagcatttgccaccgccagtaagccatacttacagttaagggtggacatccgcccatctgaagactctcccctactggaggactgggatatcatcagccccaaggatgttattggaagtgatgtgcttctggcagagaaacggtcctctctcaccaccgccgcattgccgttcactcaatcaatcttaacccaggtaggcaggacgctaagcaaggtgcagcaggtgctgtcatggtcctacggggaagacgttaagccattcaagccccctctctctgacgcggaatttcacacttatttgaatcacgaaggtcagcttagcagacctgaagagctcaggttgcggatctaccacgggggagtcgaacccagcttgcggaaagtggtgtggaggtatcttctgaatgtttatccggatgggctgaccggaagggagaggatggattacatgaagagaaagtcccgcgagtacgaacagttaaagagtgaatgggcacagcgcgctaacccggaagatctggaatttatcagatcaaccgtgctaaaagatgtcctccggaccgacagagcccacccgtattatgctgggcctgaagacgggccacacctacgcgctctgcacgacctcctgactacatacgccgtgacccatccgcaagtcagctactgtcaagggatgtcagacctcgccagccctattttggcagtcatggaccatgaagggcatgcattcgtatgcttttgcggcattatgaagaggctggcagccaacttccacccagacggcagggccatggccacaaagttcgcccacctaaaacttctattgagacacgcagatcctgatttctaccagtatttgcaggaagctggagccgacgacctgttcttttgttacagatggctccttctggaactgaaaagagagttcgccttcgatgatgcattgcggatgttggaagttacatggtcttccctcccgcctgatcccccagagcatgaggtggagcttgttgggccaccctcacaggtggccgatgccggatttggcggtcatcgaggatggccagtacgccagcgccatatgctgcggcctgccggaggcggaggatccacatttgaagacgctgttgaccatctcgcaactgctagtcagggaccagggggtggaggaagattattgagacaggcctccttggatgggctgcagcagctgcgcgataatatggggtccaggcgggacccgttagtccaacttccccaccccgcagcactgataagctcgaagtcgctgtcagaaccactgcttaattccccagatcctctcctcagtagcttcagccaccccgatagtccttcttcatcgagcccgccaagcacccaagaagcttcaccaaccggggatatggcagtgggttcccctctcatgcaagaggttggcagccctaaagatccaggaaagtccttacccccagtgccaccgatgggcctcccaccaccgcaggagttcggcaggggcaatccgtttatgctgttcctctgtctcgccatcctgctggagcaccgtgatcatatcatgcggaatggactcgactataacgaactggcgatgcatttcgatcgacttgttagaaaacatcatctgggcagagtgctgcgtcgagccagagctctgtttgcagattacttacagtctgaagtgtgggattctgaggaaggagccgaagcaactgctgcctcatag

SEQ ID NO: 129584 - DNA, 693 bp, Artificial Sequence
  derived and/or modified sequence
atggccacagcctctggagcctccgatttgagtggctcaggcgctccccctcccggagtgggcgctcaggcagcagctgctgctgaagaggaagagagagaggtggtgagagttagagtgaaacatggggacggcgcacctggtggcctcccccacgtcttttctccccaaaagtgcgaatcctttttacccccagaattcagatcttttgcagtcgacccccagatcacaagcttggacgtgttgcagcacatcttgatcagagcatttgatctgtccggcaaaaaaaactttggtatctcttacctgggcagggatcgcctgggccaggaggtctatctaagcctactaagcgattgggacttgtctactgctttcgccaccgccagcaaaccttacctgcaactcagagtggacatccggccttctgaagatagccccctcctcgaagattgggatatcattagtccgaaggacgtgatcggctccgatgtgttactggcagagaaacgctcgtcccttaccaccgctgccttgccattcacccagagcattctgacccaagtcggacgcaccctgtcaaaggttcagcaagttctcagttggtcctatggcgaggatgtaaagccctttaaacctcctttgtccgacgcggaatttcatacgtacctcaaccacgagggtcagctctag

SEQ ID NO: 129585 - DNA, 303 bp, Artificial Sequence
  derived and/or modified sequence
atggcgactgcttccggggctagcgatctctctggttccggagctccccctcctggagtcggtgctcaggccgctgccgctgccgaggaagaggagcgcgaggttgtccgcgtgagggtgaaaaaatgcgagtcctttctcccacctgagttccgttcatttgcagtcgacccgcagattacctccctagatgtgctacagcacatcctcatccgtgcgttcgacctctctgggccaatcgcacgcaggttgggccacaatcagccccagcgctgccactggctgcggagggtagcagggtag

SEQ ID NO: 129586 - DNA, 1305 bp, Artificial Sequence
  derived and/or modified sequence
atggactatatgaaacgcaaatcacgcgaatatgagcagctaaaatcggagtgggcacagcgcgctaatcccgaagacctggaatttatccgcagtactgtgctgaaagacgttttgcggactgaccgcgctcatccatattacgccggacctgaagatgggcctcatctgagagcactgcacgatctgctaactacctatgccgtgactcacccacaggtgtcctattgtcagggtatgagcgatttggcatctccaatcctagcggtcatggaccacgagggccatgcattcgtctgcttttgtggaatcatgaaaaggctggctgcaaattttcatcctgatgggagggcaatggcgaccaagttcgcccatctgaagctactgttgcgccatgcagatcctgacttttatcagtaccttcaggaagcaggcgctgatgacctgtttttctgctataggtggctgttgctcgaactgaagcgcgaattcgctttcgacgatgccctcagaatgctggaagtgacctggtccagcttgccacccgacccacccgaacacgaggttgagctcgtgggccctccgagtcaagttgccgacgccggtttcggtggtcacaggggctggccagtgcgacagagacatatgttacgccctgcaggcggtggcggaagtaccttcgaggacgcagtagaccacctggctactgcaagccaggggcctgggggaggcggacgcttgttaaggcaagcatccctggacggcttgcagcagctgagagacaacatgggctctcgaagggatcccctagtacaattgccacatcccgctgcattaatcagctctaagtctctgtctgaacctctcctgaactcacccgacccccttctatcctctttttcccacccagattccccgtccagcagctctccccctagcacacaggaggcaagcccaaccggtgacatggccgtgggaagcccgctgatgcaagaagtggggagtcctaaggatcctggcaaaagtctgcctcccgtccccccaatgggcctgccaccccctcaggagttcggtcggggaaatccatttatgctgttcctgtgtttggcaattcttttagagcatagagaccacattatgagaaacggcttggactataacgaactggccatgcattttgacaggctggtacgaaagcaccacctgggacgggtcttgcggcgagccagggccctattcgcagattatttgcagagtgaggtctgggattccgaagagggcgcagaagccactgccgcatcctag

SEQ ID NO: 129587 - DNA, 4042 bp, Artificial Sequence
  derived and/or modified sequence
cgtcagtttaacacctccgtgaatccggaagtatgctgtcaaaacaaccaaaccacggggctgggggaggcggggcctcagtaggcgtctgcacgctagctgaaatagagcaaaatgcccgacttttgggggcggggctcctggcaacagcactctaggcgcaggcgcagaggcgacctccaggcagggccaggtgggagggacggtggggggtagggtcgcgcggcgccctctgcgcctgcgccccggcacgaggtggggcggcgggcgtcagtacagtagagtgtgcgccggggtggggggcaacggtcagccgtcaccctgagacgggcggcggcgggatggcaacagcctccggggcctcggacttgtctggctccggagcgcccccgcccggtgtgggagctcaggcggcggcggccgctgaggaggaggagcgagaggtggtgcgggtccgagtcaagaaatgtgagagcttcttgccgccagagttccgctcttttgctgtagatccccagatcacctcgctcgacgtgttgcagcacatcctcatccgagcctttgatttgagtgggaagaagaactttggcatcagctacctgggccgggaccggctaggacaggaagtttacctctcacttctatctgactgggacctcagcacagcctttgccactgcctccaaaccttacctgcaattgcgtgtagatattcggccctcggaggacagcccattgctagaagactgggacataatcagccccaaagatgtcattggctccgacgtgttgctggctgagaaacggtcatcactgacgactgccgccctgccctttacacagtccatcctcactcaggtgggccgtaccttgtctaaggtccaacaagtgctgagctggtcgtatggggaagatgtcaagcccttcaagccacccctgagcgatgctgagtttcacacgtacctgaaccacgagggccagctctcccgacccgaggagttgcgcctgcggatctatcatggcggtgtggagccctcgctgcgaaaggtggtgtggcggtacctgctgaacgtgtatccagatggactgacaggccgagagcggatggactacatgaaacgcaagagccgcgagtatgagcagctcaagagcgagtgggcccagcgagcgaaccctgaggacctggaattcatccgcagcacggtcctcaaggatgtactgcgcactgaccgggcccacccctactatgcggggcctgaggatggcccacatctacgggcgctgcacgacctgctcaccacctatgccgttacccacccacaggtgtcctactgccagggcatgagtgaccttgcctcacccatcctcgctgtcatggaccatgagggccatgcctttgtttgcttttgtggcatcatgaaacgcctggccgccaacttccaccctgacggccgcgccatggccaccaagtttgcacacttgaagctgttgctgcgacacgctgaccctgacttttatcaatacctgcaagaggcaggcgctgatgacctcttcttctgttaccgctggctgctgctggaactcaagcgtgagttcgccttcgacgatgccctccgcatgcttgaggtcacttggagttcgctgccccctgatcctcctgaacatgaggtagagctggttggaccccccagccaagtggcagacgctggttttggtggccacagggggtggcccgtgcgacagaggcacatgctgaggcctgctggtggaggaggtagtacctttgaagatgctgttgaccacctggccacagccagtcaggggcctggtggtggggggcgtctcctgagacaggccagcttggatggcctccagcaactcagggataacatgggctccaggagggaccctctggtccagctgccccacccagctgcccttatcagctccaagtccctctctgagcctttattgaactccccagacccactgctctcctccttttcccaccctgattccccatcttcctcatctccaccatccacccaggaggcctctcccactggtgatatggctgtaggatcccccttgatgcaagaggtaggctccccgaaagaccctggaaagtccctgccacctgtaccaccaatgggcctgcccccaccccaggagtttggccgggggaacccattcatgctgttcctctgcctggccatcctgctggagcaccgcgaccacatcatgcgcaatgggctggattataatgagctggccatgcactttgaccgccttgtgcgaaaacaccacctggggcgcgtcctgcgccgggctagggctctctttgctgattacctgcagtcagaggtgtgggactcagaggagggggctgaggccacagccgcatcttgatcaggctttctcaagccctccatcggccccaccagatctccattctttgccatgagggccaacacatgagaccccacctccctccctgcctgccagccctagacttgttggagcatagagcccttcctccccaggcctaagtatgtggagctctgctttggcactgccccgcagaggccacgcctatttattctgtttctgttgttttgtttttaacaactatactttgcacacatgaaggtcactgtggtttgtgtgtttctctgcctcctccctgggttttgctgtagatggagtcctcaggggccctttacctgatggaggggaaatacttcacttggtggagagaggctccagcttcccccttgtgatggggagagtggatgctgacaatcagttcccaaaggtgagcccaggtggagcactgcttgaggaaggcctgagtctgtttttttggtacatccatcggcctgtaagggtctgtattatggctgtgaatatatgttttcaggacagccccctggatgagagataagagagttcctggctcaaaaaaggacaagattctttactgagattgggaagtatgggctacttagaaacgttggagcagccacccctggcattccacatgtcaccatttctaggatcttggcctctctgtgaggtttatgcaccaatgctggcagccctgggcaggggcctcggcctcctttttgttttccacttcagacaggtaccgtgcagatgttaacaaggtttgagcgaggtgcatctcacacaagtgtgaaagcccaatcatcacattgttgaattacaaaaggatctagggctcctattcttgtcacttgctttggagccagtttgaaagactggcctagcccatgcctagcggccctaaactgggattccagctcacagcacctgtcttaaccatttcagcagtagaaaccacttatttaccttctccatctcactaatatggacaaacaacaagcactgataaaacgcaggccctaatagaattcacttcgttatttggaggataatgatcaaaaaaaggtcctttttcccactgacatgctcagagggtgggattctctcacaggccaggtgctgtcatccacaaaggatgggtgaaataactggggtcctcaggtcacggtctagccacaccagcttctcccaagtactaaccaggcttgaccctgcttagcttcagaggtcagacaagatctggcatgttcaggatggtatggctgtagaccaggctgggttctggccagagctgttgcactaggcaatgctgccagagatgaggaggcatcagggcagtcatcccttctgctgtttgccccaagaatgccatacaaacctggggatgacccttaaaagtctcccgtcacccccagtattggggggaagctgactattcctcagatgatagcccagtcacttgaagaacaggacaagactattctgtgtctagggggctcaagcactgtgtgtgggtctaacgaatgcattttgtggaaatgggctcagactccccaaagggccatccaacctatgggagtgtctggccttctgaggtcctgaaatgtctcttttgtcagtaaacagctaataccctc

SEQ ID NO: 129588 - DNA, 691 bp, Artificial Sequence
  derived and/or modified sequence
atggcaacagcctccggggcctcggacttgtctggctccggagcgcccccgcccggtgtgggagctcaggcggcggcggccgctgaggaggaggagcgagaggtggtgcgggtccgagtcaagcatggtgatggggcccctggtggcctaccccatgtcttctctccccagaaatgtgagagcttcttgccgccagagttccgctcttttgctgtagatccccagatcacctcgctcgacgtgttgcagcacatcctcatccgagcctttgatttgagtgggaagaagaactttggcatcagctacctgggccgggaccggctaggacaggaagtttacctctcacttctatctgactgggacctcagcacagcctttgccactgcctccaaaccttacctgcaattgcgtgtagatattcggccctcggaggacagcccattgctagaagactgggacataatcagccccaaagatgtcattggctccgacgtgttgctggctgagaaacggtcatcactgacgactgccgccctgccctttacacagtccatcctcactcaggtgggccgtaccttgtctaaggtccaacaagtgctgagctggtcgtatggggaagatgtcaagcccttcaagccacccctgagcgatgctgagtttcacacgtacctgaaccacgagggccagctct

SEQ ID NO: 129589 - DNA, 2035 bp, Artificial Sequence
  derived and/or modified sequence
aacggtcagccgtcaccctgagacgggcggcggcgggatggcaacagcctccggggcctcggacttgtctggctccggagcgcccccgcccggtgtgggagctcaggcggcggcggccgctgaggaggaggagcgagaggtggtgcgggtccgagtcaagaaatgtgagagcttcttgccgccagagttccgctcttttgctgtagatccccagatcacctcgctcgacgtgttgcagcacatcctcatccgagcctttgatttgagtgggcccattgctagaagactgggacataatcagccccaaagatgtcattggctccgacgtgttgctggctgagaaacggtcatcactgacgactgccgccctgccctttacacagtccatcctcactcaggtgggccgtaccttgtctaaggtccaacaagtgctgagctggtcgtatggggaagatgtcaagcccttcaagccacccctgagcgatgctgagtttcacacgtacctgaaccacgagggccagctctcccgacccgaggagttgcgcctgcggatctatcatggcggtgtggagccctcgctgcgaaaggtggtgtggcggtacctgctgaacgtgtatccagatggactgacaggccgagagcggatggactacatgaaacgcaagagccgcgagtatgagcagctcaagagcgagtgggcccagcgagcgaaccctgaggacctggaattcatccgcagcacggtcctcaaggatgtactgcgcactgaccgggcccacccctactatgcggggcctgaggatggcccacatctacgggcgctgcacgacctgctcaccacctatgccgttacccacccacaggtgtcctactgccagggcatgagtgaccttgcctcacccatcctcgctgtcatggaccatgagggccatgcctttgtttgcttttgtggcatcatgaaacgcctggccgccaacttccaccctgacggccgcgccatggccaccaagtttgcacacttgaagctgttgctgcgacacgctgaccctgacttttatcaatacctgcaagaggcaggcgctgatgacctcttcttctgttaccgctggctgctgctggaactcaagcgtgagttcgccttcgacgatgccctccgcatgcttgaggtcacttggagttcgctgccccctgatcctcctgaacatgaggtagagctggttggaccccccagccaagtggcagacgctggttttggtggccacagggggtggcccgtgcgacagaggcacatgctgaggcctgctggtggaggaggtagtacctttgaagatgctgttgaccacctggccacagccagtcaggggcctggtggtggggggcgtctcctgagacaggccagcttggatggcctccagcaactcagggataacatgggctccaggagggaccctctggtccagctgccccacccagctgcccttatcagctccaagtccctctctgagcctttattgaactccccagacccactgctctcctccttttcccaccctgattccccatcttcctcatctccaccatccacccaggaggcctctcccactggtgatatggctgtaggatcccccttgatgcaagaggtaggctccccgaaagaccctggaaagtccctgccacctgtaccaccaatgggcctgcccccaccccaggagtttggccgggggaacccattcatgctgttcctctgcctggccatcctgctggagcaccgcgaccacatcatgcgcaatgggctggattataatgagctggccatgcactttgaccgccttgtgcgaaaacaccacctggggcgcgtcctgcgccgggctagggctctctttgctgattacctgcagtcagaggtgtgggactcagaggagggggctgaggccacagccgcatcttgatcaggctttctcaagccctccatcggccccaccagatctccattctttgccatgagggccaacacatgagaccccacctccctccc

SEQ ID NO: 129590 - DNA, 2128 bp, Artificial Sequence
  derived and/or modified sequence
agtacagtagagtgtgcgccggggtggggggcaacggtcagccgtcaccctgagacgggcggcggcgggatggcaacagcctccggggcctcggacttgtctggctccggagcgcccccgcccggtgtgggagctcaggcggcggcggccgctgaggaggaggagcgagaggtggtgcgggtccgagtcaagaaatgtgagagcttcttgccgccagagttccgctcttttgctgtagatccccagatcacctcgctcgacgtgttgcagcacatcctcatccgagcctttgatttgagtgggaagaagaactttggcatcagctacctgggccgggaccggctaggacaggaagtttacctctcacttctatctgactgggacctcagcacagcctttgccactgcctccaaaccttacctgcaattgcgtgtagatattcggccctcggaggacagtgggccgtaccttgtctaaggtccaacaagtgctgagctggtcgtatggggaagatgtcaagcccttcaagccacccctgagcgatgctgagtttcacacgtacctgaaccacgagggccagctctcccgacccgaggagttgcgcctgcggatctatcatggcggtgtggagccctcgctgcgaaaggtggtgtggcggtacctgctgaacgtgtatccagatggactgacaggccgagagcggatggactacatgaaacgcaagagccgcgagtatgagcagctcaagagcgagtgggcccagcgagcgaaccctgaggacctggaattcatccgcagcacggtcctcaaggatgtactgcgcactgaccgggcccacccctactatgcggggcctgaggatggcccacatctacgggcgctgcacgacctgctcaccacctatgccgttacccacccacaggtgtcctactgccagggcatgagtgaccttgcctcacccatcctcgctgtcatggaccatgagggccatgcctttgtttgcttttgtggcatcatgaaacgcctggccgccaacttccaccctgacggccgcgccatggccaccaagtttgcacacttgaagctgttgctgcgacacgctgaccctgacttttatcaatacctgcaagaggcaggcgctgatgacctcttcttctgttaccgctggctgctgctggaactcaagcgtgagttcgccttcgacgatgccctccgcatgcttgaggtcacttggagttcgctgccccctgatcctcctgaacatgaggtagagctggttggaccccccagccaagtggcagacgctggttttggtggccacagggggtggcccgtgcgacagaggcacatgctgaggcctgctggtggaggaggtagtacctttgaagatgctgttgaccacctggccacagccagtcaggggcctggtggtggggggcgtctcctgagacaggccagcttggatggcctccagcaactcagggataacatgggctccaggagggaccctctggtccagctgccccacccagctgcccttatcagctccaagtccctctctgagcctttattgaactccccagacccactgctctcctccttttcccaccctgattccccatcttcctcatctccaccatccacccaggaggcctctcccactggtgatatggctgtaggatcccccttgatgcaagaggtaggctccccgaaagaccctggaaagtccctgccacctgtaccaccaatgggcctgcccccaccccaggagtttggccgggggaacccattcatgctgttcctctgcctggccatcctgctggagcaccgcgaccacatcatgcgcaatgggctggattataatgagctggccatgcactttgaccgccttgtgcgaaaacaccacctggggcgcgtcctgcgccgggctagggctctctttgctgattacctgcagtcagaggtgtgggactcagaggagggggctgaggccacagccgcatcttgatcaggctttctcaagccctccatcggccccaccagatctccattctttgccatgagggccaacacatgagaccccacctccctccctgcctgccagccctagacttgttggagcatagag

SEQ ID NO: 129591 - protein, 189 aa, Artificial Sequence
  derived and/or modified sequence
MINTQDSSILPLSNCPQLQCCRHIVPGPLWCSDAPHPLSKIPGGRGGGRDPSLSALIYKDEKLTVTQDLPVNDGKPHIVHFQYEVTEVKVSSWDAVLSSQSLFVEIPDGLLADGSKEGLLALLEFAEEKMKVNYVFICFRKGREDRAPLLKTFSFLGFEIVRPGHPCVPSRPDVMFMVYPLDQNLSDED

SEQ ID NO: 129592 - DNA, 570 bp, Artificial Sequence
  derived and/or modified sequence
atgatcaacacccaggacagcagcatcctgcccctgagcaactgcccccagctgcagtgctgcagacacatcgtgcccggccccctgtggtgcagcgacgccccccaccccctgagcaagatccccggcggcagaggcggcggcagagaccccagcctgagcgccctgatctacaaggacgagaagctgaccgtgacccaggacctgcccgtgaacgacggcaagccccacatcgtgcacttccagtacgaggtgaccgaggtgaaggtgagcagctgggacgccgtgctgagcagccagagcctgttcgtggagatccccgacggcctgctggccgacggcagcaaggagggcctgctggccctgctggagttcgccgaggagaagatgaaggtgaactacgtgttcatctgcttcagaaagggcagagaggacagagcccccctgctgaagaccttcagcttcctgggcttcgagatcgtgagacccggccacccctgcgtgcccagcagacccgacgtgatgttcatggtgtaccccctggaccagaacctgagcgacgaggactag

SEQ ID NO: 129593 - DNA, 570 bp, Artificial Sequence
  derived and/or modified sequence
atgataaacacccaggattcctcaatacttcctttaagcaactgtccacaacttcagtgctgcagacacattgtccctggtccactttggtgctctgatgctccccaccccctgagtaaaatcccgggtggtcggggggggggccgggaccccagtttgtctgccctcatttataaagatgagaagctcactgtgacacaggatctgccagtaaatgatggcaagccacatattgtgcactttcagtacgaagtgacagaggtcaaagtgagttcttgggatgcagtgctcagcagtcagagcctatttgtggaaattcccgatggcctgttagccgacggcagcaaagagggcctgctggccctgttggaattcgccgaagagaagatgaaagttaattacgtattcatctgcttccgcaaggggagagaggatagggccccactcttaaagactttctcattcctaggttttgagattgtgcgccccggccacccgtgcgtgccctctagacccgatgtcatgtttatggtgtaccccctggaccagaatctgagcgacgaggactag

SEQ ID NO: 129594 - DNA, 570 bp, Artificial Sequence
  derived and/or modified sequence
atgatcaacacccaggacagcagcatcctgcccctgagcaactgcccccagctgcagtgctgccgccacatcgtgcccggccccctgtggtgcagtgatgccccccaccccctgagcaagatccctgggggccggggcggcggccgggaccccagcctgagcgccctgatctacaaggatgagaagctgactgtgacccaggacctgcctgtgaatgatggcaagccccacatcgtgcacttccagtatgaggtgacagaggtgaaggtgtcctcctgggatgctgtgctgagcagccagagcctgtttgtggagatcccagatggcctgctggctgatggcagcaaggagggcctgctggccctgctggagtttgctgaggagaagatgaaggtgaactacgtgttcatctgcttcaggaagggccgggaggaccgggcccccctgctgaagaccttctccttcctgggctttgagatcgtgcggcccggccacccctgtgtgcccagcaggccagatgtgatgttcatggtgtaccccctggaccagaacctgagtgatgaggactag

SEQ ID NO: 129595 - DNA, 570 bp, Artificial Sequence
  derived and/or modified sequence
atgatcaacacccaggacagcagcatcctgcccctgagcaactgcccacagctgcagtgttgtcgccacattgtaccaggacccctctggtgcagcgatgcccctcatcccctcagcaagatacctgggggtaggggagggggtagagaccccagcctgtcagccctgatttacaaggacgagaagttgacggtcacccaggacctcccagtgaacgatggcaagccgcacattgtccactttcagtatgaggtcactgaagtcaaagttagctcctgggacgccgtgctgagctcccagagcctctttgttgagatccccgatggcctgttggctgacgggagcaaggaaggcctcctggctctgctggagttcgctgaagaaaagatgaaagttaactacgtatttatctgtttccgcaagggaagggaagaccgcgccccactgctcaagactttctcttttctcggctttgagattgttcggcccggtcacccatgcgtcccaagcagaccagatgtgatgtttatggtataccccctggatcagaatttgtcagatgaggattag

SEQ ID NO: 129596 - DNA, 1934 bp, Artificial Sequence
  derived and/or modified sequence
atgcagatgaggcactcgggggcggggcggcggcggcggcggcggcggtggcggccggggagggtcagttggaggcaggcgctcgctgaggcaaaaggaggcgctcggcccgcggcctgacagggacttagcccgcagagatcgaccccgcgcgcgtgaccccacacccacccactcatccatctatccactccctgcgccgcctcctcccaccctgagcagagccgccgaggatgataaacacccaggacagtagtattttgcctttgagtaactgtccccagctccagtgctgcaggcacattgttccagggcctctgtggtgctccgatgcccctcacccactgtcgaagatccccggtgggcgagggggcggcagggatccttctctctcagctctaatatataaggacgagaagctcactgtgacccaggacctccctgtgaatgatggaaaacctcacatcgtccacttccagtatgaggtcaccgaggtgaaggtctcttcttgggatgcagtcctgtccagccagagcctgtttgtagaaatcccagatggattattagctgatgggagcaaagaaggattgttagcactgctagagtttgctgaagagaagatgaaagtgaactatgtcttcatctgcttcaggaagggccgagaagacagagctccactcctgaagaccttcagcttcttgggctttgagattgtacgtccaggccatccctgtgtcccctctcggccagatgtgatgttcatggtttatcccctggaccagaacttgtccgatgaggactaatagtcatagaggatgctttacccaagagccacagtgggggaagaggggaagttaggcagccctgggacagacgagagggctcctcgctgtctagggaaggacactgaggggctcagggtgagggttgcctattgtgttctcggagttgactcgttgaaattgttttccataaagaacagtataaacatattattcacatgtaatcaccaatagtaaatgaagatgtttatgaactggcattagaagctttctaaactgcgctgtgtgatgtgttctatctagcctaggggaggacattgcctagagggggagggactgtctgggttcaggggcatggcctggagggctggtgggcagcactgtcaggctcaggtttccctgctgttggctttctgttttggttattaagacttgtgtattttctttctttgcttcctgtcaccccaggggctcctgagtataggcttttcagtccctgggcagtgtccttgagttgttttttgacactcttacctgggcttctctgtgtgcatttgcgtctggcctggagtaagcaggtccgacccctccttctttacagcttagtgttattctggcatttggttaagctggcttaatctgtttaatgttatcagtacattttaaataggggcattgaaatttactcccaccaccagggcttttttgggggatgcctgggcctttaaaacactagccaaactctaattaattctcaaatcactgccaggagttcttgctcctggctgcaggcccaggccccaaggtctccttcttggggtcacaaacagcagtaaggaagaggaatatatagcaactcagggcctgggaattgtggggcaatccgttcttagggactggatacttctggctggctgagtatagtactagctgcctccccaccaggttccgagtagtgtctgagactctgctctgcagggcctagggtagcgctgggagtgtagaagtggcctgcccttaactgttttcactaaacagctttttctaaggggagagcaagggggagagatctagattgggtgagggggacggggatgtcagggaggcaagtgtgttgtgttactgtgtcaataaactgatttaaagttgtgg

SEQ ID NO: 129597 - DNA, 570 bp, Artificial Sequence
  derived and/or modified sequence
atgatcaatacacaagactcttctattcttccactgtctaattgcccccaacttcagtgctgtaggcacatagtacccggacctctgtggtgtagcgatgccccacaccccctctccaagataccaggaggcagagggggagggcgagatccaagcttgtccgcactaatttacaaggatgagaagctgaccgttacccaggacctgcccgtaaacgatggcaagccacacatagtacacttccagtacgaggttacagaggttaaggtttcttcctgggacgccgtactctcatctcagagccttttcgtggagataccagacgggctcttggctgacgggtctaaggaaggactgctggccctgctggagttcgccgaagagaagatgaaggtgaattatgtatttatctgtttccggaagggccgagaagatagggcccctttgctcaagacgttcagctttttgggctttgagatcgttcgcccaggtcacccttgcgtccccagcagaccagacgtgatgttcatggtgtatcctttagatcagaatctttctgacgaggactag

SEQ ID NO: 129598 - protein, 1023 aa, Artificial Sequence
  derived and/or modified sequence
MFHLRTCAAKLRPLTASQTVKTFSQNRPAAARTFQQIRCYSAPVAAEPFLSGTSSNYVEEMYCAWLENPKSVHKSWDIFFRNTNAGAPPGTAYQSPLPLSRGSLAAVAHAQSLVEAQPNVDKLVEDHLAVQSLIRAYQIRGHHVAQLDPLGILDADLDSSVPADIISSTDKLGFYGLDESDLDKVFHLPTTTFIGGQESALPLREIIRRLEMAYCQHIGVEFMFINDLEQCQWIRQKFETPGIMQFTNEEKRTLLARLVRSTRFEEFLQRKWSSEKRFGLEGCEVLIPALKTIIDKSSENGVDYVIMGMPHRGRLNVLANVIRKELEQIFCQFDSKLEAADEGSGDVKYHLGMYHRRINRVTDRNITLSLVANPSHLEAADPVVMGKTKAEQFYCGDTEGKKVMSILLHGDAAFAGQGIVYETFHLSDLPSYTTHGTVHVVVNNQIGFTTDPRMARSSPYPTDVARVVNAPIFHVNSDDPEAVMYVCKVAAEWRSTFHKDVVVDLVCYRRNGHNEMDEPMFTQPLMYKQIRKQKPVLQKYAELLVSQGVVNQPEYEEEISKYDKICEEAFARSKDEKILHIKHWLDSPWPGFFTLDGQPRSMSCPSTGLTEDILTHIGNVASSVPVENFTIHGGLSRILKTRGEMVKNRTVDWALAEYMAFGSLLKEGIHIRLSGQDVERGTFSHRHHVLHDQNVDKRTCIPMNHLWPNQAPYTVCNSSLSEYGVLGFELGFAMASPNALVLWEAQFGDFHNTAQCIIDQFICPGQAKWVRQNGIVLLLPHGMEGMGPEHSSARPERFLQMCNDDPDVLPDLKEANFDINQLYDCNWVVVNCSTPGNFFHVLRRQILLPFRKPLIIFTPKSLLRHPEARSSFDEMLPGTHFQRVIPEDGPAAQNPENVKRLLFCTGKVYYDLTRERKARDMVGQVAITRIEQLSPFPFDLLLKEVQKYPNAELAWCQEEHKNQGYYDYVKPRLRTTISRAKPVWYAGRDPAAAPATGNKKTHLTELQRLLDTAFDLDVFKNFS

SEQ ID NO: 129599 - DNA, 3072 bp, Artificial Sequence
  derived and/or modified sequence
atgttccacctgcgcacttgtgccgcaaagctgcgcccattgacagcctcccagaccgttaagacgttctcccaaaaccggccagcggctgccaggacatttcaacagatccgttgttacagtgctcctgtagccgctgaaccgttcctatccggaacttcatccaattacgtggaggaaatgtactgtgcctggcttgagaacccaaagtccgtgcacaagagctgggatattttctttcgcaataccaacgccggagcgccacccggaactgcttaccagagcccgctgccactgagtcgaggatctcttgccgcagtagcccacgcccagagcttagttgaggcccaacctaacgtggacaagcttgtagaagatcacctcgccgtacagtcattgatccgagcctaccagattcgaggccatcacgtggcccagcttgatccactcggcatactggacgccgacctcgattcttccgttcccgcagatatcatctcgtcaactgataaactggggttctatggactggacgaaagtgatctcgataaagtttttcatctgccgaccacaacattcataggaggccaagaatcagcccttcctctcagagagattataaggagactggagatggcctattgccaacacattggggtagagttcatgtttattaacgaccttgaacaatgccaatggattcgtcagaagttcgagacacccggaatcatgcagttcacaaacgaggagaagcgtacgttattagctagactcgtgcgcagtacccgatttgaggagtttttgcagcgcaaatggtcttctgaaaagagattcggactggaggggtgcgaggtcctgatccctgcactcaaaacaataatagacaaatcatcagaaaatggcgtcgactacgtcattatgggtatgccgcatcgcggaagactaaacgtgctcgcaaacgtgatcaggaaggagctggagcagatattttgtcagttcgattcaaaattggaggccgcagatgagggatctggcgatgtaaagtaccacttagggatgtaccaccggaggattaacagagtcaccgataggaatattacactcagtttagtcgccaacccttctcacctcgaggcggcagatcctgtagtcatggggaagacaaaagcggaacagttttactgcggagacaccgagggaaagaaggtgatgtccatcttgctgcatggcgacgcagccttcgctggccaggggattgtctacgagactttccacctgtcagacttgccctcatatacaacacacggcacagtgcacgtggttgtgaacaatcaaattggatttacaacagaccctcgaatggcacggtcatcaccttacccgaccgacgtagcaagagttgtcaacgctcctatattccatgttaatagcgacgacccggaggccgtcatgtatgtctgcaaagtggcagccgagtggcgctctacctttcacaaagacgtcgtggtagacctggtctgttatcgacgcaatgggcacaatgagatggatgagccaatgttcacccagcccttgatgtataaacagattcgcaagcagaaacccgtcttgcaaaagtacgcagaactgctggtcagtcagggggtcgttaatcagcctgagtatgaagaagaaatttccaaatatgataagatatgcgaagaagcatttgctagaagcaaagatgaaaaaatcctgcacatcaaacactggctagactctccttggcccggtttctttacactggacgggcaaccccgatccatgagctgcccctccacagggctgaccgaggatatcctgacccatatcggtaatgtcgcatcaagcgtgccggtggagaatttcaccatccacggcggactgtcacgaatactgaaaactagaggagagatggtcaaaaaccggactgtcgattgggctttagccgagtatatggccttcggttctctgctgaaagaggggatccatatcaggttgagcggccaagatgtcgagcggggtacattttcccacaggcaccacgtgttgcacgatcaaaacgtggataaacgcacgtgcattcccatgaaccacctctggcctaaccaggccccttatactgtttgcaattccagcctgtctgagtatggtgtgctagggttcgagcttggatttgccatggcctcccctaatgctctagtcctctgggaggcgcagtttggagattttcacaatactgcccagtgtatcattgaccagttcatctgcccaggccaggctaagtgggtcaggcagaacggcattgtgctccttctaccccacggcatggaaggaatgggacccgaacacagtagcgccaggccagaacggtttcttcaaatgtgcaatgatgatcccgacgtcctgcccgacctcaaggaggcaaacttcgatataaatcaactgtatgattgtaactgggtggtagttaattgtagcaccccaggtaacttttttcatgtgctgcggagacagatcttgctgccatttcgcaaacccttaattattttcactccaaaaagcctgctcaggcacccagaggctagatcctcattcgatgaaatgcttcccggaactcattttcagcgcgtgatcccagaggatgggccagcagcccagaatcctgaaaatgtgaaacggcttctcttttgcactggaaaagtgtattatgacctaactagggagagaaaggccagagacatggtggggcaagtcgcaatcacgaggattgagcagttgagccccttcccattcgaccttctgcttaaagaggtgcagaagtaccccaatgcagaattggcctggtgccaggaagagcataagaaccaagggtactatgactatgtgaagcccagactgcgaactacaatctcacgggctaaacctgtgtggtatgcaggtagggaccccgctgccgcacctgctacaggcaataaaaagactcacctcacagaattacagcgactgctagatacagctttcgaccttgatgtgtttaagaacttctcttag

SEQ ID NO: 129600 - DNA, 3072 bp, Artificial Sequence
  derived and/or modified sequence
atgttccacctgagaacctgcgccgccaagctgagacccctgaccgccagccagaccgtgaagaccttcagccagaacagacccgccgccgccagaaccttccagcagatcagatgctacagcgcccccgtggccgccgagcccttcctgagcggcaccagcagcaactacgtggaggagatgtactgcgcctggctggagaaccccaagagcgtgcacaagagctgggacatcttcttcagaaacaccaacgccggcgccccccccggcaccgcctaccagagccccctgcccctgagcagaggcagcctggccgccgtggcccacgcccagagcctggtggaggcccagcccaacgtggacaagctggtggaggaccacctggccgtgcagagcctgatcagagcctaccagatcagaggccaccacgtggcccagctggaccccctgggcatcctggacgccgacctggacagcagcgtgcccgccgacatcatcagcagcaccgacaagctgggcttctacggcctggacgagagcgacctggacaaggtgttccacctgcccaccaccaccttcatcggcggccaggagagcgccctgcccctgagagagatcatcagaagactggagatggcctactgccagcacatcggcgtggagttcatgttcatcaacgacctggagcagtgccagtggatcagacagaagttcgagacccccggcatcatgcagttcaccaacgaggagaagagaaccctgctggccagactggtgagaagcaccagattcgaggagttcctgcagagaaagtggagcagcgagaagagattcggcctggagggctgcgaggtgctgatccccgccctgaagaccatcatcgacaagagcagcgagaacggcgtggactacgtgatcatgggcatgccccacagaggcagactgaacgtgctggccaacgtgatcagaaaggagctggagcagatcttctgccagttcgacagcaagctggaggccgccgacgagggcagcggcgacgtgaagtaccacctgggcatgtaccacagaagaatcaacagagtgaccgacagaaacatcaccctgagcctggtggccaaccccagccacctggaggccgccgaccccgtggtgatgggcaagaccaaggccgagcagttctactgcggcgacaccgagggcaagaaggtgatgagcatcctgctgcacggcgacgccgccttcgccggccagggcatcgtgtacgagaccttccacctgagcgacctgcccagctacaccacccacggcaccgtgcacgtggtggtgaacaaccagatcggcttcaccaccgaccccagaatggccagaagcagcccctaccccaccgacgtggccagagtggtgaacgcccccatcttccacgtgaacagcgacgaccccgaggccgtgatgtacgtgtgcaaggtggccgccgagtggagaagcaccttccacaaggacgtggtggtggacctggtgtgctacagaagaaacggccacaacgagatggacgagcccatgttcacccagcccctgatgtacaagcagatcagaaagcagaagcccgtgctgcagaagtacgccgagctgctggtgagccagggcgtggtgaaccagcccgagtacgaggaggagatcagcaagtacgacaagatctgcgaggaggccttcgccagaagcaaggacgagaagatcctgcacatcaagcactggctggacagcccctggcccggcttcttcaccctggacggccagcccagaagcatgagctgccccagcaccggcctgaccgaggacatcctgacccacatcggcaacgtggccagcagcgtgcccgtggagaacttcaccatccacggcggcctgagcagaatcctgaagaccagaggcgagatggtgaagaacagaaccgtggactgggccctggccgagtacatggccttcggcagcctgctgaaggagggcatccacatcagactgagcggccaggacgtggagagaggcaccttcagccacagacaccacgtgctgcacgaccagaacgtggacaagagaacctgcatccccatgaaccacctgtggcccaaccaggccccctacaccgtgtgcaacagcagcctgagcgagtacggcgtgctgggcttcgagctgggcttcgccatggccagccccaacgccctggtgctgtgggaggcccagttcggcgacttccacaacaccgcccagtgcatcatcgaccagttcatctgccccggccaggccaagtgggtgagacagaacggcatcgtgctgctgctgccccacggcatggagggcatgggccccgagcacagcagcgccagacccgagagattcctgcagatgtgcaacgacgaccccgacgtgctgcccgacctgaaggaggccaacttcgacatcaaccagctgtacgactgcaactgggtggtggtgaactgcagcacccccggcaacttcttccacgtgctgagaagacagatcctgctgcccttcagaaagcccctgatcatcttcacccccaagagcctgctgagacaccccgaggccagaagcagcttcgacgagatgctgcccggcacccacttccagagagtgatccccgaggacggccccgccgcccagaaccccgagaacgtgaagagactgctgttctgcaccggcaaggtgtactacgacctgaccagagagagaaaggccagagacatggtgggccaggtggccatcaccagaatcgagcagctgagccccttccccttcgacctgctgctgaaggaggtgcagaagtaccccaacgccgagctggcctggtgccaggaggagcacaagaaccagggctactacgactacgtgaagcccagactgagaaccaccatcagcagagccaagcccgtgtggtacgccggcagagaccccgccgccgcccccgccaccggcaacaagaagacccacctgaccgagctgcagagactgctggacaccgccttcgacctggacgtgttcaagaacttcagctag

SEQ ID NO: 129601 - DNA, 3072 bp, Artificial Sequence
  derived and/or modified sequence
atgttccacctccgaacttgtgccgccaagcttaggcccctgaccgccagtcagacggtgaagacttttagccagaatcggcccgctgctgcgaggacctttcagcaaatcaggtgttacagcgcgcctgtggctgccgaaccctttctgtctggcaccagctccaattacgttgaggagatgtactgtgcctggttggagaatcctaagagcgtgcataagtcctgggatatcttttttcggaatacaaacgctggcgccccacctggcacagcctaccaatcgcctctgccattatcacggggttcgctcgcagctgtggcccatgcgcagtcgttggtcgaagcccaacctaacgtggataagctggtcgaggatcacctggcggtgcagtcattgattagggcttatcaaatcagaggccatcatgtggctcagttagaccccctgggcattctggacgccgatttggacagcagtgtacctgccgacatcatctcctcaaccgataaactcgggttctatgggctggacgagtccgaccttgataaggtcttccatcttcctactactacatttattggtggacaggagagtgccctgcctctgcgggaaatcattaggcgccttgaaatggcctactgccagcatataggagtagaatttatgtttatcaatgatttggaacagtgccagtggattcgtcagaaattcgagacaccagggatcatgcagttcaccaatgaggaaaaacggaccctgctggctcggctggtgcggtctaccaggttcgaagaatttttgcaaagaaaatggtcttcagaaaagaggtttggcctcgagggctgtgaagtcctaatccccgctcttaagaccataattgacaagagttctgagaacggggttgattacgttatcatgggtatgccccatcgcgggcggctgaacgtgctggccaacgtgatacgaaaggaattagagcagatcttttgccagttcgactcaaagctggaggctgcagacgagggttccggggacgtgaagtaccacctcggaatgtatcataggaggatcaaccgagttaccgaccgcaacattactctatcactcgtagctaacccgagccacttagaggccgccgatcccgtagttatgggtaagactaaggccgaacagttctattgtggtgacacagaagggaagaaagtaatgagcatcctcctgcatggggatgcagcttttgcagggcaggggatagtttatgagacgtttcacctgagtgacctcccatcttacaccactcacgggacagtgcacgtagtagtcaataaccagattggcttcacgacagaccctaggatggctagatccagtccctacccgacggacgttgcaagggtcgtgaacgctcccatctttcacgtgaattccgacgaccctgaggctgtgatgtacgtctgcaaagttgctgctgaatggcgttcgacctttcacaaagacgttgtagtcgacctagtgtgttaccggcggaatggacataacgaaatggatgagcctatgttcacccagcccttgatgtataagcagattcggaaacagaaacccgtcctgcaaaaatacgctgaactgttggtgagccagggggtcgtgaaccagcctgaatacgaggaagagattagtaagtatgataagatctgcgaagaggcattcgcccgctctaaagacgagaaaattcttcatataaaacactggctggattccccttggccgggcttttttacactcgacggacagccgcgcagtatgagttgcccctctactgggctgactgaagacattttgacccatattggtaacgtggcgagttcggtccccgtggagaatttcaccatccacggcggactctccaggattctgaagacccggggtgaaatggtcaaaaatcgtacggtggactgggctctcgctgaatacatggcttttggaagcctgctgaaggaaggaatccatattagactcagcgggcaagatgtggaaagaggtaccttctctcataggcaccatgtcttgcacgaccaaaatgtggacaagaggacttgtattccaatgaatcatttatggcccaaccaggccccctacaccgtttgtaactctagcctgtcggagtacggcgtgctggggtttgagctcggcttcgcaatggcatcccctaacgctctggtgttgtgggaagcgcaatttggtgattttcacaacactgctcagtgtatcattgatcaattcatctgtccgggccaggcaaagtgggtgagacaaaacggaatcgtgctcttattaccccacgggatggaagggatggggcccgaacacagttcggcgaggccagaacgctttctccagatgtgcaacgacgaccccgatgtcctgcctgatctgaaagaagcaaacttcgacatcaatcagctctacgattgtaactgggtcgtggtaaattgcagcactccaggaaacttcttccacgtgttgcgtcgccaaatacttttgcctttcagaaaaccactgattatattcaccccaaagagtctgctaaggcaccctgaggctaggtcttcttttgacgaaatgctccctggtacccactttcagcgggtaattccggaggatgggcccgcagcacagaatccagagaatgtcaagaggctgctgttttgcacaggcaaggtatattacgacttaacacgcgagcggaaggcacgcgacatggtgggacaggtcgcgattacacggattgaacaactgtctcctttccccttcgatcttctcctcaaagaggttcagaaatatccaaacgccgagctagcttggtgccaggaggaacataaaaaccagggatattacgattacgtgaagcctcggctcaggactactatttcccgggccaagccagtctggtatgcaggacgtgaccctgccgctgcacccgccactggcaacaagaagacccacctcaccgagctgcaaagacttctggataccgcctttgacctggatgtcttcaaaaatttttcctag

SEQ ID NO: 129602 - DNA, 3072 bp, Artificial Sequence
  derived and/or modified sequence
atgttccacctgcggacctgtgccgccaagctgcggcccctgacagccagccagacagtgaagaccttcagccagaacagacctgctgctgcccggaccttccagcagatccgctgctacagcgcccctgtggccgctgagcccttcctgagcggcaccagcagcaactacgtggaggagatgtactgtgcctggctggagaaccccaagtctgtgcacaagtcctgggacatcttcttcaggaacaccaatgctggggcccctcctggaacagcctaccagagccccctgcccctgagccggggcagcctggccgctgtggcccacgcccagagcctggtggaggcccagcccaacgtggacaagctggtggaggaccacctggccgtgcagagcctcatccgggcctaccagatccggggccaccacgtggcccagctggaccccctgggcatcctggatgctgacctggacagctctgtgcctgctgacatcatcagcagcacagacaagctgggcttctacggcctggatgaaagtgacctggacaaggtgttccacctgcccaccaccaccttcatcggcggccaggagagcgccctgcccctgcgggagatcatccggcggctggagatggcctactgccagcacatcggcgtggagttcatgttcatcaatgacctggagcagtgccagtggatccggcagaagtttgagaccccaggcatcatgcagttcaccaatgaggagaagaggaccctgctggcccggctggtgcgcagcaccaggtttgaggagttcctgcagaggaagtggagcagcgagaagcgcttcggcctggagggctgtgaggtgctgatcccagccctgaagaccatcatcgacaagagcagtgaaaatggagtggactatgtgatcatgggcatgccccaccggggccgcctgaatgtgctggccaacgtcatcaggaaggagctggagcagatcttctgccagtttgacagcaagctggaggccgcagatgagggcagcggagatgtgaagtaccacctgggcatgtaccaccggcgcatcaacagagtgacagacaggaacatcaccctgagcctggtggccaaccccagccacctggaggccgctgaccctgtggtgatgggcaagaccaaggccgagcagttctactgtggggacacagagggcaagaaggtgatgagcatcctgctgcatggagatgctgcctttgctggccagggcatcgtgtatgagaccttccacctgagtgacctgcccagctacaccacccatggaacagtgcacgtggtggtgaacaaccagatcggcttcaccacagaccccaggatggcccggagcagcccctaccccacagatgtggcccgggtggtgaatgcccccatcttccacgtgaacagtgatgatcctgaggccgtgatgtatgtgtgcaaggtggccgctgagtggaggagcaccttccacaaggatgtggtggtggacctggtgtgctacagaagaaatggccacaatgagatggatgagcccatgttcacccagcccctgatgtacaagcagatcaggaagcagaagcctgtgctgcagaagtatgcagagctgctggtgtcccagggcgtggtgaaccagccagaatatgaggaggagatcagcaaatatgacaagatctgtgaggaggcctttgcccggagcaaggatgagaagatcctgcacatcaagcactggctggacagcccctggccaggcttcttcaccctggatggccagcccaggtccatgagctgccccagcacaggcctgacagaggacatcctgacccacatcggaaatgtggccagctctgtgcctgtggagaacttcaccatccacggcggcctgagccgcatcctgaagaccagaggagagatggtgaagaacagaacagtggactgggccctggccgagtacatggccttcggcagcctgctgaaggagggcatccacatccggctgagcggccaggatgtggagcggggcaccttcagccaccgccaccacgtgctgcatgaccagaatgtggacaagaggacctgcatccccatgaaccacctgtggcccaaccaggccccctacacagtgtgcaacagcagcctgtctgaatatggagtgctgggctttgagctgggctttgccatggccagccccaatgccctggtgctgtgggaggcccagtttggagacttccacaacacagcccagtgcatcatcgaccagttcatctgccccggccaggccaagtgggtgcggcagaatggaattgtgctgctgctgccccacggcatggagggcatgggccctgagcacagcagcgcccggcctgagcgcttcctgcagatgtgcaatgatgatcctgatgtgctgcctgacctgaaggaggccaactttgacatcaaccagctgtatgactgcaactgggtggtggtgaactgcagcaccccaggcaacttcttccacgtgctgcggcggcagatcctgctgcccttcaggaagcccctcatcatcttcacccccaagagcctgctgcggcaccctgaggcccggagcagctttgatgagatgctgcccggcacccacttccagagggtcatcccagaagatggccctgctgcccagaacccagaaaatgtgaagaggctgctcttctgcaccgggaaggtgtactatgacctgacccgggagaggaaggcccgggacatggtgggccaggtggccatcacccgcatcgagcagctgagccccttcccctttgacctgctgctgaaggaggtgcagaagtacccaaatgctgagctggcctggtgccaggaggagcacaagaaccagggctactatgactatgtgaagccccggctgcggaccaccatcagccgggccaagcctgtgtggtacgccggccgggaccctgctgctgccccagccaccggcaacaagaagacccacctgacagagctgcagaggctgctggacacagcctttgacctggatgtgttcaagaacttctcctag

SEQ ID NO: 129603 - DNA, 3072 bp, Artificial Sequence
  derived and/or modified sequence
atgttccacctgcggacctgcgccgccaagctgcggcccctgaccgcctcacaaactgtgaagacattctcccaaaatagacccgccgcggctagaacctttcagcaaattcggtgttactcagcacccgttgccgccgagcccttcctgtccggaacttcttccaattatgtggaggaaatgtattgcgcatggttagaaaaccccaaatccgtgcataaatcttgggacattttctttagaaatacaaacgctggcgctcctccagggaccgcataccaatcgcccctccccctgtctcggggaagcttggcagctgtggcccatgcccaaagcctggtggaggcccagcctaacgtggacaaactcgtcgaggatcacctcgccgtgcagtcactgatacgggcctatcagatcagaggccaccatgtcgcacagctggaccctctcggcatcctggacgccgacctcgactctagtgtgccagcggatatcataagctcgactgacaaactcggattctatggtcttgatgagtctgacctggataaggttttccacttacccacaacgacatttattgggggtcaggagagcgctctgccacttagggaaatcatcagacgtctggaaatggcttactgccagcatatcggcgttgaatttatgtttattaacgacttggaacagtgccagtggatacggcagaagttcgaaaccccagggatcatgcagttcaccaatgaagagaagcgtacactcctcgcccgtctggtgcggagcacacggtttgaggagtttcttcaacggaaatggagttcagaaaaaagattcggattggaaggctgcgaagtcctgattccagccctgaagacgattatcgacaagtcttccgagaatggcgtcgattatgtaattatgggtatgccacaccggggacgactgaatgtcctggcgaacgtcatcagaaaagaacttgagcagatcttttgtcagttcgactccaagcttgaggccgccgacgagggcagtggagacgtgaagtaccacctgggaatgtaccatcggcgaatcaaccgcgtaaccgaccgaaacatcaccctaagcctcgtcgccaatccctcccacctggaagccgcagaccctgtagtcatgggcaaaacgaaagccgagcagttctattgcggggacactgagggaaaaaaggtaatgagtatcctgttgcatggcgatgcggcatttgctggacagggaatagtgtacgaaaccttccacctttcagatttgcccagttacaccacgcacggtactgttcacgtagttgtaaacaatcaaataggctttactacagatccaaggatggcaaggagctccccatatccaacagatgtggccagggtggttaatgctccgatcttccacgtgaatagtgatgatcccgaggccgtaatgtacgtgtgcaaagtcgccgctgaatggaggagcaccttccataaagacgtcgtcgttgacctcgtctgttacagaaggaatgggcacaacgagatggatgaacctatgttcactcagcccctgatgtacaagcaaattcgaaagcagaagccggtactgcagaagtatgcagagttgcttgtcagccagggcgtggttaatcaacccgagtatgaggaggagatctcgaagtacgataagatctgcgaggaggcgtttgcacggtccaaagacgagaaaattctgcacataaagcactggctggattctccgtggcccgggttctttaccctggatgggcaacctcgctcaatgtcttgtccgagcacaggacttacggaggacatcctcacgcacatcggaaacgtcgcctcaagtgtgccggttgagaactttaccatacatggcgggcttagccgtatcctgaaaacccggggtgagatggtgaaaaatcgaacggtagattgggctttagctgagtacatggctttcggatctcttctgaaagaaggcatccacatacggttgtccggtcaggacgtggaacgcggtacgttttcacacagacaccacgtgctacatgatcaaaatgttgacaaaaggacttgcatcccaatgaatcatttgtggcccaatcaagccccttacaccgtctgcaactcctccctgagcgaatatggggtgttgggcttcgaactgggtttcgccatggcctcaccaaacgctctggtactctgggaagcacagtttggtgacttccacaacaccgctcaatgtatcatcgatcaattcatttgccccggccaggccaaatgggtgagacagaacggaattgtccttttgttaccccatggcatggagggaatgggacctgagcatagtagtgcaaggcctgagcggttcctacagatgtgcaacgacgatccagatgtgctgccggacctcaaggaagcaaatttcgatatcaaccagttgtatgactgtaattgggtggtagtgaactgctcaaccccaggcaactttttccatgtattgcgtcgccagatattattgccgtttcggaaacctctgatcatttttaccccaaagagccttttgaggcaccctgaagctcgatccagttttgacgagatgttacccggcacacactttcaaagagtcattcctgaagacggacccgctgcacagaaccccgagaacgtgaaacgcctgttgttctgtaccgggaaagtctactacgacttaacgagggagagaaaagcgagagacatggtggggcaagtcgccattaccaggatagaacagctgagtcccttcccctttgacctgctgctcaaagaagtgcagaaataccccaatgcagaactagcttggtgccaggaggagcataaaaatcagggctattatgactacgttaagccccgcctgcgcacaacgatttccagagcaaagccggtgtggtatgccgggagggacccggcagcggccccagccacaggcaacaagaaaacacacctgacggaactgcagcgcctgctcgacaccgcctttgatctggatgtgtttaaaaacttttcctag

SEQ ID NO: 129604 - DNA, 4181 bp, Artificial Sequence
  derived and/or modified sequence
ctgagccggagacaggcagttgtgaaaaacttcaggacaaaaatgtttcatttaaggacttgtgctgctaagttgaggccattgacggcttcccagactgttaagacattttcacaaaacagaccagcagcagctaggacatttcaacagattcggtgctattctgcacctgttgctgctgagccctttctcagtgggactagttcgaactatgtggaggagatgtactgtgcttggctggaaaaccccaaaagtgtacataagtcatgggacattttttttcgcaacacgaatgccggagccccaccgggcactgcctaccagagtccccttcccctgagccgaggctccctggctgctgtggcccatgcacagtccctggtagaagcacagcccaacgtggacaagctcgtggaggaccacctggcagtgcagtcgctcatcagggcatatcagatacgagggcaccatgtagcacagctggaccccctggggattttggatgctgatctggactcctccgtgcccgctgacattatctcatccacagacaaacttgggttctatggcctggatgagtctgacctcgacaaggtcttccacttgcccaccaccactttcatcgggggacaggaatcagcacttcctctgcgggagatcatccgtcggctggagatggcctactgccagcatattggggtggagttcatgttcatcaatgacctggagcagtgccagtggatccggcagaagtttgagacccctgggatcatgcagttcacaaatgaggagaaacggaccctgctggccaggcttgtgcggtccaccaggtttgaggagttcctacagcggaagtggtcctctgagaagcgctttggtctagaaggctgcgaggtactgatccctgccctcaagaccatcattgacaagtctagtgagaatggcgtggactacgtgatcatgggcatgccacacagagggcggctgaacgtgcttgcaaatgtcatcaggaaggagctggaacagatcttctgtcaattcgattcaaagctggaggcagctgatgagggctccggagatgtgaagtaccacctgggcatgtatcaccgcaggatcaatcgtgtcaccgacaggaacattaccttgtccttggtggccaacccttcccaccttgaggccgctgaccccgtggtgatgggcaagaccaaagccgaacagttttactgtggcgacactgaagggaaaaaggtcatgtccatcctgttgcatggggatgctgcatttgctggccagggcattgtgtacgagaccttccacctcagcgacctgccatcctacacaactcatggcaccgtgcacgtggtcgtcaacaaccagatcggcttcaccaccgaccctcggatggcccgctcctccccctaccccactgacgtggcccgagtggtgaatgcccccattttccacgtgaactcagatgaccccgaggctgtcatgtacgtgtgcaaagtggcggccgagtggaggagcaccttccacaaggacgtggttgtcgatttggtgtgttaccggcgcaacggccacaacgagatggatgagcccatgttcacgcagccgctcatgtacaagcagatccgcaagcagaagcctgtgttacagaagtacgctgagctgctggtgtcgcagggtgtggtcaaccagcctgagtatgaggaggaaatttccaagtatgataagatctgtgaggaagcttttgccagatctaaagatgagaagatcttgcacattaagcactggctggactctccctggcctggcttcttcaccctggacgggcagcccaggagcatgtcctgcccctccacgggtctgacggaggatattctgacacacatcgggaatgtggctagttctgtgcctgtggaaaactttactattcatggagggctgagccggatcttgaagactcgtggggaaatggtgaagaaccggactgtggactgggctctagcggagtacatggcgtttggctcgctcctgaaggagggcatccacattcggctgagcggccaggacgtggagcggggcacattcagccaccgccaccatgtgctccatgaccagaatgtggacaagagaacctgcatccccatgaaccatctctggcccaatcaggccccctatactgtgtgcaacagctcactgtctgagtacggcgtgctgggctttgagctgggcttcgccatggccagtcctaatgccctggtcctctgggaagcccaatttggtgacttccacaacacggcccagtgtatcatcgaccagttcatctgcccgggacaagccaagtgggtgcggcagaatggcatcgtgttgctgctgccccatggcatggagggcatgggtccagaacattcctccgcccgcccagagcggttcttgcagatgtgcaacgatgacccagatgtcctgccagaccttaaagaagccaacttcgacatcaatcagctatatgactgcaattgggttgttgtcaactgctccactcctggcaacttcttccacgtgctacgacgccagatcctgctgccattccggaagccgttaattatcttcacccccaaatccctgttgcgccaccccgaggccagatccagctttgatgagatgcttccaggaacccacttccagcgggtgatcccagaagatggccctgcagctcagaacccagaaaatgtcaaaaggcttctcttctgcaccggcaaagtgtattatgacctcacccgggagcgcaaagcacgcgacatggtggggcaggtggccatcacaaggattgagcagctgtcgccattcccctttgacctcctgctgaaggaggtgcagaagtaccccaatgctgagctggcctggtgccaggaggagcacaagaaccaaggctactatgactacgtgaagccaagacttcggaccaccatcagccgcgccaagcccgtctggtatgccggccgggacccagcggctgctccagccaccggcaacaagaagacccacctgacggagctgcagcgcctcctggacacggccttcgacctggacgtcttcaagaacttctcgtagatgctgcctagggttgcttgggccactgccctctccacacccatgactgccccttgcttctcaactaaagaatagtgcctcagcgctgcccacaccaccgccctcctcgctgtgccaccacccctccctctgctctcataggagttaggctgtcgtccccctccagtgcttggctgccccacaggccacacgctgcccaggctctgctgacttctgagcagttttccaggaggccggggggagcaggaggaggaaaggtagcccccgagggatgtccttggggaggggtcagctctggccacaatcctccccaccagtctcacccactaggataggaactgggccttgtgtgctggcttccgctgtcacccagcaaggcacaggctcctgtatttgagactaggatagcttcatcttgagcctgagccttagaatctgtagaggagcctggagtcggatctagccatggctggcagaggtttctagggtgggccccagccgtggcgtgaactgaggatgacccggggcagctggcaggagagagccttggcctgacctggcacagaaagggcagcttcagtctctgcagtgtccattatctgctgttccttcgagggttccaggctgtgtgtggggcccaagcatgccccacccacccctcctgggcccaggcagcacctggagcccacagagtctgtgtgtagccaggaagccccgctcaggtagccaccaccggggcactggctgctctgtcttggtcctgttaaccctccacctcctctcttggactccctccccaccccaaccactctttctttctcctttaacccaatggagactttctgatgcatcgttttctttgctgtgccaaagcaggtcagaagagggagaggaggggctgggggtgaggggccaggccatggccaaggggccagctgcccctcatttatcactctgaccttcacagggacagatctgatttatttattttggttaaaaaaaaaaaaaaggaacagaaacaactttgcattgcattggcttgacccataaactaagttatatccgtg

SEQ ID NO: 129605 - protein, 345 aa, Artificial Sequence
  derived and/or modified sequence
MPARALLPRRMGHRTLASTPALWASIPCPRSELRLDLVLPSGQSFRWREQSPAHWSGVLADQVWTLTQTEEQLHCTVYRGDKSQASRPTPDELEAVRKYFQLDVTLAQLYHHWGSVDSHFQEVAQKFQGVRLLRQDPIECLFSFICSSNNNIARITGMVERLCQAFGPRLIQLDDVTYHGFPSLQALAGPEVEAHLRKLGLGYRARYVSASARAILEEQGGLAWLQQLRESSYEEAHKALCILPGVGTKVADCICLMALDKPQAVPVDVHMWHIAQRDYSWHPTTSQAKGPSPQTNKELGNFFRSLWGPYAGWAQAVLFSADLRQSRHAQEPPAKRRKGSKGPEG

SEQ ID NO: 129606 - DNA, 1038 bp, Artificial Sequence
  derived and/or modified sequence
atgcctgcaagagcactgctcccccggcgaatgggacatcggacactggcctcaacgcctgccctgtgggcgtccatcccttgcccaagaagtgaactgagactggatctagttctaccttccggacagtccttccgttggagagaacagagcccagcgcactggtcaggcgtactagctgatcaagtatggacattgacccaaacagaagaacaactccactgtacggtctaccgcggagacaaatcacaagctagcagaccgacccctgacgagttagaggcagttcgaaagtatttccagcttgatgtcaccctggcacagttatatcatcattggggtagcgtggacagtcacttccaggaagttgctcaaaagttccagggggttcgcctccttaggcaggatcccattgaatgtctgttcagctttatttgcagttccaacaataatatcgcaaggattaccggtatggtagagaggctctgtcaggcctttggccctagacttatacagttggatgacgtcacataccacggctttcccagtctacaggccttggctgggccagaagtagaagctcacctgcgcaagctcgggcttgggtaccgggccagatacgtctccgcgagcgcacgtgcaatcctggaagagcagggaggcttggcctggttacagcaattgagggagtcctcgtacgaggaggcacataaggctctttgcatcctcccgggagtaggaacaaaagtggcagactgtatatgcttgatggccctggacaagccgcaagccgttccggtggacgtccatatgtggcacattgctcagagagactatagctggcaccctacaacatcacaggctaaaggccctagtccccagacaaacaaggaattgggtaatttcttccggagcctgtggggaccatacgcaggttgggcccaggccgtgctttttagcgccgacctccgacagagccgtcatgcacaggagccacccgccaaacgccgcaagggcagcaaaggacccgagggatag

SEQ ID NO: 129607 - DNA, 1744 bp, Artificial Sequence
  derived and/or modified sequence
ctacttccggtggtgctgtggtctgcccctggagaacccagaagaacacagctgtgcgcgcccacaggctctgggggcgggagaagataagtcgcaaggagggggcgggacctacacctcaggaaagccggagaattggggcacgaagcggggctttgatgacccgcaaagggcgaggcatgcaggaggtggaggaattaagtgaaacagggaaggttgttaaacagcaccgtgtgggcgaggccttaagggtcgtggtccttgtctgggcggggtctttgggcgtcgacgaggcctggttctgggtaggcggggctactacggggcggtgcctgctgtggaaatgcctgcccgcgcgcttctgcccaggcgcatggggcatcgtactctagcctccactcctgccctgtgggcctccatcccgtgccctcgctctgagctgcgcctggacctggttctgccttctggacaatctttccggtggagggagcaaagtcctgcacactggagtggtgtactagcggatcaagtatggacactgactcagactgaggagcagctccactgcactgtgtaccgaggagacaagagccaggctagcaggcccacaccagacgagctggaggccgtgcgcaagtacttccagctagatgttaccctggctcaactgtatcaccactggggttccgtggactcccacttccaagaggtggctcagaaattccaaggtgtgcgactgctgcgacaagaccccatcgaatgccttttctcttttatctgttcctccaacaacaacatcgcccgcatcactggcatggtggagcggctgtgccaggcttttggacctcggctcatccagcttgatgatgtcacctaccatggcttccccagcctgcaggccctggctgggccagaggtggaggctcatctcaggaagctgggcctgggctatcgtgcccgttacgtgagtgccagtgcccgagccatcctggaagaacagggcgggctagcctggctgcagcagctacgagagtcctcatatgaggaggcccacaaggccctctgcatcctgcctggagtgggcaccaaggtggctgactgcatctgcctgatggccctagacaagccccaggctgtgcccgtggatgtccatatgtggcacattgcccaacgtgactacagctggcaccctaccacgtcccaggcgaagggaccgagcccccagaccaacaaggaactgggaaactttttccggagcctgtggggaccttatgctggctgggcccaagcggtgctgttcagtgccgacctgcgccaatcccgccatgctcaggagccaccagcaaagcgcagaaagggttccaaagggccggaaggctagatggggcaccctggacaaagaaattccccaagcaccttcccctccattccccacttctctctccccatccccacccagtctcatgttggggaggggcctccctgtgactacctcaaaggccaggcacccccaaatcaagcagtcagtttgcacaacaagatggggtgggggatattgagggagacagcgctaaggatggttttatcttccctttattacaagaaggaacaataaaatagaaacatttgtatggaaaatgcagtgaggagtggtagggaagcaggtgaggaggggacagggcagagaaactcccggttcagggagggaaggggagcaggctgcccccaagccctcccacgcaga

SEQ ID NO: 129608 - DNA, 1038 bp, Artificial Sequence
  derived and/or modified sequence
atgcctgcccgggccctgctgcccaggaggatgggccacaggaccctggccagcaccccagccctgtgggccagcatcccctgccccaggtctgagctgcggctggacctggtgctgcccagcggccagagcttccgctggagggagcagagccctgcccactggagcggcgtgctggccgaccaggtgtggaccctgacccagacagaggagcagctgcactgcaccgtgtacagaggagacaagagccaggccagccggcccaccccagatgagctggaggccgtgaggaagtacttccagctggatgtgaccctggcccagctgtaccaccactggggctctgtggacagccacttccaggaggtggcccagaagttccagggcgtgcggctgctgcggcaggaccccattgaatgtctcttctccttcatctgcagcagcaacaacaacatcgcccgcatcaccggcatggtggagcggctgtgccaggccttcggccccaggctcatccagctggatgatgtgacctaccacggcttccccagcctgcaggccctggccggccctgaggtggaggcccacctgaggaagctgggcctgggctaccgggcccgctacgtgtctgccagcgcccgggccatcctggaggagcagggcggcctggcctggctgcagcagctgcgggagagcagctatgaggaggcccacaaggccctgtgcatcctgcccggggtgggcaccaaggtggccgactgcatctgcctgatggccctggacaagccccaggccgtgcctgtggatgtgcacatgtggcacatcgcccagagggactacagctggcaccccaccaccagccaggccaagggccccagcccccagaccaacaaggagctgggcaacttcttccgcagcctgtggggcccctatgccggctgggcccaggccgtgctcttctctgctgacctgcggcagagcagacatgcccaggagcccccagccaagaggaggaagggcagcaaaggacctgagggctag

SEQ ID NO: 129609 - DNA, 1038 bp, Artificial Sequence
  derived and/or modified sequence
atgcccgcccgggccctgctgccccggcggatgggccaccggaccctggcatctactcctgctctgtgggcatctatcccctgtccgagaagtgaactgcgactagacctagtgcttcccagtggccagtcattccgttggcgggagcagtccccagcccattggagtggagtcttggcagatcaggtgtggacgctgactcaaaccgaggaacagctgcattgcacggtgtatcggggtgataagtcgcaggcaagcagaccaactcccgatgagctggaagctgtacgaaaatactttcaattggatgtcacactcgcccagctctaccatcattggggtagtgtggattctcattttcaggaagttgcccagaaattccagggggtgagacttcttagacaggacccaatagagtgcctgttttcgtttatctgttccagtaataacaacatcgcgcggattactggcatggtggagagactgtgtcaggctttcggtccaaggcttattcaattagatgacgtgacctatcatggctttcccagcctccaagcgctcgctggacctgaggtggaggcacatctgagaaagctgggtctaggttaccgggcacgatacgtaagtgcttccgcacgagcaattttagaggagcaaggcggactggcctggctgcagcagcttagagaatcctcatacgaagaggcgcacaaggcactatgcattttgccaggagtcggcacaaaggtggcagattgcatttgtctgatggccttggacaagcctcaggcagtccccgtggatgtccatatgtggcatattgcgcagagggattattcatggcaccccacaaccagccaggcaaaggggccgtcaccacagactaataaggaactgggtaatttcttccgcagtctctggggtccatacgcaggttgggcccaggcagtgctgttttcggctgacctgaggcagtcacgtcatgctcaagagcctcctgccaagcgccggaaagggtctaaggggccggaaggttag

SEQ ID NO: 129610 - DNA, 1038 bp, Artificial Sequence
  derived and/or modified sequence
atgcccgctagggctttactgcctcggaggatgggccatcgtaccctcgcatccactccagccctgtgggcgtcaatcccgtgtccaaggtcagagctccgcttagacctcgtgttaccctctggacagtccttccgatggcgcgagcagtctcctgcccactggagcggtgtgctcgctgatcaggtatggactttaacacagacagaggagcagctgcactgcaccgtttatagaggagacaaatctcaggcgagccgcccaacacccgacgaactcgaagcagtacggaagtatttccagctggatgtgacactcgcccagctgtaccatcattggggctcagttgactcacacttccaggaggtcgcccagaagtttcagggggttcgtctgctgcgccaggatcctatcgaatgcttattctcatttatttgttcgagtaacaataacattgcgagaataacagggatggtggaaaggctgtgtcaggcttttggcccacggctgatccagctcgatgacgtcacatatcatgggttcccttctctacaggctctagccggacctgaggtggaagcccatctgcgtaagctaggattgggataccgcgcacgatacgtttctgcctctgctcgtgcaattctggaggagcagggcggacttgcctggctgcagcagctgagagagtcttcctatgaggaagctcataaagcattgtgcatacttccaggggtcggcacaaaggtggccgattgtatctgtctgatggctctcgacaaaccccaggccgtgcctgtagacgtgcatatgtggcacatcgcccagagagactatagctggcaccccacaacttcgcaggccaagggacccagtcctcagacaaataaagagcttgggaatttctttagaagcctttggggcccatacgcaggctgggcacaggcagtcctgttcagcgcggacttacgtcagagtagacatgctcaggaacccccagcaaagcgtcggaagggctccaaaggccctgaaggctag

SEQ ID NO: 129611 - DNA, 1038 bp, Artificial Sequence
  derived and/or modified sequence
atgcccgccagagccctgctgcccagaagaatgggccacagaaccctggccagcacccccgccctgtgggccagcatcccctgccccagaagcgagctgagactggacctggtgctgcccagcggccagagcttcagatggagagagcagagccccgcccactggagcggcgtgctggccgaccaggtgtggaccctgacccagaccgaggagcagctgcactgcaccgtgtacagaggcgacaagagccaggccagcagacccacccccgacgagctggaggccgtgagaaagtacttccagctggacgtgaccctggcccagctgtaccaccactggggcagcgtggacagccacttccaggaggtggcccagaagttccagggcgtgagactgctgagacaggaccccatcgagtgcctgttcagcttcatctgcagcagcaacaacaacatcgccagaatcaccggcatggtggagagactgtgccaggccttcggccccagactgatccagctggacgacgtgacctaccacggcttccccagcctgcaggccctggccggccccgaggtggaggcccacctgagaaagctgggcctgggctacagagccagatacgtgagcgccagcgccagagccatcctggaggagcagggcggcctggcctggctgcagcagctgagagagagcagctacgaggaggcccacaaggccctgtgcatcctgcccggcgtgggcaccaaggtggccgactgcatctgcctgatggccctggacaagccccaggccgtgcccgtggacgtgcacatgtggcacatcgcccagagagactacagctggcaccccaccaccagccaggccaagggccccagcccccagaccaacaaggagctgggcaacttcttcagaagcctgtggggcccctacgccggctgggcccaggccgtgctgttcagcgccgacctgagacagagcagacacgcccaggagccccccgccaagagaagaaagggcagcaagggccccgagggctag

SEQ ID NO: 129612 - protein, 440 aa, Artificial Sequence
  derived and/or modified sequence
MEYQILKMSLCLFILLFLTPGILCICPLQCICTERHRHVDCSGRNLSTLPSGLQENIIHLNLSYNHFTDLHNQLTQYTNLRTLDISNNRLESLPAHLPRSLWNMSAANNNIKLLDKSDTAYQWNLKYLDVSKNMLEKVVLIKNTLRSLEVLNLSSNKLWTVPTNMPSKLHIVDLSNNSLTQILPGTLINLTNLTHLYLHNNKFTFIPDQSFDQLFQLQEITLYNNRWSCDHKQNITYLLKWMMETKAHVIGTPCSTQISSLKEHNMYPTPSGFTSSLFTVSGMQTVDTINSLSVVTQPKVTKIPKQYRTKETTFGATLSKDTTFTSTDKAFVPYPEDTSTETINSHEAAAATLTIHLQDGMVTNTSLTSSTKSSPTPMTLSITSGMPNNFSEMPQQSTTLNLWREETTTNVKTPLPSVANAWKVNASFLLLLNVVVMLAV

SEQ ID NO: 129613 - DNA, 1945 bp, Artificial Sequence
  derived and/or modified sequence
ataaatttgagtcagcaccagcgacagctctgcagtcctcctatgtggtactgatcaggtggttgcagagcttcagctcacagcaacacaatgcagctgagcaggcaagcacagcccacagccagaaacagttccgactctacagaacaagacgacctttaagtttcccagagaaaatgagatgctgatgttgaagacgacaccacggctttgatggaatatcagatattgaaaatgtctctctgcctgttcatccttctgtttctcacacctggtattttatgcatttgtcctctccaatgtatatgcacagagaggcacaggcatgtggactgttcaggcagaaacttgtctacattaccatctggactgcaagagaatattatacatttaaacctgtcttataaccactttactgatctgcataaccagttaacccaatataccaatctgaggaccctggacatttcaaacaacaggcttgaaagcctgcctgctcacttacctcggtctctgtggaacatgtctgctgctaacaacaacattaaacttcttgacaaatctgatactgcttatcagtggaatcttaaatatctggatgtttctaagaacatgctggaaaaggttgtcctcattaaaaatacactaagaagtctcgaggttctcaacctcagtagtaacaaactttggacagttccaaccaacatgccctccaaactacatatcgtggacctgtctaataattctttgacacaaattcttccaggtacattaataaacctgacaaatctcacacatctttacctgcacaacaataagttcacattcattccagaccaatcttttgaccaactctttcagttgcaagagataaccctttacaataacaggtggtcatgtgaccacaaacaaaacattacttacttactgaagtggatgatggaaacaaaagcccatgtgatagggactccatgttctacccaaatatcatctttaaaggaacataacatgtatcccacaccttctggatttacctcaagcttattcactgtaagtgggatgcagacagtggacaccattaactctctgagtgtggtaactcaacccaaagtgaccaaaatacccaaacaatatcgaacaaaggaaacaacgtttggtgccactctaagcaaagacaccacctttactagcactgataaggcttttgtgccctatccagaagatacatccacagagactatcaattcacatgaagcagcagctgcaactctaactattcatctccaagatggaatggtcacaaacacaagcctcactagctcaacaaaatcatccccaacacccatgaccctaagtatcactagtggcatgccaaataatttctctgaaatgcctcaacaaagcacaacccttaacttatggagggaagagacaaccacaaatgtaaagactccattaccttctgtggcaaatgcttggaaagtaaatgcttcatttctcttattgctcaatgttgtggtcatgctggctgtctgagggtctgcattttctgaaactaatgaaagcactcctccctgatgtacagttgggaaaatatgtccatatctaaccagtgattcgagctatatttaagtattcaagaaagccagtcttaacatttctaactctgatgtaaatgaagtaacttgtcttaaataaaagaaatgcacaatgtcttggtacttgctgctattttactgtcttaattaagtaaactaatgagtttcttttataaaaaaaatgaaatgttttaaggcttcaatttattgcacaaaatataaagcatctaaactttaatatgtattttatgtatgtttacactgtcaaacatctggaaaataaaaggtctatgctcaaaaaaaaaaaaaaaaaaaaaaaaaaaaaaaaaaaaaaaaaaaaaaaaaaa

SEQ ID NO: 129614 - DNA, 1323 bp, Artificial Sequence
  derived and/or modified sequence
atggagtaccagatcctcaaaatgagcctgtgtctcttcattctactgttcctgacgccagggatactttgtatttgccccttgcagtgcatatgcacagagcgacatcgccatgtcgattgtagcggcaggaacctgtccacgttgccttccggtctgcaagagaacatcatccatttgaatttgtcctataatcacttcaccgatcttcacaaccaactgacgcagtacaccaatctacgcactctcgatatatctaataaccgcctggaaagcctacctgcccacctgcctagatctttgtggaatatgtccgctgctaacaataacatcaaactgctggacaagagcgatactgcttaccagtggaatctgaagtatttggacgtgagtaagaatatgttggaaaaagtggtcctgatcaaaaatacactgcggtctctcgaggtcctcaatctgagcagcaataaactgtggacagtgcctacgaatatgccgtctaagctgcacatcgtggatctgtctaataacagtctcacccagatacttcccgggacactgatcaatttgaccaatctcacacatttatacttgcacaataacaagtttacattcatacctgatcaatcatttgaccagctgttccagctccaggaaatcacgctgtacaacaataggtggtcgtgcgaccacaaacagaacatcacgtatttgttaaagtggatgatggagacaaaggcccatgttatcggcactccatgtagcacacagataagcagcctcaaggagcataacatgtatccgactccctccggattcacttcttccctgttcaccgtgtccggtatgcaaacagtggatacaatcaacagcctgtcagtggttacccagccaaaagtcactaagattcccaaacagtatcggactaaggagacaacattcggagccaccctctccaaggacacaacattcacaagtacagacaaggcatttgtgccctaccccgaagatacttccacagagaccatcaactctcatgaggctgcagcagctacactaacaatccacctgcaagacggtatggtaacgaacacttctcttacatcctccaccaagtctagcccaacacccatgacgttgagcatcacttcaggcatgccgaataatttttctgaaatgcctcagcagagcaccactctgaatttgtggcgagaagaaactacaacgaatgtcaagacccctcttccttctgtcgcaaatgcctggaaggtcaacgcctcattcctactgcttctcaatgtggtagtgatgctagccgtctag

SEQ ID NO: 129615 - DNA, 1323 bp, Artificial Sequence
  derived and/or modified sequence
atggagtaccagatcctgaagatgagcctgtgcctcttcatcctgctcttcctgaccccaggcatcctgtgcatctgccccctgcagtgcatctgcacagagcggcaccgccacgtggactgcagcggcaggaacctgagcaccctgcccagcggcctgcaggagaacatcatccacctgaacctgagctacaaccacttcacagacctgcacaaccagctgacccagtacaccaacctgcggaccctggacatcagcaacaaccggctggagagcctgcctgcccacctgcccaggagcctgtggaacatgtctgctgccaacaacaacatcaagctgctggacaagagtgacacagcctaccagtggaacctgaagtacctggatgtgtccaagaacatgctggagaaggtggtgctgatcaagaacaccctgcggagcctggaggtgctgaacctgagcagcaacaagctgtggacagtgcccaccaacatgcccagcaagctgcacatcgtggacctgagcaacaacagcctgacccagatcctgcccggcaccctcatcaacctgaccaacctgacccacctgtacctgcacaacaacaagttcaccttcatcccagaccagagctttgaccagctgttccagctgcaggagatcaccctgtacaacaaccgctggagctgtgaccacaagcagaacatcacctacctgctgaagtggatgatggagaccaaggcccacgtgattggcaccccctgcagcacccagatcagcagcctgaaggagcacaacatgtaccccaccccatctggcttcaccagcagcctcttcaccgtgtctggcatgcagacagtggacaccatcaacagcctgtctgtggtgacccagcccaaggtgaccaagatccccaagcagtaccgcaccaaggagaccaccttcggggccaccctgagcaaggacaccaccttcaccagcacagacaaggcctttgtgccctacccagaggacaccagcacagagaccatcaacagccatgaggccgccgccgccaccctgaccatccacctgcaggacggcatggtgaccaacaccagcctgaccagcagcaccaagagcagccccacccccatgaccctgagcatcaccagcggcatgcccaacaacttcagcgagatgccccagcagagcaccaccctgaacctgtggagggaggagaccaccaccaacgtgaagacccccctgcccagcgtggccaatgcctggaaggtgaatgccagcttcctgctgctgctgaatgtggtggtgatgctggccgtgtag

SEQ ID NO: 129616 - DNA, 1323 bp, Artificial Sequence
  derived and/or modified sequence
atggagtaccagatcctgaagatgagcctgtgcctgttcatcctgctctttttgactccgggtatactgtgcatttgtcctctgcaatgcatttgcaccgagcgacaccgtcatgtggattgtagcggcaggaacctgagcactctccccagtgggctgcaggagaacataatccacttaaacttgtcttataatcattttacagatctgcataaccagctcacacaatacactaacctgcgcacgctggatattagtaataacaggctcgaatccctccctgctcacttgccaagatctctgtggaatatgtcagcggctaacaacaatattaagctcctggataagtccgacacggcataccagtggaaccttaagtatttagacgtttccaagaacatgctcgagaaagtggtcctgattaagaatacgctgcgcagcctcgaagtactgaaccttagtagcaacaaattgtggacggtacctaccaatatgccgtctaaacttcacattgtggatctctctaataatagcctgacccagattctccccggaaccctcatcaatctcactaacctcacacatctgtatttgcacaacaataagtttaccttcatccccgatcaatcattcgatcaactgttccaactgcaggagattacactctacaataacaggtggtcttgcgaccataagcaaaatatcacatacctgctgaaatggatgatggaaactaaagcccatgttattggcactccatgttctacccagatatcctccctgaaagagcataatatgtaccccacaccatctggattcacgtcctctctttttacagtgtcaggcatgcaaactgtggataccattaatagcctctcagttgttacgcaaccgaaggttacaaagatccccaaacagtacaggactaaggagaccacttttggggccacactcagcaaggatacaacttttacatccaccgacaaggctttcgtgccttacccagaggacacgagcacggagactatcaactcccacgaggctgctgcagctaccctgaccatccacctgcaggatgggatggtcaccaacacatcattaacgtccagcacaaaaagctcaccgacaccgatgacactgagcattacaagcggaatgccaaacaatttcagcgagatgcctcagcagtcgacgaccctgaacctgtggagagaggagacgacgacaaacgtgaagaccccgctaccatccgttgcgaacgcttggaaagtcaatgcctctttcctcctgctgctgaatgtagtggtgatgttggctgtttag

SEQ ID NO: 129617 - DNA, 1867 bp, Artificial Sequence
  derived and/or modified sequence
gcagtcctcctatgtggtactgatcaggtggttgcagagcttcagctcacagcaacacaatgcagctgagcaggcaagcacagcccacagccagaaacagttccgactctacagaacaagacgacctttaagtttcccagagaaaatgagatgctgatgttgaagacgacaccacggctttgatggaatatcagatattgaaaatgtctctctgcctgttcatccttctgtttctcacacctggtattttatgcatttgtcctctccaatgtatatgcacagagaggcacaggcatgtggactgttcaggcagaaacttgtctacattaccatctggactgcaagagaatattatacatttaaacctgtcttataaccactttactgatctgcataaccagttaacccaatataccaatctgaggaccctggacatttcaaacaacaggcttgaaagcctgcctgctcacttacctcggtctctgtggaacatgtctgctgctaacaacaacattaaacttcttgacaaatctgatactgcttatcagtggaatcttaaatatctggatgtttctaagaacatgctggaaaaggttgtcctcattaaaaatacactaagaagtctcgaggttctcaacctcagtagtaacaaactttggacagttccaaccaacatgccctccaaactacatatcgtggacctgtctaataattctttgacacaaattcttccaggtacattaataaacctgacaaatctcacacatctttacctgcacaacaataagttcacattcattccagaccaatcttttgaccaactctttcagttgcaagagataaccctttacaataacaggtggtcatgtgaccacaaacaaaacattacttacttactgaagtggatgatggaaacaaaagcccatgtgatagggactccatgttctacccaaatatcatctttaaaggaacataacatgtatcccacaccttctggatttacctcaagcttattcactgtaagtgggatgcagacagtggacaccattaactctctgagtgtggtaactcaacccaaagtgaccaaaatacccaaacaatatcgaacaaaggaaacaacgtttggtgccactctaagcaaagacaccacctttactagcactgataaggcttttgtgccctatccagaagatacatccacagagactatcaattcacatgaagcagcagctgcaactctaactattcatctccaagatggaatggtcacaaacacaagcctcactagctcaacaaaatcatccccaacacccatgaccctaagtatcactagtggcatgccaaataatttctctgaaatgcctcaacaaagcacaacccttaacttatggagggaagagacaaccacaaatgtaaagactccattaccttctgtggcaaatgcttggaaagtaaatgcttcatttctcttattgctcaatgttgtggtcatgctggctgtctgagggtctgcattttctgaaactaatgaaagcactcctccctgatgtacagttgggaaaatatgtccatatctaaccagtgattcgagctatatttaagtattcaagaaagccagtcttaacatttctaactctgatgtaaatgaagtaacttgtcttaaataaaagaaatgcacaatgtcttggtacttgctgctattttactgtcttaattaagtaaactaatgagtttcttttataaaaaaaatgaaatgttttaaggcttcaatttattgcacaaaatataaagcatctaaactttaatatgtattttatgtatgtttacactgtcaaacatctggaaaataaaaggtctatgctcataa

SEQ ID NO: 129618 - DNA, 1323 bp, Artificial Sequence
  derived and/or modified sequence
atggaataccagatactcaagatgtcgttatgcctattcatcctgctctttctcactcccggaatactctgcatctgccctctccaatgcatatgcactgagagacataggcatgtggattgtagtggtcgcaatctgtcgaccctccccagcgggttgcaagagaatattatccatctaaacttgagctacaatcacttcactgatctgcacaaccagctgacccagtacactaatttgcggaccttggacatctctaataaccggctggaaagtttgcctgcccacctcccacggtccctgtggaacatgagtgcagccaacaacaacattaaactgttggataagtccgataccgcatatcaatggaacctcaagtatctggacgtctcgaaaaacatgcttgagaaagtcgtactcattaagaacacacttcgatccctggaggttctgaacctgagctccaataaactgtggaccgtgccaaccaatatgccctcaaaactacacatcgtggatctgagtaacaatagccttacgcagatactgccaggaacattaattaacttaaccaacctaacccatttgtaccttcacaataataagttcacctttattcccgaccaaagtttcgaccagctgtttcagctccaggaaatcaccctctacaacaacaggtggagctgcgatcataaacagaacattacttatcttctcaagtggatgatggaaactaaagcccatgttattggtactccttgcagtacccagatctcatctttgaaggagcataacatgtacccaactccaagcggatttacaagcagcctgtttactgtgagtggaatgcagactgtcgatactattaattcactgagcgtcgtcacccagcctaaggttacaaagatccctaagcagtatagaaccaaagagacaacattcggcgcaactttgtcaaaggacacgacatttaccagcacagacaaagcattcgtcccttaccctgaggacacttccaccgaaaccataaattcccacgaggcggcagccgctacacttaccatccacctgcaggacgggatggtaacgaatacatccttaacctcctccaccaaatcatccccaacccctatgaccttgtcgatcacttccggtatgcccaataattttagcgaaatgccccagcagtccactacactgaatttgtggagagaggagacaacaaccaatgtgaaaacgcctctgcccagtgtggccaatgcctggaaggtgaacgcctcgttcctactgcttctgaacgtggtggttatgctggccgtctag

SEQ ID NO: 129619 - DNA, 372 bp, Artificial Sequence
  derived and/or modified sequence
agttcaggtttatgtgtgtgcatttcttttttattattattaaataaacaacttggagggagttgaaggaatggtggctgccttcctggctcgtgatggggagtttgggggaaagtggcttttccagagccagcatcaaagaatcaagcactgaagacatagctggctctgaggtggggtgggtgcgggatcacagaccgcatgtcatccccttgcccccacccctgcaactctggggtatatctgtgtctagcaacgatgtctcatggcgtgacagactagaggatacgcatccctggaatgtgagtcaacaggaaagatggggccccacgcccttcaggcctcctgaatgatgccagcccagtatgctct

SEQ ID NO: 129620 - DNA, 1323 bp, Artificial Sequence
  derived and/or modified sequence
atggagtaccagatcctgaagatgagcctgtgcctgttcatcctgctgttcctgacccccggcatcctgtgcatctgccccctgcagtgcatctgcaccgagagacacagacacgtggactgcagcggcagaaacctgagcaccctgcccagcggcctgcaggagaacatcatccacctgaacctgagctacaaccacttcaccgacctgcacaaccagctgacccagtacaccaacctgagaaccctggacatcagcaacaacagactggagagcctgcccgcccacctgcccagaagcctgtggaacatgagcgccgccaacaacaacatcaagctgctggacaagagcgacaccgcctaccagtggaacctgaagtacctggacgtgagcaagaacatgctggagaaggtggtgctgatcaagaacaccctgagaagcctggaggtgctgaacctgagcagcaacaagctgtggaccgtgcccaccaacatgcccagcaagctgcacatcgtggacctgagcaacaacagcctgacccagatcctgcccggcaccctgatcaacctgaccaacctgacccacctgtacctgcacaacaacaagttcaccttcatccccgaccagagcttcgaccagctgttccagctgcaggagatcaccctgtacaacaacagatggagctgcgaccacaagcagaacatcacctacctgctgaagtggatgatggagaccaaggcccacgtgatcggcaccccctgcagcacccagatcagcagcctgaaggagcacaacatgtaccccacccccagcggcttcaccagcagcctgttcaccgtgagcggcatgcagaccgtggacaccatcaacagcctgagcgtggtgacccagcccaaggtgaccaagatccccaagcagtacagaaccaaggagaccaccttcggcgccaccctgagcaaggacaccaccttcaccagcaccgacaaggccttcgtgccctaccccgaggacaccagcaccgagaccatcaacagccacgaggccgccgccgccaccctgaccatccacctgcaggacggcatggtgaccaacaccagcctgaccagcagcaccaagagcagccccacccccatgaccctgagcatcaccagcggcatgcccaacaacttcagcgagatgccccagcagagcaccaccctgaacctgtggagagaggagaccaccaccaacgtgaagacccccctgcccagcgtggccaacgcctggaaggtgaacgccagcttcctgctgctgctgaacgtggtggtgatgctggccgtgtag

SEQ ID NO: 129621 - protein, 345 aa, Artificial Sequence
  derived and/or modified sequence
MGVCGYLFLPWKCLVVVSLRLLFLVPTGVPVRSGDATFPKAMDNVTVRQGESATLRCTIDDRVTRVAWLNRSTILYAGNDKWSIDPRVIILVNTPTQYSIMIQNVDVYDEGPYTCSVQTDNHPKTSRVHLIVQVPPQIMNISSDITVNEGSSVTLLCLAIGRPEPTVTWRHLSVKEGQGFVSEDEYLEISDIKRDQSGEYECSALNDVAAPDVRKVKITVNYPPYISKAKNTGVSVGQKGILSCEASAVPMAEFQWFKEETRLATGLDGMRIENKGRMSTLTFFNVSEKDYGNYTCVATNKLGNTNASITLYGPGAVIDGVNSASRALACLWLSGTLLAHFFIKF

SEQ ID NO: 129622 - protein, 354 aa, Artificial Sequence
  derived and/or modified sequence
MGVCGYLFLPWKCLVVVSLRLLFLVPTGVPVRSGDATFPKAMDNVTVRQGESATLRCTIDDRVTRVAWLNRSTILYAGNDKWSIDPRVIILVNTPTQYSIMIQNVDVYDEGPYTCSVQTDNHPKTSRVHLIVQVPPQIMNISSDITVNEGSSVTLLCLAIGRPEPTVTWRHLSVKEGQGFVSEDEYLEISDIKRDQSGEYECSALNDVAAPDVRKVKITVNYPPYISKAKNTGVSVGQKGILSCEASAVPMAEFQWFKEETRLATGLDGMRIENKGRMSTLTFFNVSEKDYGNYTCVATNKLGNTNASITLYEISPSSAVAGPGAVIDGVNSASRALACLWLSGTLLAHFFIKF

SEQ ID NO: 129623 - DNA, 1038 bp, Artificial Sequence
  derived and/or modified sequence
atgggcgtgtgcggctacctgttcctgccctggaagtgcctggtggtggtgagcctgagactgctgttcctggtgcccaccggcgtgcccgtgagaagcggcgacgccaccttccccaaggccatggacaacgtgaccgtgagacagggcgagagcgccaccctgagatgcaccatcgacgacagagtgaccagagtggcctggctgaacagaagcaccatcctgtacgccggcaacgacaagtggagcatcgaccccagagtgatcatcctggtgaacacccccacccagtacagcatcatgatccagaacgtggacgtgtacgacgagggcccctacacctgcagcgtgcagaccgacaaccaccccaagaccagcagagtgcacctgatcgtgcaggtgcccccccagatcatgaacatcagcagcgacatcaccgtgaacgagggcagcagcgtgaccctgctgtgcctggccatcggcagacccgagcccaccgtgacctggagacacctgagcgtgaaggagggccagggcttcgtgagcgaggacgagtacctggagatcagcgacatcaagagagaccagagcggcgagtacgagtgcagcgccctgaacgacgtggccgcccccgacgtgagaaaggtgaagatcaccgtgaactaccccccctacatcagcaaggccaagaacaccggcgtgagcgtgggccagaagggcatcctgagctgcgaggccagcgccgtgcccatggccgagttccagtggttcaaggaggagaccagactggccaccggcctggacggcatgagaatcgagaacaagggcagaatgagcaccctgaccttcttcaacgtgagcgagaaggactacggcaactacacctgcgtggccaccaacaagctgggcaacaccaacgccagcatcaccctgtacggccccggcgccgtgatcgacggcgtgaacagcgccagcagagccctggcctgcctgtggctgagcggcaccctgctggcccacttcttcatcaagttctag

SEQ ID NO: 129624 - DNA, 1065 bp, Artificial Sequence
  derived and/or modified sequence
atgggcgtgtgcggctacctgttcctgccctggaagtgcctggtggtggtgagcctgagactgctgttcctggtgcccaccggcgtgcccgtgagaagcggcgacgccaccttccccaaggccatggacaacgtgaccgtgagacagggcgagagcgccaccctgagatgcaccatcgacgacagagtgaccagagtggcctggctgaacagaagcaccatcctgtacgccggcaacgacaagtggagcatcgaccccagagtgatcatcctggtgaacacccccacccagtacagcatcatgatccagaacgtggacgtgtacgacgagggcccctacacctgcagcgtgcagaccgacaaccaccccaagaccagcagagtgcacctgatcgtgcaggtgcccccccagatcatgaacatcagcagcgacatcaccgtgaacgagggcagcagcgtgaccctgctgtgcctggccatcggcagacccgagcccaccgtgacctggagacacctgagcgtgaaggagggccagggcttcgtgagcgaggacgagtacctggagatcagcgacatcaagagagaccagagcggcgagtacgagtgcagcgccctgaacgacgtggccgcccccgacgtgagaaaggtgaagatcaccgtgaactaccccccctacatcagcaaggccaagaacaccggcgtgagcgtgggccagaagggcatcctgagctgcgaggccagcgccgtgcccatggccgagttccagtggttcaaggaggagaccagactggccaccggcctggacggcatgagaatcgagaacaagggcagaatgagcaccctgaccttcttcaacgtgagcgagaaggactacggcaactacacctgcgtggccaccaacaagctgggcaacaccaacgccagcatcaccctgtacgagatcagccccagcagcgccgtggccggccccggcgccgtgatcgacggcgtgaacagcgccagcagagccctggcctgcctgtggctgagcggcaccctgctggcccacttcttcatcaagttctag

SEQ ID NO: 129625 - DNA, 1038 bp, Artificial Sequence
  derived and/or modified sequence
atgggggtctgtggatatctgtttctgccctggaagtgccttgtggtggtttccctgcgcctattgtttctcgtgccgaccggcgttccagtgcgctccggcgacgcaaccttcccgaaggcaatggacaatgttaccgttcgacagggagagtctgccacccttaggtgcactatagacgatcgcgtgacccgtgtagcctggctgaaccggtctaccatactctatgcagggaacgataaatggagtatcgacccgcgggttatcatccttgtcaatacaccaacccaatatagcatcatgatccagaacgttgacgtttacgacgaaggcccatacacttgttccgttcagactgacaaccaccccaaaactagccgtgtgcaccttatcgtgcaggtgcccccgcagatcatgaatatctcttcagatattacagtcaatgagggcagctcagtgaccctactctgcctagcaatcgggaggcctgagcccacagtgacatggagacacctctctgtgaaggaaggacagggatttgtgtccgaagacgagtatctggagatcagcgacattaagagagatcagagcggtgagtacgagtgttcagccctcaacgacgtggcggccccagatgttcgcaaggtcaagattactgtcaattaccctccctatatttccaaagccaagaacaccggcgtttcagtggggcaaaagggaatcttgtcttgtgaggcctctgccgttcctatggcagaattccagtggttcaaagaggaaacaaggctcgccaccggcctggacggaatgcggatcgaaaacaagggaagaatgagtaccctgactttctttaatgtatcagagaaagactatgggaactacacgtgtgtggccacgaataaattgggcaatacgaacgccagtattacactgtacgggcccggtgccgtgattgacggcgtgaacagcgcaagcagggccctagcttgcctgtggctatcaggcaccctgcttgcgcacttctttattaaattttag

SEQ ID NO: 129626 - DNA, 1065 bp, Artificial Sequence
  derived and/or modified sequence
atgggggtgtgcggctatttgtttctgccctggaagtgtcttgtcgtcgtaagcctcaggctgctgtttctggtgcccacgggagtacctgtcagaagtggggacgcaacattccccaaggccatggacaacgtgactgtgcggcagggagaaagcgcaacgctgcgttgcacaattgatgaccgggttacaagggtggcctggctgaatagatccacaattctctacgctggcaatgataagtggtctatcgacccacgcgtcatcatactcgtgaacacgcctacacaatattctatcatgatacagaatgtcgatgtgtacgatgaaggtccatacacttgttccgttcagacagacaaccacccaaaaacaagccgggtccacttgatcgtgcaggtccccccacaaattatgaacatctcctctgatatcaccgtgaacgaaggcagctcggtgaccctgctgtgtctggcaatagggagacctgaacccacagttacatggagacatttatccgtcaaggaggggcaagggttcgtcagtgaggatgaatatctggagatctctgatattaaacgcgaccagtccggggagtacgagtgctcagcgctgaatgatgtcgccgcccccgatgtgcgaaaagtaaaaattaccgtgaattatcccccctatatttctaaagcaaaaaacacaggtgtcagcgtgggccagaaaggcatactgtcttgtgaagcctccgccgtgcccatggccgagtttcaatggttcaaggaggaaactaggctggccacagggctggatggaatgagaattgagaacaaaggacgcatgtctaccctgactttctttaacgtatcagagaaagactatggtaattacacttgcgttgcaactaataagctggggaacactaatgcatctatcactctctatgagattagtccctcctccgcagtggccggccctggggcagtcattgatggagtaaacagtgcctcgcgcgctctagcttgcctatggctgtctgggacacttttggctcacttctttataaaattctag

SEQ ID NO: 129627 - DNA, 1038 bp, Artificial Sequence
  derived and/or modified sequence
atgggcgtgtgtggctacctgttcctgccctggaagtgcctggtggtggtgtccctgcggctgctcttcctggtgcccactggagtgcctgtgcgctctggagatgccaccttccccaaggccatggacaacgtgacagtgcggcagggcgagagcgccaccctgcgctgcaccattgatgacagagtgaccagggtggcctggctgaacagaagcaccatcctgtatgctggaaatgacaagtggagcattgaccccagggtcatcatcctggtgaacacccccacccagtacagcatcatgatccagaatgtggatgtgtatgatgagggcccctacacctgcagcgtgcagacagacaaccaccccaagaccagccgggtgcacctgattgtgcaggtgcccccccagatcatgaacatcagcagtgacatcaccgtgaatgaaggcagctctgtgaccctgctgtgcctggccatcggccggcctgagcccaccgtgacctggaggcacctgtctgtgaaggagggccagggctttgtgtctgaagatgagtacctggagatcagtgacatcaagagggaccagagcggggagtatgaatgttctgccctgaatgatgtggccgccccagatgtgaggaaggtgaagatcaccgtgaactacccaccctacatcagcaaggccaagaacacaggagtgtctgtgggccagaagggcatcctgagctgtgaggccagcgctgtgcccatggccgagttccagtggttcaaggaggagacccggctggccaccggcctggatggcatgagaattgaaaataaaggaaggatgagcaccctgaccttcttcaacgtgtctgagaaggactatggcaactacacctgtgtggccaccaacaagctgggcaacaccaatgccagcatcaccctgtatggccctggagctgtgattgatggagtgaacagcgccagccgggccctggcctgcctgtggctgagcggcaccctgctggcccacttcttcatcaagttctag

SEQ ID NO: 129628 - DNA, 1065 bp, Artificial Sequence
  derived and/or modified sequence
atgggcgtgtgtggctacctgttcctgccctggaagtgcctggtggtggtgtccctgcggctgctcttcctggtgcccactggagtgcctgtgcgctctggagatgccaccttccccaaggccatggacaacgtgacagtgcggcagggcgagagcgccaccctgcgctgcaccattgatgacagagtgaccagggtggcctggctgaacagaagcaccatcctgtatgctggaaatgacaagtggagcattgaccccagggtcatcatcctggtgaacacccccacccagtacagcatcatgatccagaatgtggatgtgtatgatgagggcccctacacctgcagcgtgcagacagacaaccaccccaagaccagccgggtgcacctgattgtgcaggtgcccccccagatcatgaacatcagcagtgacatcaccgtgaatgaaggcagctctgtgaccctgctgtgcctggccatcggccggcctgagcccaccgtgacctggaggcacctgtctgtgaaggagggccagggctttgtgtctgaagatgagtacctggagatcagtgacatcaagagggaccagagcggggagtatgaatgttctgccctgaatgatgtggccgccccagatgtgaggaaggtgaagatcaccgtgaactacccaccctacatcagcaaggccaagaacacaggagtgtctgtgggccagaagggcatcctgagctgtgaggccagcgctgtgcccatggccgagttccagtggttcaaggaggagacccggctggccaccggcctggatggcatgagaattgaaaataaaggaaggatgagcaccctgaccttcttcaacgtgtctgagaaggactatggcaactacacctgtgtggccaccaacaagctgggcaacaccaatgccagcatcaccctgtatgagatcagccccagcagcgctgtggccggccctggagctgtgattgatggagtgaacagcgccagccgggccctggcctgcctgtggctgagcggcaccctgctggcccacttcttcatcaagttctag

SEQ ID NO: 129629 - DNA, 1038 bp, Artificial Sequence
  derived and/or modified sequence
atgggcgtgtgcggctacctgttcctgccctggaagtgcctggtggttgtcagtctgcgcttgttgttcctggtgcccacaggcgtccctgttcgctccggggacgccaccttccctaaggctatggacaacgttactgtgcggcaaggagaatctgccaccctccggtgcaccattgatgatcgcgtcactcgcgttgcctggctgaaccgaagtactatcctctacgccgggaatgataagtggagcatcgatccacgggtgatcattctcgtcaatacccccacccagtatagcattatgatccaaaatgttgatgtgtatgacgaaggcccatatacctgttcagtacagaccgataatcatccgaagaccagccgagtacacctgatcgttcaggtgccacctcagatcatgaacataagtagtgacataaccgtaaacgaaggatctagcgtgacactcctgtgtttggcaatcggcagaccagagcctaccgtaacttggcggcatctgagtgtgaaggaggggcaggggtttgtgtctgaagacgaatatttagaaatatctgatatcaagcgcgaccagtcaggcgaatacgagtgctctgcacttaatgatgtggctgcccccgatgtccggaaagtaaagattaccgtcaactaccccccctacatatccaaagcgaagaataccggtgtctccgtcggccaaaaagggatcttgtcatgtgaagccagcgccgtgcccatggcggaattccagtggtttaaagaggaaacccgtctggctactggtcttgacggcatgagaatcgaaaacaagggacgaatgtccactctcacattctttaatgtaagcgaaaaagactacggaaactacacctgtgtagcaaccaacaaacttggcaatacaaatgcttcgatcaccctatatggacccggagcagtgattgatggtgttaactcggcttctcgcgccttggcctgcctatggctgtccgggactctgttagcacacttctttattaagttttag

SEQ ID NO: 129630 - DNA, 1065 bp, Artificial Sequence
  derived and/or modified sequence
atgggcgtgtgcggctacctgttcctgccctggaagtgcctggtggtcgttagtctgagactgctgttcctagttcccaccggtgttccggtgcgtagcggtgacgctacatttccgaaggccatggacaatgttactgtccgacagggcgagtctgccacactccgctgtacaatcgacgaccgagtcactcgcgttgcttggctgaaccgctctacaatcctgtacgccggaaatgacaagtggagcatcgacccccgggtcattatcttagtcaatacccctacacagtattccattatgatccaaaatgttgacgtgtacgatgaggggccgtacacatgttctgtgcagaccgataatcaccccaagacctccagagtccacttgatcgtccaggtgcctcctcaaattatgaatatttcctctgacattacagtcaacgagggatcatctgttaccctcctatgcttggcaatcgggagacctgagccaacagtgacatggcggcacctgagcgtgaaagaaggccagggctttgtttctgaggatgagtatctggagatctccgatatcaaacgagatcaatcgggagagtatgaatgttccgccctcaacgacgtggctgctcccgacgtgcgcaaggttaaaattacagtgaattatcccccctacatctccaaggcgaagaatactggagtgtccgtgggccagaaaggtatcctgtcctgtgaggcctctgcagtgccaatggccgaattccagtggttcaaggaagagaccagactggcgaccgggctggacggtatgcgcatcgaaaacaaaggaagaatgagcacattgactttctttaatgtctccgaaaaggactacggcaattatacctgtgtggcgaccaacaaattggggaatactaacgcttctatcacactgtacgagatttcacctagcagcgccgttgctgggccgggggctgttatcgacggggtcaactcagcaagtcgggctctcgcatgcttgtggctgagcgggacactcttagcacactttttcataaagttttag

SEQ ID NO: 129631 - DNA, 6833 bp, Artificial Sequence
  derived and/or modified sequence
cccgccttggaactttttgccgccttggggttccagatgcgagacctggggctgggggacacgtacatctgtccatgtgtgtgatctaataaaccatttcctcctctccttgaagccgcagctttttatgacagctcctgtatgtcagagacacttgccttcttctttgggttataaacttttgatgccagagctctgcagaacgtgcccaactgaatcttaaagtagcgtctcgaagagagaggcagagaaagcgcaatctgtgaccttcatccccgcaccttgcttcttcctctcccctcctggccgcctccctcctccccaggggagcgtcaagaaagctctttttggatgcaggagggggcatctggttctgctaggctggaaagctgaggcaggatctgaggaagaattctcagactccggagagcccggactcctctcttctccttccccctgctcctggcgaactctgccccttccctcctccccgcaccgcttcccgagcccgctggtgcgcggggcgggggaccaggactgtgcggctgccggagtcctgggaagttgtggctgtcgagaatgggggtctgtgggtacctgttcctgccctggaagtgcctcgtggtcgtgtctctcaggctgctgttccttgtacccacaggagtgcccgtgcgcagcggagatgccaccttccccaaagctatggacaacgtgacggtccggcagggggagagcgccaccctcaggtgtaccatagatgaccgggtaacccgggtggcctggctaaaccgcagcaccatcctctacgctgggaatgacaagtggtccatagaccctcgtgtgatcatcctggtcaatacaccaacccagtacagcatcatgatccaaaatgtggatgtgtatgacgaaggtccgtacacctgctctgtgcagacagacaatcatcccaaaacgtcccgggttcacctaatagtgcaagttcctcctcagatcatgaatatctcctcagacatcactgtgaatgagggaagcagtgtgaccctgctgtgtcttgctattggcagaccagagccaactgtgacatggagacacctgtcagtcaaggaaggccagggctttgtaagtgaggatgagtacctggagatctctgacatcaagcgagaccagtccggggagtacgaatgcagcgcgttgaacgatgtcgctgcgcccgatgtgcggaaagtaaaaatcactgtaaactatcctccctatatctcaaaagccaagaacactggtgtttcagtcggtcagaagggcatcctgagctgtgaagcctctgcagtccccatggctgaattccagtggttcaaggaagaaaccaggttagccactggtctggatggaatgaggattgaaaacaaaggccgcatgtccactctgactttcttcaatgtttcagaaaaggattatgggaactatacttgtgtggccacgaacaagcttgggaacaccaatgccagcatcacattgtatgggcctggagcagtcattgatggtgtaaactcggcctccagagcactggcttgtctctggctatcagggaccctcttagcccacttcttcatcaagttttgataagaaatcctaggtcctctgagcaacgcctgcttctccatatcacagactttaatctacactgcggagagcaaaccagcttgggcttctttttgtttttttctgttattctagatttgttttctttttgtttttgtttatttgtttgtttgcttttatttccagcttgaatgagtggggttgggggcggggtgggcagggttctaccacgtgtaggataatcattcattggtgtgtccaaaaatggggtctgctcctgctaccttgacccttccctttcctctgcttctctcctcatcatcattcccaacaacatcctctgccacacacaacaaaacgtaagtttcatttgggcaaaaattgagcctcacaataaacaccctgaagacacaacttgacttataacatagtgcacagcaagagctacatccaagtgtcctattatctgtgattattttcttaatgacaatgtacatatgcccccatccatgttaattattatctaattccattagggttcacgtcttttctttctgggacactatcctactatatccatatctatagatttcaatatagatgattgtgccatcttctgtagcccctccgctctactcattccttccaccatctgcagagatttgaagtttggggctatgcatgaaacccaacactaaattttgcaagtcaagtaaccaaaaaagggggaggcattttgaagatagaacctctattttaaaaagagaagttcaactcataaacgtgattgataggtggctgatttatttaggttttgtcaagctatctatcaaagtaatggtacagttacccatctactcaaatatctgatttatctcaccatccaattatctacccacctgtcttcctctctagcaatctatttactgtttatcaatctatcaatgtaattgtctaacactcctttctattctctccctactactcactatcaattcatccccatatgaatctctaaccatattgtatctctcccactgtattcatttatacaccatcagcagacattggcatcttcaaaattatctttcaacttctgtgaaagccaacgatctcacaggttaacaaaatacaaaagcaataccctgtgttgtggactctttaaaatctggtatcctatccacccaagggagacactaacagataggccaaagtagcaagctaatgatcagtcactcactattcccagaagagcctgtgttttctaaaacactttcttgggaagcagatcagcctagaaaagttttgattagcactgtggttttccttttgcacttgaaggacaaaggtgccagcctttatgcttctctcaacccttcaagaaagtacatgtcaggaacctatggctggctttccttagcagcaagaacttgagagaaaaacacatctgtctctgcaatgcaaagtgaagagtccacccgcctgagtgggatgacttcagctagagtctcctttctgctccagttctggtttaatctgtttgaaaactatccagtaaaaagctgatggaggccaattacatggcgggtgtattgacaactctggtatttgtttcaggaagctcttctaagctgagggcacttgagcaactgacttaattttcaagcacttgattaacacaacactgcaaacagaagggagaaagtgtcagtgacacagtttcctctgatgcagctgcttctccaatggctttggggaagaacttcaccagctcttcaggttcaaagcagacccagcatacaaacaagagctgagccacctttgctgtcttgtctcctgggacgagaaggactcatccagcaaagttgcctgggattcaaaataaaggcattgcagaccgcacaggtgtgctgcagggactgatccacagagaggatgagaatgcagcatcaatcgcagacctgccctgcctcagttggaaaaccttttcaggccctcagtctaaaaaataaaaaatatgagcaccattgaattctgtgcccttaatgcttaactggtcttcttcctctggtatcagtgtcctctttgtttttgtccatcaaggcacatgagtgtgacctctgccatggggaaacacacacagagatatctatacatatatacatacatacaaacataggctatcttggcacactaaatgctaagcactgtcttaagaggtagagctggtgtgagtgaaattaatgttacattttccagctgtaaacagacatctgcatttcctagtgagctgccaggagccagattcgggaaccgtaactgatgtgccaggaatggtgcattgattcccagttccagggatgatcatgagcaggcgcaaaatcagaattaaaggtcgcacatagacgtttcagatctgtcaccaccttcagcatctggagttgagttggtgtcagatagtgtatgagaattaaatgtgtcatctgagcatgctactgatgataaatttgttactttggagttgaataaatgtgaaggctgtgaagagtggacagtcttggagaacacagtgcttgaaatggacaagctggacctattcctcactccaagacttgttctacaggaaagggtccatgctcctttggccaagatcatcagaacctctcaacccaacaaggctggcttcagggccactatggaaccctgctgttcccccttccaaaggatactaagatgcccctctggtgggtacctatcccagccacgtttcagagggagagaaatgctacagttgatcctcatctgtctggggtaaagacaacaaagtaaatacaacccaaggcaactggggtactcactgggagtgaaaatgacttcttcacaacagacatatttctgcttctgtgtttttgtgtttctttggtggggatggcttcatgggagagtggctgtcacccatcattttgaagcatatagaacaacaaatgcttacacaagacaatatccacacttttccaacttcacacacggagagtacatggagaatgcctacaggctagatttgttcagggtgccagtagtgggcatggggtgggggcaaggcaggacaaaacatacaagtctgagcaagtacatctcttgcaggttttccacatgaaaaggaagccaaataagtcctgttaggagattaggtgagaggaattagcaatgtagggactctgaaacccttccccttcccaaaacagagttcatatgcacttccaccaaagtaatgccaatgaaagtgctcgtgttaaggctgcagccaagcttgtttttcagtagtttaatgtcaagtgcctgatacagtcgactgcaagtctaaacaagcatgtttagtttttctcattcttgctttaattcagggagggggagatgtagagaagtggttgtgaaaacatgtacaggctttatgcagagcactgcgcatggctgttctgctgcaactgtgctccacgaaacagaagaaaaggtaaggtgttgtgtcacaaagaggccccagtctctttcttcttacatccatgcctcttactagatgatacatttacagattgggcagtttgttctcaaaacctgggtgagaagactattcctggactctagcaacttcaaaactgaggctgggtttcagaatctttttctgcatcaattcagtcaatttgccttcaacaaagagaagtcagcaagttctatttatgctgaaagaactattccatgagaaaagcagagaaccccaaagtgggcaggcaaccccgacgagagcttatccctgtggcggcatcaggagtggctgtacattgaattttcaagtgctggttggctgtcgccagcccatggtaggaggggaggaatggcttaagatgaggtaagatctggtggtggggcatctttcctcaattccatactgactttgatcttgagaaagaaaaactggctatgcattacctaaaaccagtccaaaatgaaacagaccaacacacacacaaaagcaaattgtcaatccctttggaattaagggaagcagcataaggtttttctttttggaaaaaatgcatttattttctttttctccaacagcaagaatcttttgttttcattttgcacgtgaccttatcttggaaactcttatacccaattgcctcccctcctattattcagagcttccctgtctttttacttgaagacaaataagtttgagcacttgagtaaaacttcacaggtgtgtaagtaggaaggcaacattttcaaaaagagaccatatgatgagaacgcctaatgatcaccacatgcaaacaaacaaaactgccagtctcatttcccacatttcttacttaagagaagagaagtaaatgaaaggaagaagaaatagatttgtaattaaagatgtggcaaaaaagatagggctgagccagttcaatttagccttcaggtgcagaatacttagagtccaaagaaatgtggagtggacttaattagatgcagttgtctttatcctgaaagtagtgagctaagcctaatttccagcattttgaaagagattcctttttgtttctttccatggtgccctctttaaggcacagagttgctccacaccactgggtggagaaagaaagattgcgaaccctcgaccatccttttgaggctacattctatgttatttggcagatttataaagctatcagtaataacaatgctatgtactgcaagctgcccttgtgttagttaaagggagcatttttaatcgttcggaaattttcgtgacatgtcaagtgcagttgtgaggactgtgtgggtgaacgaaaatgtgtctgtcaagttcagagtcctttagatttaaaaaaaaattatgacttatcaatggtgccgttatagctgtgtcagacaatgggtgtgcccattctcacaattatccttcaaaaaaaatctatgttcaaatgctttaaaaatttatcacacgatacaagagtatgactttgtcagccttctagagttctttttttcttttattttctttcgtattttttccttcaaaaaatcaatgaagacttgatttctgtcaataattgtatcaagggtgaatatactacctgaattttgtgcatgttacattgtagttgtaaccttttctaattcaggatgaatacgagatggttgtgattgtgcagtgtaccaataaagttcgagaaatttgtaacttt

SEQ ID NO: 129632 - DNA, 1065 bp, Artificial Sequence
  derived and/or modified sequence
atgggggtctgtgggtacctgttcctgccctggaagtgcctcgtggtcgtgtctctcaggctgctgttccttgtacccacaggagtgcccgtgcgcagcggagatgccaccttccccaaagctatggacaacgtgacggtccggcagggggagagcgccaccctcaggtgtaccatagatgaccgggtaacccgggtggcctggctaaaccgcagcaccatcctctacgctgggaatgacaagtggtccatagaccctcgtgtgatcatcctggtcaatacaccaacccagtacagcatcatgatccaaaatgtggatgtgtatgacgaaggtccgtacacctgctctgtgcagacagacaatcatcccaaaacgtcccgggttcacctaatagtgcaagttcctcctcagatcatgaatatctcctcagacatcactgtgaatgagggaagcagtgtgaccctgctgtgtcttgctattggcagaccagagccaactgtgacatggagacacctgtcagtcaaggaaggccagggctttgtaagtgaggatgagtacctggagatctctgacatcaagcgagaccagtccggggagtacgaatgcagcgcgttgaacgatgtcgctgcgcccgatgtgcggaaagtaaaaatcactgtaaactatcctccctatatctcaaaagccaagaacactggtgtttcagtcggtcagaagggcatcctgagctgtgaagcctctgcagtccccatggctgaattccagtggttcaaggaagaaaccaggttagccactggtctggatggaatgaggattgaaaacaaaggccgcatgtccactctgactttcttcaatgtttcagaaaaggattatgggaactatacttgtgtggccacgaacaagcttgggaacaccaatgccagcatcacattgtatgaaataagcccctcatcagcagtggcagggcctggagcagtcattgatggtgtaaactcggcctccagagcactggcttgtctctggctatcagggaccctcttagcccacttcttcatcaagttttga

SEQ ID NO: 129633 - DNA, 1038 bp, Artificial Sequence
  derived and/or modified sequence
atgggcgtgtgtggctatctcttcctgccttggaagtgtcttgtggtggtaagccttcgtctgctgttcctggtgccaacgggagtgcctgtgcggtctggagacgcaacgtttccaaaagctatggacaacgtcactgtgcgccaaggggaatccgctacactcaggtgcacaatcgatgacagggttacccgggtagcatggctgaatagatcaactattctgtatgcgggaaatgacaagtggtccatcgacccgagagtgatcatcctggtcaatacaccaacacagtactcgatcatgatccaaaacgtggatgtgtacgacgagggaccgtatacctgttcagttcaaaccgataatcaccctaagacatcccgcgtgcatttgatagtccaagtgcctccacaaatcatgaatatttctagtgatattacagtgaacgaaggtagttccgttacgctgctttgtctcgccatcggacgacccgaaccaactgttacttggcgacacctcagcgtgaaggagggccaggggtttgtgtcagaagatgagtacctggagatcagcgacattaaacgcgaccagagcggggaatacgaatgcagcgcgctgaacgacgtggctgcccctgacgtccgaaaagtaaaaataacagtcaactaccccccatatatctcgaaagcaaagaataccggtgtgtccgtggggcagaagggcatcctgagctgtgaagccagtgccgtgcccatggcagagttccaatggtttaaagaggagactaggttggctacagggctagatggaatgcgcatcgaaaacaaggggaggatgtcaacgttgacattcttcaacgtgtccgaaaaagattacggtaattacacctgtgttgcaaccaataaactgggcaataccaatgcttcaatcacattgtacggtcctggcgcagttatcgatggcgtaaacagtgcctcgcgcgcactagcatgtctgtggctatctggcacactgttggcacatttttttatcaaattttag

SEQ ID NO: 129634 - DNA, 1065 bp, Artificial Sequence
  derived and/or modified sequence
atgggcgtctgtggatatctgtttctgccatggaaatgccttgttgtagtctcattacgcctgttattcctagtgcccaccggagtacccgtgcgttcaggtgacgcaaccttccccaaagctatggacaatgttactgttagacagggagagagcgccacactgcggtgcactattgacgaccgagtgactcgcgttgcctggttaaatcgaagtaccattttatatgccggtaatgacaaatggtccatcgaccccagggttatcatactggtcaatacccccacccagtactcgatcatgatccagaacgtcgacgtgtatgacgaagggccttacacctgcagtgtgcagactgataatcaccccaagactagcagggtgcacctcatcgtgcaggtaccaccccagatcatgaatatctcttccgacattacagttaacgagggaagcagtgtgactctcctatgtcttgccatcggaaggcctgaaccaaccgtcacttggcggcacctttccgtgaaggagggccaaggtttcgtgtcagaggatgaatatctcgagatatccgatattaaaagggaccaatcgggggagtatgagtgttccgccttaaacgacgtggcagctcccgacgtccgcaaagtgaagatcactgttaattacccgccatacatttcaaaggcaaaaaatactggcgtcagcgtcgggcagaagggcattcttagttgcgaagcttcagctgtacctatggcggagtttcagtggtttaaggaagagacaagactagcgacaggattggacgggatgaggatcgaaaataaaggaagaatgtctactttgacgtttttcaatgtgtcagaaaaagactatgggaattacacgtgcgtggccactaataaactgggtaatacaaacgcatccatcaccttgtacgagatatcaccctcatcagccgtcgccggtccgggtgcggtgatcgacggggtgaattctgcgtctagggccctggcctgtctgtggttgtccggaacactgcttgcccactttttcataaagttctag

SEQ ID NO: 129635 - protein, 401 aa, Artificial Sequence
  derived and/or modified sequence
MNNLLCCALVFLDISIKWTTQETFPPKYLHYDEETSHQLLCDKCPPGTYLKQHCTAKWKTVCAPCPDHYYTDSWHTSDECLYCSPVCKELQYVKQECNRTHNRVCECKEGRYLEIEFCLKHRSCPPGFGVVQAGTPERNTVCKRCPDGFFSNETSSKAPCRKHTNCSVFGLLLTQKGNATHDNICSGNSESTQKCGIDVTLCEEAFFRFAVPTKFTPNWLSVLVDNLPGTKVNAESVERIKRQHSSQEQTFQLLKLWKHQNKDQDIVKKIIQDIDLCENSVQRHIGHANLTFEQLRSLMESLPGKKVGAEDIEKTIKACKPSDQILKLLSLWRIKNGDQDTLKGLMHALKHSKTYHFPKTVTQSLKKTIRFLHSFTMYKLYQKLFLEMIGNQVQSVKISCL

SEQ ID NO: 129636 - DNA, 1206 bp, Artificial Sequence
  derived and/or modified sequence
atgaacaacctgctgtgctgcgccctggtgttcctggacatcagcatcaagtggaccacccaggagaccttcccccccaagtacctgcactacgacgaggagaccagccaccagctgctgtgcgacaagtgcccccccggcacctacctgaagcagcactgcaccgccaagtggaagaccgtgtgcgccccctgccccgaccactactacaccgacagctggcacaccagcgacgagtgcctgtactgcagccccgtgtgcaaggagctgcagtacgtgaagcaggagtgcaacagaacccacaacagagtgtgcgagtgcaaggagggcagatacctggagatcgagttctgcctgaagcacagaagctgcccccccggcttcggcgtggtgcaggccggcacccccgagagaaacaccgtgtgcaagagatgccccgacggcttcttcagcaacgagaccagcagcaaggccccctgcagaaagcacaccaactgcagcgtgttcggcctgctgctgacccagaagggcaacgccacccacgacaacatctgcagcggcaacagcgagagcacccagaagtgcggcatcgacgtgaccctgtgcgaggaggccttcttcagattcgccgtgcccaccaagttcacccccaactggctgagcgtgctggtggacaacctgcccggcaccaaggtgaacgccgagagcgtggagagaatcaagagacagcacagcagccaggagcagaccttccagctgctgaagctgtggaagcaccagaacaaggaccaggacatcgtgaagaagatcatccaggacatcgacctgtgcgagaacagcgtgcagagacacatcggccacgccaacctgaccttcgagcagctgagaagcctgatggagagcctgcccggcaagaaggtgggcgccgaggacatcgagaagaccatcaaggcctgcaagcccagcgaccagatcctgaagctgctgagcctgtggagaatcaagaacggcgaccaggacaccctgaagggcctgatgcacgccctgaagcacagcaagacctaccacttccccaagaccgtgacccagagcctgaagaagaccatcagattcctgcacagcttcaccatgtacaagctgtaccagaagctgttcctggagatgatcggcaaccaggtgcagagcgtgaagatcagctgcctgtag

SEQ ID NO: 129637 - DNA, 1206 bp, Artificial Sequence
  derived and/or modified sequence
atgaataatctcctctgttgtgcgctggtgttcttagatatctctatcaagtggacaacccaagagacctttccacctaaatacttgcactacgatgaagagaccagccatcagcttctctgtgataagtgcccaccgggcacctaccttaaacaacattgcaccgctaagtggaagaccgtgtgtgcgccgtgccctgatcattactatactgactcctggcacacgtcagatgagtgcctgtactgctctcccgtgtgtaaggaactccagtatgtgaaacaggaatgcaataggactcataatcgagtgtgcgaatgcaaagagggaaggtacctcgagattgagttctgtctgaaacaccgaagctgtccaccaggcttcggcgtggtgcaggctggtacccctgaacgaaataccgtctgcaagcggtgtcccgacggcttcttttccaatgagaccagctcaaaagccccctgccggaagcacaccaattgtagcgtctttggccttttgctgacacagaaagggaatgccacacatgacaatatttgctccggaaacagtgagtctacgcagaaatgtggcatagatgtgactctatgcgaggaagcattttttcgcttcgctgtgcctacaaagttcactccaaactggctctctgtgctggtcgacaacttgccaggtacaaaggtgaatgccgagagcgtggagcgtatcaagagacagcactcatcccaggaacaaacctttcaacttcttaagctttggaagcatcagaataaggatcaggatattgtcaagaagattatccaagatatagatctttgtgagaactctgttcagcgccatattggccatgcaaacctgactttcgaacaacttagatcactcatggaatccttgcctgggaagaaggttggagctgaggatatcgagaagactatcaaggcctgcaagccaagcgatcagatcctgaagctgctgagcctctggcgtataaaaaacggagatcaagataccttaaagggactaatgcatgccctcaaacactccaagacatatcatttccctaaaacggtgacacagagtctaaaaaaaactataagattcttacacagcttcaccatgtacaaactctatcaaaaactttttcttgaaatgataggaaaccaggttcagtctgtgaaaatttcttgtttgtag

SEQ ID NO: 129638 - DNA, 1206 bp, Artificial Sequence
  derived and/or modified sequence
atgaacaacctgctgtgctgtgccctggtgttcctggacatcagcatcaagtggaccacccaggagaccttcccccccaagtacctgcactatgatgaggagaccagccaccagctgctgtgtgacaagtgccccccaggcacctacctgaagcagcactgcacagccaagtggaagacagtgtgtgccccctgcccagaccactactacacagacagctggcacaccagtgatgaatgtctgtactgcagccctgtgtgcaaggagctgcagtatgtgaagcaggagtgcaacagaacccacaacagagtgtgtgagtgcaaggagggccgctacctggagattgagttctgcctgaagcacaggagctgccccccaggcttcggcgtggtgcaggccggcaccccagagaggaacacagtgtgcaagcgctgcccagatggcttcttcagcaatgagaccagcagcaaggccccctgcaggaagcacaccaactgcagcgtgtttggcctgctgctgacccagaagggaaatgccacccatgacaacatctgcagcggcaacagcgagagcacccagaagtgtggcattgatgtgaccctgtgtgaggaggccttcttccgctttgctgtgcccaccaagttcacccccaactggctgtctgtgctggtggacaacctgcccggcaccaaggtgaatgctgagagcgtggagcgcatcaagaggcagcacagcagccaggagcagaccttccagctgctgaagctgtggaagcaccagaacaaggaccaggacatcgtgaagaagatcatccaggacatcgacctgtgtgagaacagcgtgcagaggcacatcggccacgccaacctgacctttgagcagctgcggagcctgatggagagcctgcccgggaagaaggtgggcgctgaggacatcgagaagaccatcaaggcctgcaagcccagcgaccagatcctgaagctgctgagcctgtggaggatcaagaatggagaccaggacaccctgaagggcctgatgcacgccctgaagcacagcaagacctaccacttccccaagacagtgacccagagcctgaagaagaccatccgcttcctgcacagcttcaccatgtacaagctgtaccagaagctgttcctggagatgattggcaaccaggtgcagagcgtgaagatcagctgcctgtag

SEQ ID NO: 129639 - DNA, 1206 bp, Artificial Sequence
  derived and/or modified sequence
atgaacaacctgctgtgctgcgccctggtgttcctggacatcagcatcaagtggactacacaggaaactttcccgccaaagtatctacattatgatgaggaaacctcccatcaactgctgtgcgataaatgtcctcctggaacctatctgaagcagcactgcacagccaagtggaagaccgtgtgcgcgccctgtcccgatcattactacaccgactcctggcacacaagcgatgagtgtctgtattgtagccctgtgtgcaaggagctgcaatacgtcaaacaagaatgcaacaggactcataacagggtgtgtgaatgcaaggagggtcgctatctggagatcgagttttgcctcaagcaccgatcctgcccgcctggttttggcgtagtacaagccggcacaccagagagaaataccgtgtgtaaacggtgtccagacggcttcttctctaatgaaacctctagcaaggcaccttgccgcaagcacacgaactgtagcgtgtttggcctgctcttaacccagaaagggaacgccacccacgacaacatctgctccggtaacagcgaaagcacccagaaatgcggcattgacgttacactttgtgaggaggcgtttttcagatttgcagttcccaccaagttcactcctaattggctgagcgtgttagtcgataatttgccaggcactaaggtgaatgccgaatccgtcgagagaattaagcggcaacactcttctcaggagcagacctttcaactactgaaactctggaagcaccaaaacaaggaccaggacattgttaaaaagatcatacaggatatagatctgtgcgagaatagtgttcagcgccacatcggacatgctaatcttacattcgagcagttgaggagcctgatggagtcactgcctggcaaaaaagttggagcagaggatattgaaaaaacaataaaagcgtgcaaaccgtccgaccaaatattgaagctactgtcgctgtggagaatcaaaaatggtgatcaggataccttaaagggcctgatgcatgccctgaaacattcaaagacttaccatttccctaagacagtcacacagtccctgaaaaaaacaatccgctttctgcattcctttacaatgtacaaactgtaccagaaattgttccttgagatgataggcaaccaggtgcagtcagttaaaatttcctgtctgtag

SEQ ID NO: 129640 - DNA, 1206 bp, Artificial Sequence
  derived and/or modified sequence
atgaataacctgctctgctgcgccctagtattccttgacatctccattaaatggaccacacaagagacgtttcctcctaaatacctgcattacgacgaagagaccagccaccagctgctttgtgataagtgcccgcctgggacgtacctgaaacagcactgcactgccaagtggaagaccgtgtgcgcaccgtgcccggaccattattatactgacagctggcacacctcagacgagtgtctctattgcagccctgtgtgcaaagagctgcagtacgtgaagcaggaatgcaatcggacccataatcgagtgtgcgagtgtaaagagggccgttatttggaaatcgagttttgtctcaagcatagatcctgcccaccaggcttcggagtcgttcaagctgggaccccagagcgaaatactgtttgcaaacggtgtcctgacgggtttttctccaatgagacaagcagcaaggctccttgccgcaagcataccaattgctccgtcttcggtttattacttacccaaaaaggcaatgccacccacgataacatctgcagcggcaactccgagtccacccagaaatgtggaatagacgtgactctttgcgaggaggcatttttcagatttgccgtgccaaccaaattcacccctaactggctatctgttctcgtggataatctccctggaaccaaggtgaatgccgagagcgtcgaacgcataaaacggcagcatagtagtcaggaacagacattccagctccttaaactttggaagcaccagaataaggaccaggacattgtcaagaagattatacaggatatcgatttgtgcgaaaatagcgtgcaaaggcatattggccacgccaatcttacctttgagcagctgcgcagcctgatggagagcctccctggtaagaaagtcggggctgaggatattgagaagactataaaggcctgtaagccgagcgaccagattttgaagctgctttccttgtggcggatcaagaacggagaccaggatacactgaaaggcctgatgcacgcactaaagcactcgaagacttaccacttccccaagacggtgactcaatcacttaaaaaaactatccgctttctccattcctttaccatgtataagttataccaaaagttgtttctcgaaatgatcggcaatcaggttcagtctgtaaagatctcatgtctctag

SEQ ID NO: 129641 - DNA, 2402 bp, Artificial Sequence
  derived and/or modified sequence
ggaaacctcagagccccgcggagacagcagccgccttgttcctcagcccggtggcttttttttcccctgctctcccaggggccagacaccaccgccccacccctcacgccccacctccctgggggatcctttccgccccagccctgaaagcgttaaccctggagctttctgcacaccccccgaccgctcccgcccaagcttcctaaaaaagaaaggtgcaaagtttggtccaggatagaaaaatgactgatcaaaggcaggcgatacttcctgttgccgggacgctatatataacgtgatgagcgcacgggctgcggagacgcaccggagcgctcgcccagccgccgcctccaagcccctgaggtttccggggaccacaatgaacaacttgctgtgctgcgcgctcgtgtttctggacatctccattaagtggaccacccaggaaacgtttcctccaaagtaccttcattatgacgaagaaacctctcatcagctgttgtgtgacaaatgtcctcctggtacctacctaaaacaacactgtacagcaaagtggaagaccgtgtgcgccccttgccctgaccactactacacagacagctggcacaccagtgacgagtgtctatactgcagccccgtgtgcaaggagctgcagtacgtcaagcaggagtgcaatcgcacccacaaccgcgtgtgcgaatgcaaggaagggcgctaccttgagatagagttctgcttgaaacataggagctgccctcctggatttggagtggtgcaagctggaaccccagagcgaaatacagtttgcaaaagatgtccagatgggttcttctcaaatgagacgtcatctaaagcaccctgtagaaaacacacaaattgcagtgtctttggtctcctgctaactcagaaaggaaatgcaacacacgacaacatatgttccggaaacagtgaatcaactcaaaaatgtggaatagatgttaccctgtgtgaggaggcattcttcaggtttgctgttcctacaaagtttacgcctaactggcttagtgtcttggtagacaatttgcctggcaccaaagtaaacgcagagagtgtagagaggataaaacggcaacacagctcacaagaacagactttccagctgctgaagttatggaaacatcaaaacaaagaccaagatatagtcaagaagatcatccaagatattgacctctgtgaaaacagcgtgcagcggcacattggacatgctaacctcaccttcgagcagcttcgtagcttgatggaaagcttaccgggaaagaaagtgggagcagaagacattgaaaaaacaataaaggcatgcaaacccagtgaccagatcctgaagctgctcagtttgtggcgaataaaaaatggcgaccaagacaccttgaagggcctaatgcacgcactaaagcactcaaagacgtaccactttcccaaaactgtcactcagagtctaaagaagaccatcaggttccttcacagcttcacaatgtacaaattgtatcagaagttatttttagaaatgataggtaaccaggtccaatcagtaaaaataagctgcttataactggaaatggccattgagctgtttcctcacaattggcgagatcccatggatgagtaaactgtttctcaggcacttgaggctttcagtgatatctttctcattaccagtgactaattttgccacagggtactaaaagaaactatgatgtggagaaaggactaacatctcctccaataaaccccaaatggttaatccaactgtcagatctggatcgttatctactgactatattttcccttattactgcttgcagtaattcaactggaaattaaaaaaaaaaaactagactccattgtgccttactaaatatgggaatgtctaacttaaatagctttgagatttcagctatgctagaggcttttattagaaagccatatttttttctgtaaaagttactaatatatctgtaacactattacagtattgctatttatattcattcagatataagatttgtacatattatcatcctataaagaaacggtatgacttaattttagaaagaaaattatattctgtttattatgacaaatgaaagagaaaatatatatttttaatggaaagtttgtagcatttttctaataggtactgccatatttttctgtgtggagtatttttataattttatctgtataagctgtaatatcattttatagaaaatgcattatttagtcaattgtttaatgttggaaaacatatgaaatataaattatctgaatattagatgctctgagaaattgaatgtaccttatttaaaagattttatggttttataactatataaatgacattattaaagttttcaaattatttttta

SEQ ID NO: 129642 - protein, 312 aa, Artificial Sequence
  derived and/or modified sequence
MDGGNQSEGSEFLLLGMSESPEQQRILFWMFLSMYLVTVVGNVLIILAISSDSRLHTPVYFFLANLSFTDLFFVTNTIPKMLVNLQSHNKAISYAGCLTQLYFLVSLVALDNLILAVMAYDRYVAICCPLHYTTAMSPKLCILLLSLCWVLSVLYGLIHTLLMTRVTFCGSRKIHYIFCEMYVLLRMACSNIQINHTVLIATGCFIFLIPFGFVIISYVLIIRAILRIPSVSKKYKAFSTCASHLGAVSLFYGTLCMVYLKPLHTYSVKDSVATVMYAVVTPMMNPFIYSLRNKDMHGALGRLLDKHFKRLT

SEQ ID NO: 129643 - DNA, 939 bp, Artificial Sequence
  derived and/or modified sequence
atggatggggggaatcagagcgagggcagcgagttcttgctgctcggaatgtccgagtcacctgagcagcagcggatcctattctggatgtttctgtccatgtatcttgtgaccgtcgttgggaacgttttgatcattctggccatttcatccgatagccgcctgcacacccccgtgtacttcttcctcgctaacctgtcattcaccgatctgttttttgttacaaacaccatccctaaaatgctggtgaacctgcagtcacacaataaggccattagttacgctggatgtctaacacagttgtactttttggtctcgttagtggccctagacaacctgatactggcggtcatggcgtacgatcgctatgtggccatatgctgcccattacattatactactgcaatgtcgcccaagctctgcattctgttattgtcactgtgttgggttctcagcgttctgtacggactgattcatacccttctgatgactagagtcactttctgcggttcacgaaagatacattacatcttttgtgagatgtatgtgttgctgcggatggcatgttcgaacatacagatcaatcacactgtactgattgcaaccgggtgtttcattttcctgataccttttggatttgttattatctcatacgtgctcattatacgtgcaattctccgcatcccatccgtgagtaaaaaatacaaagctttttcgacctgcgcttcacacttaggagccgttagcttattttatggaacactttgtatggtgtacctgaagcctctccacacttactctgtgaaagactctgtggccacggtcatgtacgcggttgtcaccccaatgatgaatcccttcatctattcactgcgcaataaggacatgcatggggcactcggacggctgttggataaacattttaagcggctgacctag

SEQ ID NO: 129644 - DNA, 939 bp, Artificial Sequence
  derived and/or modified sequence
atggatggcggcaaccagagcgagggcagcgagttcctgctgctgggcatgtctgagagccctgagcagcagaggatcctcttctggatgttcctgtccatgtacctggtgacagtggtgggcaatgtgctgatcatcctggccatcagcagtgacagccggctgcacacccctgtgtacttcttcctggccaacctgtccttcacagacctcttctttgtgaccaacaccatccccaagatgctggtgaacctgcagagccacaacaaggccatctcctatgccggctgcctgacccagctgtacttcctggtgtccctggtggccctggacaacctgatcctggccgtgatggcctatgacagatatgtggccatctgctgccccctgcactacaccacagccatgagccccaagctgtgcatcctgctgctgagcctgtgctgggtgctgtctgtgctgtatggcctcatccacaccctgctgatgaccagggtgaccttctgtggcagcaggaagatccactacatcttctgtgagatgtatgtgctgctgaggatggcctgcagcaacatccagatcaaccacacagtgctgattgccaccggctgcttcatcttcctgatcccctttggatttgtgatcatctcctatgtgctgatcatccgggccatcctgcgcatccccagcgtgtccaagaagtacaaggccttcagcacctgtgccagccacctgggcgctgtgtccctcttctacggcaccctgtgcatggtgtacctgaagcccctgcacacctacagcgtgaaggacagcgtggccaccgtgatgtatgctgtggtgacccccatgatgaaccccttcatctacagcctgaggaacaaggacatgcatggagccctgggccgcctgctggacaagcacttcaagaggctgacctag

SEQ ID NO: 129645 - DNA, 939 bp, Artificial Sequence
  derived and/or modified sequence
atggacggcggcaaccagagcgagggcagcgagttcctgctgctgggaatgtctgaaagtccagaacagcagcggattctgttctggatgttcctgtccatgtatctggtcaccgttgtcggtaacgtgttgatcattttagccatcagctcggactcccgcctgcatactcctgtctacttcttcctggctaatttatcctttacagaccttttttttgtgaccaacactatacccaagatgctggtaaatctacagtcccataataaagccatcagttatgcgggttgcctcacccaactgtacttccttgtcagcttagtggcactggataatcttatcctggcggttatggcctatgatcggtacgtggccatctgttgcccgttacactacaccacagctatgagtccgaaactctgtatcctgttgctgtctctgtgttgggtcctgtcagtgctttatggtctgatacacacgctgctcatgacaagggttacattctgcgggtcgcggaaaattcactacattttttgtgagatgtatgttttgttgcgaatggcttgctccaatatccagattaatcacactgtcctcattgctaccggttgtttcatttttctgatcccctttggtttcgtaataattagctatgtccttatcatccgcgccatacttcgcatccctagcgtttctaaaaaatataaggcattcagcacctgcgccagccacttaggggcagtgtctctgttttatggtaccctctgcatggtgtatctgaaaccactccatacttatagcgtgaaggacagcgtcgccaccgtgatgtatgcagtcgtgacccccatgatgaacccatttatctactcactacggaataaagatatgcacggcgcactagggcgtttactggataaacattttaagcgactcacatag

SEQ ID NO: 129646 - DNA, 939 bp, Artificial Sequence
  derived and/or modified sequence
atggatggaggcaaccagagtgaaggttcagagttccttctcctggggatgtcagagagtcctgagcagcagcggatcctgttttggatgttcctgtccatgtacctggtcacggtggtgggaaatgtgctcatcatcctggccatcagctctgattcccgcctgcacacccccgtgtacttcttcctggccaacctctccttcactgacctcttctttgtcaccaacacaatccccaagatgctggtgaacctccagtcccataacaaagccatctcctatgcagggtgtctgacacagctctacttcctggtctccttggtggccctggacaacctcatcctggctgtgatggcatatgaccgctatgtggccatctgctgccccctccactacaccacagccatgagccctaagctctgtatcttactcctttccttgtgttgggtcctatccgtcctctatggcctcatacacaccctcctcatgaccagagtgaccttctgtgggtcacgaaaaatccactacatcttctgtgagatgtatgtattgctgaggatggcatgttccaacattcagattaatcacacagtgctgattgccacaggctgcttcatcttcctcattccctttggattcgtgatcatttcctatgtgctgattatcagagccatcctcagaataccctcagtctctaagaaatacaaagccttctccacctgtgcctcccatttgggtgcagtctccctcttctatgggacactttgtatggtatacctaaagcccctccatacctactctgtgaaggactcagtagccacagtgatgtatgctgtggtgacacccatgatgaatcccttcatctacagcctgaggaacaaggacatgcatggggctctgggaagactcctagataaacactttaagaggctgacatga

SEQ ID NO: 129647 - DNA, 939 bp, Artificial Sequence
  derived and/or modified sequence
atggacggagggaaccagagtgaggggtcggagttcctcctactgggaatgagtgaaagccccgaacagcagagaatcctgttctggatgttcctctctatgtacttggtaaccgtagtgggaaatgtcctcattattcttgccataagctctgattctaggttacatactcctgtatatttttttctagcaaatctctccttcaccgacctcttcttcgtgacaaatactatcccaaagatgctggtgaatttacaatctcacaacaaagctatttcctacgctgggtgtttaacacaactctatttcctcgtcagcctggtagcccttgacaatctgatactcgccgtaatggcctatgacaggtatgtcgccatttgctgcccactacactatactactgcgatgtcaccaaagctttgtatcttgctattgagtctgtgctgggtcctatcagtactctatggtcttatccacaccctgctgatgactcgcgttaccttctgtggatcaaggaagattcattacatcttctgtgagatgtacgtgctgctcaggatggcatgctccaacatacagattaatcacacagtgctgatcgccactggctgctttatatttcttatcccttttggcttcgtgattattagttatgtactaataattcgggctattctacggatccccagcgtttcaaaaaaatataaagcattttctacatgtgcctcccacctgggggcagtgtccctcttttacggcacgttgtgcatggtctacctgaaacccctccatacctactccgtcaaagacagcgtcgccaccgttatgtatgcagtggtgacaccaatgatgaatccttttatttattcacttcgtaacaaggatatgcatggtgctctggggcgtctgctggacaagcatttcaaacggcttacttag

SEQ ID NO: 129648 - DNA, 939 bp, Artificial Sequence
  derived and/or modified sequence
atggacggcggcaaccagagcgagggcagcgagttcctgctgctgggcatgagcgagagccccgagcagcagagaatcctgttctggatgttcctgagcatgtacctggtgaccgtggtgggcaacgtgctgatcatcctggccatcagcagcgacagcagactgcacacccccgtgtacttcttcctggccaacctgagcttcaccgacctgttcttcgtgaccaacaccatccccaagatgctggtgaacctgcagagccacaacaaggccatcagctacgccggctgcctgacccagctgtacttcctggtgagcctggtggccctggacaacctgatcctggccgtgatggcctacgacagatacgtggccatctgctgccccctgcactacaccaccgccatgagccccaagctgtgcatcctgctgctgagcctgtgctgggtgctgagcgtgctgtacggcctgatccacaccctgctgatgaccagagtgaccttctgcggcagcagaaagatccactacatcttctgcgagatgtacgtgctgctgagaatggcctgcagcaacatccagatcaaccacaccgtgctgatcgccaccggctgcttcatcttcctgatccccttcggcttcgtgatcatcagctacgtgctgatcatcagagccatcctgagaatccccagcgtgagcaagaagtacaaggccttcagcacctgcgccagccacctgggcgccgtgagcctgttctacggcaccctgtgcatggtgtacctgaagcccctgcacacctacagcgtgaaggacagcgtggccaccgtgatgtacgccgtggtgacccccatgatgaaccccttcatctacagcctgagaaacaaggacatgcacggcgccctgggcagactgctggacaagcacttcaagagactgacctag

SEQ ID NO: 129649 - DNA, 948 bp, Artificial Sequence
  derived and/or modified sequence
atgcagcccgagagcggcgccaacggcaccgtgatcgccgagttcatcctgctgggcctgctggaggcccccggcctgcagcccgtggtgttcgtgctgttcctgttcgcctacctggtgaccgtgagaggcaacctgagcatcctggccgccgtgctggtggagcccaagctgcacacccccatgtacttcttcctgggcaacctgagcgtgctggacgtgggctgcatcagcgtgaccgtgcccagcatgctgagcagactgctgagcagaaagagagccgtgccctgcggcgcctgcctgacccagctgttcttcttccacctgttcgtgggcgtggactgcttcctgctgaccgccatggcctacgacagattcctggccatctgcagacccctgacctacagcaccagaatgagccagaccgtgcagagaatgctggtggccgccagctgggcctgcgccttcaccaacgccctgacccacaccgtggccatgagcaccctgaacttctgcggccccaacgtgatcaaccacttctactgcgacctgccccagctgttccagctgagctgcagcagcacccagctgaacgagctgctgctgttcgccgtgggcttcatcatggccggcacccccatggccctgatcgtgatcagctacatccacgtggccgccgccgtgctgagaatcagaagcgtggagggcagaaagaaggccttcagcacctgcggcagccacctgaccgtggtggccatcttctacggcagcggcatcttcaactacatgagactgggcagcaccaagctgagcgacaaggacaaggccgtgggcatcttcaacaccgtgatcaaccccatgctgaaccccatcatctacagcttcagaaaccccgacgtgcagagcgccatctggagaatgctgaccggcagaagaagcctggcctag

SEQ ID NO: 129650 - DNA, 948 bp, Artificial Sequence
  derived and/or modified sequence
atgcagcccgagtccggcgctaacggcacagtgattgcggaatttattttgctgggcttgctggaagccccaggactccagcccgtggtctttgtgctgttcttgtttgcatacttggtaaccgtgagggggaatttgtccatccttgccgccgtgctagttgaaccaaagttgcataccccaatgtacttttttcttggcaacctgtccgttctcgatgtcgggtgcatcagtgtaaccgtcccatctatgctgtctcgtctcctgtctcggaaacgggctgtgccttgtggtgcctgcctgacccagctcttctttttccacttgtttgtgggcgtggactgtttccttctcactgccatggcttacgacagattcctggcaatctgtcggcctttgacgtacagtaccagaatgtcccaaacagtgcagaggatgctagtcgctgcaagttgggcatgtgccttcacaaacgcgctgacccacaccgtggccatgtctactctgaacttctgtggacctaatgtcatcaaccatttctactgtgatctgcctcagctgttccaattgtcgtgttcctccacccaactgaacgagctgttactgttcgccgttggctttataatggcagggactcccatggctctcattgtcatctcatacattcatgtcgctgccgccgtgttaagaatcagatcagtggagggccgtaaaaaggcattctccacgtgcgggtctcacctaaccgtcgtggccatcttttatggatctggcatttttaattacatgcggctcggcagcactaagctatctgataaagataaggccgtgggcatctttaatacagtgatcaaccctatgctaaatccaatcatttattcctttcgcaatccagatgtccaatccgcgatctggcggatgttgaccggccgcaggtccttagcctag

SEQ ID NO: 129651 - DNA, 948 bp, Artificial Sequence
  derived and/or modified sequence
atgcagcctgagagcggggccaacggcaccgtgattgctgagttcatcctgctgggcctgctggaggcccctggcctgcagcctgtggtgtttgtgctcttcctgtttgcctacctggtgacagtgcggggcaacctgagcatcctggccgctgtgctggtggagcccaagctgcacacccccatgtacttcttcctgggcaacctgtctgtgctggatgtgggctgcatctctgtgacagtgcccagcatgctgagccggctgctgagcaggaagagagctgtgccctgtggggcctgcctgacccagctgttcttcttccacctgtttgtgggcgtggactgcttcctgctgacagccatggcctatgaccgcttcctggccatctgccggcccctgacctacagcaccaggatgagccagacagtgcagaggatgctggtggccgcctcctgggcctgtgccttcaccaatgccctgacccacacagtggccatgagcaccctgaacttctgtggccccaacgtcatcaaccacttctactgtgacctgccccagctgttccagctgagctgcagcagcacccagctgaatgagctgctgctgtttgctgtgggcttcatcatggccggcacccccatggccctgattgtcatctcctacatccacgtggccgctgctgtgctgcgcatccgctctgtggagggcaggaagaaggccttcagcacctgtggcagccacctgactgtggtggccatcttctacggcagcggcatcttcaactacatgaggctgggcagcaccaagctgagtgacaaggacaaggctgtgggcatcttcaacacagtcatcaaccccatgctgaaccccatcatctacagcttcaggaacccagatgtgcagagcgccatctggaggatgctgactggaagaagaagcctggcctag

SEQ ID NO: 129652 - DNA, 948 bp, Artificial Sequence
  derived and/or modified sequence
atgcagcccgagagcggcgccaacggcaccgtgatcgccgagttcatcctcctgggattgttggaagccccaggcctccagccggtggtgtttgtgttatttctgttcgcatatctcgtgacagtgcgaggtaacctgtcaatcttggcagctgtgctcgtggagcctaaactgcacactcccatgtacttttttctgggcaatctttcagtccttgacgtgggctgcatatcggttaccgtcccctcaatgttatcgcggctgctgtcccgcaagagggcagttccctgtggcgcatgcctgacacagctattcttttttcatctgtttgtgggagtagactgctttctgttgaccgccatggcttacgataggtttctcgccatttgtcgacctcttacgtactcaactagaatgagccagaccgttcagcggatgttagtggctgcttcctgggcatgtgcctttaccaacgcattgacacatactgtggccatgagcacactgaatttttgcggaccaaatgttataaatcacttctactgtgaccttccgcagctgtttcagctctcatgctcctccactcagttgaatgagttgctgctctttgctgtgggctttatcatggcagggacaccaatggccttaatagtcatctcttacattcacgtggccgcagctgtcctgcgtatccgcagcgtcgaggggcgtaaaaaggccttctccacttgcggatctcaccttacagtcgtggccatcttttacggttccggaatctttaattacatgcgattgggatcgaccaaactgtctgataaggacaaagcagttggtattttcaataccgtgattaatcccatgctcaacccaattatttactctttcagaaatccagacgtgcagtcagcaatctggaggatgctgacaggtagacgctcactggcctag

SEQ ID NO: 129653 - DNA, 948 bp, Artificial Sequence
  derived and/or modified sequence
atgcagccagaatctggggccaatggaacagtcattgctgagttcatcctgctgggcttgctggaggcgccagggctgcagccagttgtctttgtgctcttcctctttgcctacctggtcacggtcaggggcaacctcagcatcctggcagctgtcttggtggagcccaaactccacacccccatgtacttcttcctggggaacctatcagtgctggatgttgggtgcatcagcgtcactgttccatcaatgttgagtcgtctcctgtcccgcaagcgtgcagttccctgtggggcctgccttacccagctcttcttcttccatctgttcgttggagtggactgcttcctgctgaccgccatggcctatgaccgattcctggccatctgccggcccctcacctacagcacccgcatgagtcagacagtccagaggatgttggtggctgcgtcctgggcttgtgctttcaccaacgcactgacccacactgtggccatgtccacgctcaacttctgtggccccaatgtgatcaatcacttctactgtgacctcccacagctcttccagctctcctgctccagcacccaactcaatgagctgctgctttttgctgtgggttttataatggcaggtacccccatggctctcattgtcatctcctatatccacgtggcagctgcagtcctgcgaattcgctctgtagagggcaggaagaaagccttctccacatgtggctcccacctcactgtggttgccatattctatggttcaggtatctttaactatatgcgactgggttcaaccaagctttcagacaaggataaagctgttggaattttcaacactgtcatcaatcccatgctgaacccaatcatctacagcttcagaaaccctgatgtgcagagtgccatctggaggatgctcacagggaggcggtcactggcttga

SEQ ID NO: 129654 - DNA, 948 bp, Artificial Sequence
  derived and/or modified sequence
atgcagcctgaatctggggctaacggcactgttatcgcggaattcatcctactgggcctcctggaagcacccggtctccaaccagtcgtattcgttttgtttctgttcgcgtatctggttacggtccggggtaatctctccatcctggctgctgtgcttgtggaaccaaagctgcatacgcctatgtacttcttcctgggaaatctgagcgtgctggacgtgggttgcatttcagtgactgtaccctcaatgcttagccgcctgttgtccagaaagagagccgttccatgtggggcttgtctgactcagctcttttttttccacctgtttgtgggggtggattgctttctactgacagcgatggcctacgataggtttcttgccatctgcagacctctgacttattctacaaggatgtcacagacagtccagaggatgcttgtggccgcaagctgggcctgtgcatttaccaacgcactgacccacacagttgccatgtcgaccctaaacttttgcggccctaatgtgatcaaccatttttattgcgacctgcctcagttgtttcaactcagctgctcctctactcagctgaacgagctgttgcttttcgccgtagggttcattatggctggtactccaatggcccttatagttataagctacatccacgtcgccgctgcagtgcttaggataagaagcgttgagggcaggaagaaagctttcagcacttgtggaagccatctcaccgtggtcgctattttctacggatcaggtatcttcaattacatgagactcggtagcaccaagctgagtgataaagataaagcggtgggtattttcaacactgtaatcaatccgatgttgaatccaattatctattccttcagaaatcctgatgttcagagcgccatctggaggatgctgacaggccgacgatccctggcttag

SEQ ID NO: 129655 - protein, 436 aa, Artificial Sequence
  derived and/or modified sequence
MSSRKSKSNSLIHTECLSQVQRILRERFCRQSPHSNLFGVQVQYKHLSELLKRTALHGESNSVLIIGPRGSGKTMLINHALKELMEIEEVSENVLQVHLNGLLQINDKIALKEITRQLNLENVVGDKVFGSFAENLSFLLEALKKGDRTSSCPVIFILDEFDLFAHHKNQTLLYNLFDISQSAQTPIAVIGLTCRLDILELLEKRVKSRFSHRQIHLMNSFGFPQYVKIFKEQLSLPAEFPDKVFAEKWNENVQYLSEDRSVQEVLQKHFNISKNLRSLHMLLMLALNRVTASHPFMTAVDLMEASQLCSMDSKANIVHGLSVLEICLIIAMKHLNDIYEEEPFNFQMVYNEFQKFVQRKAHSVYNFEKPVVMKAFEHLQQLELIKPMERTSGNSQREYQLMKLLLDNTQIMNALQKYPNCPTDVRQWATSSLSWL

SEQ ID NO: 129656 - protein, 145 aa, Artificial Sequence
  derived and/or modified sequence
MSSRKSKSNSLIHTECLSQVQRILRERFCRQSPHSNLFGVQVQYKHLSELLKRTALHGESNSVLIIGPRGSGKTMLINHALKELMEIEEVSENVLQVHLNGLLQINDKIALKEITRQLNLENVVGDKVFGSFAENLSFLLEALKK

SEQ ID NO: 129657 - protein, 127 aa, Artificial Sequence
  derived and/or modified sequence
MSSRKSKSNSLIHTECLSQVQRILRERFCRQSPHSNLFGVQVQYKHLSELLKRTALHGESNSVLIIGPRGSGKTMLINHALKELMEIEEVSENVLQVHLNGLLQINDKIALKEITRQLNLENVVGDK

SEQ ID NO: 129658 - protein, 128 aa, Artificial Sequence
  derived and/or modified sequence
MSSRKSKSNSLIHTECLSQVQRILRERFCRQSPHSNLFGVQVQYKHLSELLKRTALHGESNSVLIIGPRGSGKTMLINHALKELMEIEEVSENVLQVHLNGLLQINDKIALKEITRQLNLENVVGDKV

SEQ ID NO: 129659 - protein, 352 aa, Artificial Sequence
  derived and/or modified sequence
MEIEEVSENVLQVHLNGLLQINDKIALKEITRQLNLENVVGDKVFGSFAENLSFLLEALKKGDRTSSCPVIFILDEFDLFAHHKNQTLLYNLFDISQSAQTPIAVIGLTCRLDILELLEKRVKSRFSHRQIHLMNSFGFPQYVKIFKEQLSLPAEFPDKVFAEKWNENVQYLSEDRSVQEVLQKHFNISKNLRSLHMLLMLALNRVTASHPFMTAVDLMEASQLCSMDSKANIVHGLSVLEICLIIAMKHLNDIYEEEPFNFQMVYNEFQKFVQRKAHSVYNFEKPVVMKAFEHLQQLELIKPMERTSGNSQREYQLMKLLLDNTQIMNALQKYPNCPTDVRQWATSSLSWL

SEQ ID NO: 129660 - protein, 362 aa, Artificial Sequence
  derived and/or modified sequence
MLINHALKELMEIEEVSENVLQVHLNGLLQINDKIALKEITRQLNLENVVGDKVFGSFAENLSFLLEALKKGDRTSSCPVIFILDEFDLFAHHKNQTLLYNLFDISQSAQTPIAVIGLTCRLDILELLEKRVKSRFSHRQIHLMNSFGFPQYVKIFKEQLSLPAEFPDKVFAEKWNENVQYLSEDRSVQEVLQKHFNISKNLRSLHMLLMLALNRVTASHPFMTAVDLMEASQLCSMDSKANIVHGLSVLEICLIIAMKHLNDIYEEEPFNFQMVYNEFQKFVQRKAHSVYNFEKPVVMKAFEHLQQLELIKPMERTSGNSQREYQLMKLLLDNTQIMNALQKYPNCPTDVRQWATSSLSWL

SEQ ID NO: 129661 - protein, 219 aa, Artificial Sequence
  derived and/or modified sequence
MNSFGFPQYVKIFKEQLSLPAEFPDKVFAEKWNENVQYLSEDRSVQEVLQKHFNISKNLRSLHMLLMLALNRVTASHPFMTAVDLMEASQLCSMDSKANIVHGLSVLEICLIIAMKHLNDIYEEEPFNFQMVYNEFQKFVQRKAHSVYNFEKPVVMKAFEHLQQLELIKPMERTSGNSQREYQLMKLLLDNTQIMNALQKYPNCPTDVRQWATSSLSWL

SEQ ID NO: 129662 - DNA, 1311 bp, Artificial Sequence
  derived and/or modified sequence
atgtcctccagaaagagcaagtccaatagcctaattcacactgagtgtttatcacaggtccaacggatcctgagggaaaggttctgcagacagtctcctcattcaaacctttttggcgttcaggtccagtataaacatttgtccgagctgttgaaacgtaccgcactacatggagaaagcaacagcgtgttgatcatcggaccccggggaagcggcaagaccatgctgatcaaccatgccctgaaggaattgatggaaatagaggaggtttctgaaaatgtgctgcaagtgcatcttaacggcctcttacaaatcaatgacaaaattgctctgaaagaaataacccggcagttgaatctggagaacgtcgtgggtgacaaagttttcgggtcgttcgccgagaatctgtccttcctcctagaggccttaaagaagggagatcgcacgtctagctgccccgtgatctttattctggacgagtttgacttgtttgcccaccacaagaatcagacactcctgtacaacctatttgatatttcccagagtgcccagacaccaatcgcagtcatcggcttgacttgccgactggatatcttggagctcctggagaaaagagtgaaatcaaggttctcccaccgccagatacatcttatgaactcctttgggtttccacagtatgtgaaaattttcaaagaacaactgagtctccctgcagagttccctgataaagtgttcgccgaaaagtggaatgaaaatgtccaatatctttctgaggaccggagtgtgcaagaagtgcttcaaaagcacttcaacatttccaagaatctgcggagtctgcacatgctcctcatgctcgcattaaacagggtgaccgccagtcacccattcatgacagcagtggaccttatggaggccagccagctctgctctatggacagtaaggccaacattgtgcacggactgtcggtactggagatctgtttgataattgccatgaaacatttaaacgatatatacgaggaggagcctttcaattttcagatggtttacaacgagttccaaaaatttgtgcagagaaaagcacattccgtctacaattttgagaaacccgtggttatgaaggccttcgagcacctgcagcagctggaactcattaagcccatggagcgtacatcgggcaatagccagagagaatatcaactgatgaagcttttgctcgacaatacccagattatgaacgccctgcaaaaataccctaattgtcctacggatgtccgccagtgggctacatcttccttatcttggttgtag

SEQ ID NO: 129663 - DNA, 1311 bp, Artificial Sequence
  derived and/or modified sequence
atgtcatctaggaaatctaaatctaattccctgattcacacagagtgtctctcgcaggtgcaacggattctccgtgaaagattttgtagacaatctcctcatagcaacctgtttggagtccaagttcagtacaaacatctgtctgagctgttgaaacggaccgctctgcatggagagtcaaactccgttctcattattgggccccgcggttctggcaaaaccatgctgattaaccatgctctcaaggaactcatggagatcgaggaggtctctgagaacgtgctgcaggtgcacctgaatggcctcctgcagattaatgataagatcgccctgaaggagatcacccgtcaactcaacctggagaacgttgtaggagacaaggttttcggctcctttgctgaaaacctaagctttctcctggaggcactgaagaagggcgatcgcactagctcatgcccagtcatctttattctagacgagtttgaccttttcgcccatcataaaaatcagactctactgtacaatttatttgatatcagccagtccgcccagacacctatcgccgtcattgggctgacctgtaggctcgacattcttgagctgctcgaaaagagggtgaagtcccggtttagccaccggcagatccatttgatgaactctttcgggtttccgcagtatgtgaagatattcaaagaacaactttctcttccagcagagttccccgacaaggtctttgcggagaaatggaatgaaaacgtacagtacttgtcagaggacaggagtgtccaagaagtactgcagaagcatttcaacatatccaagaacctgcgctccctccacatgctgctgatgctagcactgaacagggtaaccgcatcccatcctttcatgacggcagtggaccttatggaagcaagccagctctgctctatggatagtaaggctaatatcgtgcacggcctgtcggtgttggaaatctgcctgatcattgccatgaagcatctcaatgatatatacgaggaggaacccttcaactttcagatggtctataatgaattccaaaaattcgtccagagaaaggctcactcagtttacaactttgagaagcctgtggtgatgaaggccttcgagcatcttcagcaactagaattaataaagcctatggagaggacctctggtaattctcaacgggaatatcagcttatgaagctgttattggataacacacaaattatgaatgccttgcagaagtacccgaattgccccactgacgtgcggcaatgggctacctcatccctgtcttggctttag

SEQ ID NO: 129664 - DNA, 1311 bp, Artificial Sequence
  derived and/or modified sequence
atgagttctagaaagtccaaaagcaactcactcatccacaccgagtgtctttctcaggtgcaaaggatcctccgcgaacgcttctgcaggcagtcccctcactccaatttgttcggcgtccaggtccagtataaacacctatccgagcttctgaaacgtacggctcttcatggcgagtccaattcggtcctcatcatcgggcctaggggttcaggaaagactatgttaatcaaccacgccttgaaagaactgatggaaatcgaagaggttagcgagaatgtgctgcaggtgcatctgaatggactgcttcagattaatgacaagatcgcccttaaggaaataacgagacagttgaacctggaaaacgtcgtgggagacaaagtcttcggatcttttgctgaaaacctctcattccttctcgaggctctgaagaagggcgacaggacctcatcctgtccagtcatctttatcttagatgaatttgaccttttcgcccaccataaaaaccagaccctgctgtacaacctttttgacatttctcagtccgcacagactcccatcgcggtaatcgggctgacttgccgactcgatatcctggaacttctggagaagcgcgtcaaatcaaggttctcccacaggcagatccatctgatgaactcattcggttttccccagtacgtgaagatctttaaggaacagctgtctctgcctgctgaatttcctgacaaggtattcgctgagaaatggaatgagaatgtgcaatacctgtcagaggaccgctcagtccaggaggtgctccaaaaacattttaatataagtaaaaaccttcggtccctccatatgctgcttatgctggccttgaacagggttactgcttcacaccccttcatgacagccgtggacctcatggaggcaagccagctttgttctatggatagtaaagccaatattgttcatggtttaagcgtgctagagatctgcctcatcattgccatgaaacatctgaacgatatctacgaggaagaaccatttaactttcaaatggtctacaatgaattccagaagtttgttcagcgcaaggcacactctgtatataatttcgaaaaaccagtggtaatgaaggcctttgaacacctacaacagctggaactaataaagcccatggaaaggacttcgggtaactcacagagagaatatcagctcatgaaactgctgttggataatacacaaattatgaacgctctccagaaatacccaaattgtcccaccgacgtcagacaatgggcaacaagcagcctgtcgtggctctag

SEQ ID NO: 129665 - DNA, 438 bp, Artificial Sequence
  derived and/or modified sequence
atgagttcacgcaaatcaaaatctaactcacttattcacacggaatgtctctcccaggtgcaacggatcctccgggagagattctgtcggcagagccctcactccaatctgtttggggtgcaagttcaatacaagcatctgagtgagttgcttaaacggacggccctccacggggagtcgaactctgtgttgatcatcggcccacggggttctggaaaaacaatgttgatcaatcacgccctgaaagagctgatggaaattgaagaggtctcagaaaacgtccttcaggtgcatctaaatgggctcctccagatcaacgacaaaattgcactcaaggagatcactcggcagctcaatttggaaaatgtcgtgggtgacaaagttttcggctcttttgccgaaaacctgagctttttactagaggccttgaagaagtag

SEQ ID NO: 129666 - DNA, 384 bp, Artificial Sequence
  derived and/or modified sequence
atgtcttcccggaagtcaaagtccaattccctgatacatacggagtgcctgtcacaggtgcagcggatcctacgagagagattttgtcgtcagtctccacacagcaacctgttcggcgtgcaagtacagtataaacacctcagcgaacttctgaaacggactgcactgcacggcgaatccaattcggtgttaatcataggacctaggggatctgggaaaaccatgcttatcaatcacgctctgaaagaactgatggagatagaggaggtcagtgagaatgttctccaggtgcatctaaacggcctgttgcagataaacgataaaatagcactcaaggaaatcaccagacaactcaaccttgaaaacgtcgtcggggacaaatag

SEQ ID NO: 129667 - DNA, 387 bp, Artificial Sequence
  derived and/or modified sequence
atgagttcccgcaagtctaagtctaatagcctgatacacacggaatgcctgtcccaggtgcagaggattctgcgagaacgattctgcagacaatccccacattctaacctcttcggtgtccaagtccagtataaacacttgtcagaacttctcaagagaaccgccttgcatggtgagtccaactccgtgcttatcatcggcccaagggggtcagggaagacaatgctcattaaccacgccctgaaggagctgatggagatagaggaggtgtcagagaacgtgcttcaagtgcatcttaacggcttgctacaaatcaacgacaagattgcattgaaagagatcacccggcagctgaatctggagaatgtggtaggcgataaagtgtag

SEQ ID NO: 129668 - DNA, 1311 bp, Artificial Sequence
  derived and/or modified sequence
atgtcatcccgaaagagtaagagcaatagtcttatccataccgagtgtttgagtcaggtccaaagaatccttcgagagagattttgtcgacagagcccacatagcaatctgttcggagtgcaagtgcagtacaaacatctgagtgagttactcaaacgtacagccctccacggcgaatcaaattccgtcctgattataggtcctagaggcagcggtaagaccatgctcataaatcatgccctgaaagagctcatggaaattgaggaagtgtcagagaacgtgctgcaagttcacctgaacggtctgctgcagattaacgacaagatcgctctcaaggagattactagacagctcaacctcgagaacgtcgttggcgataaagttttcggatcctttgccgagaatctgtcgttcctgcttgaagcactgaagaaaggggatcggacctcctcgtgcccagtgatctttatcttagatgagttcgacctctttgcccaccacaaaaaccagacgctcctgtacaacctgttcgacattagccagtccgcacagacacccatcgctgtgatcgggctcacttgccgcttggacattctggagctgttagaaaaaagagtgaagtcacgcttttcgcaccgccagatccacctcatgaacagcttcgggttcccacagtacgtgaagatttttaaggagcaactgtcgcttcccgctgagttccctgacaaggtattcgccgagaaatggaacgaaaacgtccagtatttgtcggaggacaggtcagttcaggaagtgctccaaaaacattttaatatctcaaaaaacttacgctctttgcatatgttgctaatgctcgccctgaaccgtgttaccgcctcacacccatttatgacggctgtcgatctgatggaggctagtcagctgtgtagcatggacagtaaggcgaacatcgtacacgggctgtccgttttggagatttgtcttatcatcgccatgaaacacctgaatgacatctatgaggaggagcctttcaacttccagatggtttacaacgaatttcaaaaatttgtccagcgcaaagcccattctgtatacaattttgaaaaacccgtagtgatgaaagccttcgagcacctgcaacagttagaattgatcaaacccatggagcgtacttccggtaactcacagagggaataccagttaatgaaactgttattggataacacgcaaattatgaacgcgcttcagaagtacccaaactgtcccactgacgtccgtcagtgggctacttccagcctgagctggttatag

SEQ ID NO: 129669 - DNA, 1311 bp, Artificial Sequence
  derived and/or modified sequence
atgagcagcaggaagagcaagagcaacagcctcatccacacagaatgtctgagccaggtgcagaggatcctgcgggagcgcttctgccggcagagcccccacagcaacctgtttggagtgcaggtgcagtacaagcacctgtctgagctgctgaagaggacagccctgcatggagagagcaacagcgtgctgatcatcggcccccggggcagcggcaagaccatgctgatcaaccacgccctgaaggagctgatggagattgaggaggtgtctgaaaatgtgctgcaggtgcacctgaatggcctgctgcagatcaatgacaagatcgccctgaaggagatcacccggcagctgaacctggagaatgtggtgggggacaaggtgtttggcagctttgctgagaacctgtccttcctgctggaggccctgaagaagggggacaggaccagcagctgccctgtgatcttcatcctggatgaatttgacctgtttgcccaccacaagaaccagaccctgctgtacaacctgtttgacatcagccagagcgcccagacccccatcgccgtcatcggcctgacctgccgcctggacatcctggagctgctggagaagagggtgaagagccgcttcagccaccggcagatccacctgatgaacagctttggcttcccccagtatgtgaagatcttcaaggagcagctgagcctgcctgctgagttcccagacaaggtgtttgctgagaagtggaatgaaaatgtgcagtacctgtctgaggacagatctgtgcaggaggtgctgcagaagcacttcaacatcagcaagaacctgcggagcctgcacatgctgctgatgctggccctgaacagagtgacagccagccaccccttcatgacagctgtggacctgatggaggccagccagctgtgcagcatggacagcaaggccaacatcgtgcacggcctgtctgtgctggagatctgcctgatcatcgccatgaagcacctgaatgacatctatgaggaggagcccttcaacttccagatggtgtacaatgagttccagaagtttgtgcagaggaaggcccacagcgtgtacaactttgagaagcctgtggtgatgaaggcctttgagcacctgcagcagctggagctgatcaagcccatggagaggaccagcggcaacagccagcgggagtaccagctgatgaagctgctgctggacaacacccagatcatgaatgccctgcagaagtaccccaactgccccacagatgtgcggcagtgggccaccagcagcctgtcctggctgtag

SEQ ID NO: 129670 - DNA, 438 bp, Artificial Sequence
  derived and/or modified sequence
atgagcagcaggaagagcaagagcaacagcctcatccacacagaatgtctgagccaggtgcagaggatcctgcgggagcgcttctgccggcagagcccccacagcaacctgtttggagtgcaggtgcagtacaagcacctgtctgagctgctgaagaggacagccctgcatggagagagcaacagcgtgctgatcatcggcccccggggcagcggcaagaccatgctgatcaaccacgccctgaaggagctgatggagattgaggaggtgtctgaaaatgtgctgcaggtgcacctgaatggcctgctgcagatcaatgacaagatcgccctgaaggagatcacccggcagctgaacctggagaatgtggtgggggacaaggtgtttggcagctttgctgagaacctgtccttcctgctggaggccctgaagaagtag

SEQ ID NO: 129671 - DNA, 384 bp, Artificial Sequence
  derived and/or modified sequence
atgagcagcaggaagagcaagagcaacagcctcatccacacagaatgtctgagccaggtgcagaggatcctgcgggagcgcttctgccggcagagcccccacagcaacctgtttggagtgcaggtgcagtacaagcacctgtctgagctgctgaagaggacagccctgcatggagagagcaacagcgtgctgatcatcggcccccggggcagcggcaagaccatgctgatcaaccacgccctgaaggagctgatggagattgaggaggtgtctgaaaatgtgctgcaggtgcacctgaatggcctgctgcagatcaatgacaagatcgccctgaaggagatcacccggcagctgaacctggagaatgtggtgggggacaagtag

SEQ ID NO: 129672 - DNA, 387 bp, Artificial Sequence
  derived and/or modified sequence
atgagcagcaggaagagcaagagcaacagcctcatccacacagaatgtctgagccaggtgcagaggatcctgcgggagcgcttctgccggcagagcccccacagcaacctgtttggagtgcaggtgcagtacaagcacctgtctgagctgctgaagaggacagccctgcatggagagagcaacagcgtgctgatcatcggcccccggggcagcggcaagaccatgctgatcaaccacgccctgaaggagctgatggagattgaggaggtgtctgaaaatgtgctgcaggtgcacctgaatggcctgctgcagatcaatgacaagatcgccctgaaggagatcacccggcagctgaacctggagaatgtggtgggggacaaggtgtag

SEQ ID NO: 129673 - DNA, 1311 bp, Artificial Sequence
  derived and/or modified sequence
atgagcagccggaagagcaagagcaacagcctgatccacaccgagtgtctttctcaggtgcagagaatcctcagagagcgtttctgccggcagtctccacattccaatctgtttggagtacaagtccaatataagcacctatccgagcttctgaaaaggaccgcgctgcatggagaatccaattctgtgctgatcatcggacccaggggctccggcaagaccatgttaatcaaccacgcgttgaaagaactcatggaaatcgaagaagtttccgaaaatgttctgcaagttcaccttaacggcttgctgcagattaatgataagattgcgcttaaggagatcactaggcagctgaacttagaaaacgtggtgggcgacaaagtgttcgggtcgtttgccgaaaacctgagctttctgctggaggctctgaaaaaaggcgaccggacatcttcctgtccggtgatctttatactggacgagtttgacctctttgcacatcacaaaaaccaaacactcctgtacaatttgtttgatatctcccaatcagcccaaactcccatagcggtaatcggacttacctgtcggttagatatccttgagttactcgagaagagagtcaagtccagattctcacatcggcagatacaccttatgaactctttcggcttccctcaatatgtcaagatcttcaaagagcagttatctctgccagcagaatttcccgataaagtgtttgccgagaagtggaatgaaaatgtgcaatatctgtcagaggaccgttccgttcaggaagtcttgcagaaacacttcaacatttctaagaaccttaggagtcttcatatgctgttaatgctggctttaaatagagtcaccgcctcccaccccttcatgacagcggtggatctgatggaagcatcacagctctgcagcatggactccaaagcaaacatcgtccatggcctaagcgtgttggaaatttgcctgataatcgcaatgaagcacttgaacgacatctacgaggaggagcctttcaatttccagatggtctacaatgagttccagaaatttgtgcagagaaaggcccacagtgtgtataattttgagaagcccgtggtgatgaaggccttcgagcaccttcaacagctcgaattaattaagcccatggagaggaccagcgggaattcgcagcgcgagtatcagctgatgaaacttctgctggacaatacccagatcatgaatgcgctccagaagtatcctaactgccctacagacgtgaggcaatgggctacctcttccctgagctggctgtag

SEQ ID NO: 129674 - DNA, 1311 bp, Artificial Sequence
  derived and/or modified sequence
atgagcagccggaagagcaagagcaacagcctgatccacaccgagtgtctgtcacaagtgcaaagaattctgcgtgagaggttttgccgccagtctccgcattccaatctgtttggtgtgcaggttcagtacaagcatttgtccgaactgttgaagagaactgctctgcacggtgagtcaaattcggtactgataatcggaccacgcggctcaggaaagactatgctcataaaccatgcattgaaggaactcatggagatcgaggaggtttccgagaatgtcctacaggtgcacttgaatggactgttgcagattaacgacaagatcgcactcaaggagatcaccaggcaactgaatctggaaaatgtggtgggagataaagtgtttgggtcattcgcggagaacctcagtttcttgttggaggcactgaaaaagggagatagaacatccagctgccctgtaatattcattctcgacgagttcgacctcttcgcccaccacaaaaaccaaaccctgctgtataatctgtttgacatctcacagtctgcccaaacccctatcgccgtgataggccttacgtgcaggcttgatatacttgagctgctggaaaagcgggtgaagtccaggttctcccacagacaaattcatctgatgaattccttcggtttccctcagtacgtgaaaattttcaaagagcaactgtccttaccagcagagttccctgataaggtattcgctgagaagtggaatgagaatgtacagtacttgagcgaggatcgtagcgtgcaagaggtcctgcagaagcacttcaatatctccaagaacctacgcagtttgcatatgctgctgatgctagcgcttaaccgggtgacagccagtcatcccttcatgactgcggtcgatctaatggaagcctcgcagttatgctccatggacagcaaagcgaacatcgtgcacgggctgtccgtcctggaaatctgtctgatcattgctatgaagcatctgaacgatatatatgaggaggaaccattcaacttccagatggtatataatgaattccagaaattcgtgcaaaggaaggctcatagcgtgtacaattttgaaaaaccggtggtaatgaaagctttcgagcacctacagcagctggagctcatcaagccaatggagagaacaagcgggaatagtcagagggagtatcagctgatgaagctgttattggacaacacccagattatgaacgctctgcaaaaatacccgaactgtccaaccgacgtccgacagtgggccacaagtagcctcagctggctatag

SEQ ID NO: 129675 - DNA, 1311 bp, Artificial Sequence
  derived and/or modified sequence
atgagcagccggaagagcaagagcaacagcctgatccacaccgagtgcctgtcccaggtgcagcggatcctacgggagaggttttgtcgacagtctccccacagcaatctctttggagtgcaggttcagtataaacatctatccgagctgctcaagagaacagccctgcacggagaatccaatagcgtactcattatcggcccaaggggaagtggcaaaaccatgctaatcaaccatgccctgaaagagctgatggaaattgaagaggtctccgaaaacgtgctacaagtgcatctgaacgggctgctccagataaacgacaagattgcccttaaggagatcacacgtcaactcaacctggaaaacgttgtcggagataaggtgtttgggagtttcgccgagaatctctcgttcctattagaggcactgaaaaagggagatcgcactagctcttgcccagtcatttttatccttgatgaattcgatctgttcgcacaccacaagaatcagaccctactatacaacttatttgatattagccagagcgcgcaaacccctattgcggtgattgggttgacctgtagactggatattctagaactgcttgaaaaaagagtaaaatccaggttttcacacagacaaattcacctgatgaactcgttcggattccctcagtacgtgaagatattcaaggaacaactctccctccccgccgagttccctgataaggtgtttgccgaaaaatggaacgagaacgtccagtaccttagtgaagatcgctcagtgcaggaggtcttacagaaacatttcaatatcagtaagaatttacgtagcctgcacatgctcctcatgcttgccttgaaccgtgtcaccgcctcacatcctttcatgaccgccgtcgatctaatggaagcctcacagttatgcagtatggactcaaaggccaatatagtgcatggactgtcagtgctcgagatatgcctgatcatcgctatgaagcatctgaatgatatttatgaggaggagccatttaacttccagatggtctataatgaatttcagaagtttgtgcagaggaaagcccacagtgtatacaattttgaaaagcctgtggttatgaaggcatttgagcatctgcagcagctcgaactgatcaagccaatggagagaactagcgggaactctcaaagggagtaccagctgatgaaactgctgctggataacacacaaattatgaatgcactacagaagtacccaaactgccctaccgatgtaagacaatgggcaacaagctccctgtcatggctctag

SEQ ID NO: 129676 - DNA, 438 bp, Artificial Sequence
  derived and/or modified sequence
atgagcagccggaagagcaagagcaacagcctgatccacaccgagtgtctctcgcaggtacagcgtatccttagggagagattttgccgacaatcccctcattccaatctgttcggggttcaagtgcaatacaagcacctctccgagctgctcaagcgaacagcactccacggcgaaagcaacagtgtgcttattattggaccccgaggtagtgggaagactatgcttatcaatcatgccctcaaagaactcatggagatagaagaggtcagcgagaatgtgctgcaggtgcatctgaacggactgttgcaaatcaacgacaagatcgcactaaaggagattactcgccagttgaatttagagaacgtggtgggcgacaaagttttcggctcgtttgcggagaatctctcttttttgctggaggcactaaaaaagtag

SEQ ID NO: 129677 - DNA, 384 bp, Artificial Sequence
  derived and/or modified sequence
atgagcagccggaagagcaagagcaacagcctgatccacaccgagtgcctctctcaggttcaacgaatcctgcgcgagagattctgtcgtcagtctccccacagtaatctgtttggtgtgcaggtgcagtacaaacacctaagcgagttgctcaaaagaaccgccctccatggtgaaagcaacagcgtgttgatcattggccctcgaggaagcggaaagactatgcttataaaccacgccctgaaggaattgatggaaattgaggaggtgtcagagaacgtgctgcaggtgcaccttaacgggttgcttcaaattaacgataagatcgctctcaaggaaataactcgccagctgaatctggaaaacgtagttggcgataagtag

SEQ ID NO: 129678 - DNA, 387 bp, Artificial Sequence
  derived and/or modified sequence
atgagcagccggaagagcaagagcaacagcctgatccacaccgagtgcctgagtcaggtgcagcgaatcttgagagagaggttttgcaggcagtcccctcatagtaacctgtttggagtgcaggtacagtacaagcacctctctgagctgctgaagcgcactgctttacacggggagagcaattcagtgcttattatcggtccacgcggttccgggaagaccatgctcattaatcatgctctgaaggagctaatggagattgaggaagtgagcgagaacgtgctgcaggtccatttgaacggactgctgcagattaacgataagatcgctctcaaggagatcaccagacagctgaacctcgaaaatgtcgtaggggacaaagtttag

SEQ ID NO: 129679 - DNA, 1311 bp, Artificial Sequence
  derived and/or modified sequence
atgagcagccggaagagcaagagcaacagcctgatccacaccgagtgcctcagccaggttcagagaattctgagggagcgtttttgtagacagagtccacacagcaatctattcggggtccaggtgcagtacaagcatctgagtgaactgctgaaaagaaccgcattgcatggcgagtcgaatagtgtcctcattatagggcctcgggggtcaggcaagacaatgctgatcaaccacgccttgaaggagctcatggagatagaagaagtctccgagaacgttttacaggtgcatctaaatgggttgctgcagattaacgacaagatcgcgctgaaggagatcacccgtcagctgaatcttgagaatgtggtgggggataaggttttcggatcattcgccgagaatttatctttcttattggaagccttgaagaagggagaccgcactagcagctgtcctgttattttcatcctcgatgaatttgacctctttgcacaccataaaaatcagacattactctataacttgttcgacatttctcagtcagctcaaaccccaatcgcagtgataggcttgacttgccgcttagatattctggagctgctagagaaacgggttaaatctaggttttcccatagacaaatacaccttatgaactcctttggcttcccccagtacgtcaagatattcaaagagcagctgagtctgcctgctgagttcccggacaaagttttcgctgaaaaatggaatgagaacgtacagtacctttcagaagatcggagcgtccaggaggtgttacagaaacacttcaatatctcaaaaaacctgagatccctgcatatgctcctcatgctggctcttaacagagtgaccgcttcacatcccttcatgaccgccgttgacttgatggaggcgtcacagttgtgctctatggatagcaaggctaatattgtccatggcttatctgtcctagaaatctgtctcattattgctatgaagcacctcaacgacatctacgaggaggaaccctttaacttccagatggtctataacgagtttcagaagttcgtgcaacggaaggcacactcagtgtataatttcgaaaagcccgtagtgatgaaggcttttgagcatctgcagcaactggagctgataaagcccatggagaggacttccggaaatagccagcgagagtaccagttgatgaagctattgttagacaatacccagattatgaatgctctccagaaatatcctaactgtcccacagatgtgaggcagtgggctacgtccagtctgtcgtggctgtag

SEQ ID NO: 129680 - DNA, 2806 bp, Artificial Sequence
  derived and/or modified sequence
gagctggggaagtggctgctcctgggtgtagtgagatgtctccagccagggccaagcagcagcagtagcagcagcagcagtagcagcagcagcagcaacagcagcagcagcagcaacagcagcagcaaagggatttgaatttgttgaaatgagcagtcgtaaatcaaagagtaacagcttaattcacacagagtgcctttcacaggtacaaagaattttacgtgaaagattttgtcgtcagagtccacatagtaacctatttggagtgcaagtacaatacaaacacttaagtgagctgctgaaaagaactgctctccatggagagagtaactctgtccttattatcggaccccgaggatcaggaaaaactatgttaataaatcatgctttgaaagaactcatggaaatagaagaagtgagtgaaaatgtattacaagttcacttaaatggactgctgcagatcaatgacaaaatcgccctaaaggaaatcacaaggcagttaaatctggaaaatgtagttggagataaagtttttggaagctttgctgaaaacctttcatttcttctggaagctttaaaaaaaggtgaccgaactagcagttgcccagtgatcttcatattagatgaatttgatctttttgctcatcataaaaaccaaacacttctctataatctttttgacatttctcagtctgcacagaccccaatagcagttattggtcttacatgtagattggatattttggaactcttagaaaaaagagtgaagtcaagattttctcaccggcagatacacttaatgaattcatttggttttccacagtatgttaaaatatttaaagaacagttatctctacctgcagagtttccagacaaggtttttgctgagaagtggaatgaaaatgttcagtatctctcagaagatagaagtgtgcaagaagtactacagaagcatttcaatatcagcaaaaacctgcggtcattacacatgctattgatgcttgctttaaatcgagtaacagcatcgcacccatttatgactgccgtagatctaatggaagcaagccaactgtgtagcatggactcgaaagcaaatattgtacatggtctatcagtcttggaaatctgtcttataatagcaatgaaacatttaaatgacatctatgaggaagagccatttaattttcaaatggtctataatgagtttcagaagtttgttcaaaggaaagcacattccgtttataattttgaaaaacctgttgtcatgaaggcttttgaacacttgcagcaattagaattaataaagcccatggaaagaacttcaggaaattcacagagagagtaccagctgatgaaactgcttttggataatactcaaattatgaatgctctgcagaaatatcccaactgtcctacagatgtgaggcagtgggcaacatcctcactaagctggttatgaatataaccagtgacttcaactttggcatttcattcatacttctgtagagaacggaaaactattgtccattaacatgatatgctaaacattctataaacattcttgtatttatgtgagacttgcccatctactgtcttggctgtgtcttgccttttaatcatgaacagttacatgatttataatttcactgattgagattactttgtaagtagctgttcagaagaataaaatatgactgttttagggactagaccatgtgcttttttaacacttatatatataatggtctatttgaagagctcacttcaacctaacagctagatgtctttacaaaccttaaaccaaaggagtaaaaaaaacaatggtaagcactgaagtataataagtaacctttggtacagcaggtttgctgcagtgtttttttctgtccacatgcaaattttggattctatcccagacccaggttttctagttcagaagactaaccagcttagtcagaagatggttccatggaagaaaaaggccaaggagtttgaagatttttcttctagacatctcaaaatgtggtactcataccatccacatcagaatcccttgtaggattttctaaaattacagattgttgagcctaccataggtcaaaaggactggaattttccttcttaacaagtatagtcatggcaccacgtaacattttggtcaatgacattgtataaagggtggtctcataagattataccatatttttactgtaccttttctatgtctaaatatacaaatgttttaccattgtgttacagttgcctacagtatgattacagtaacattctgtacagtgctatagctgaagagtaataggctaggctatctgtatagcctaagtgtgtaacaggctatatacatatcatcagggtctgtgtaagtatactctgtgatgttcatacagtgatgaaatcacccaaagacacatttctcagaacgtagccccatcatgaagtgacgtgactaccagagatttctggaaaagcactcccaaaagtaatgagatgtgtatggcaatgttaactgaacctgtttgtattaaaaagtaaatccctatgaggaatgtggaaatgtccgtcaaagcattgtcttttaagtaagttccaagatccatgaattaacagaggcatatatttaaaatgaaatttaatgagcacttagtgacttcatttgttcaagaatatttgatttcctattgtgtgcatgggaggtttacaaaagacagactgtccctatgcttgtgcagcttacaatctatttaactattagaggccctgtgagatgtaggcagttatttacagatga

SEQ ID NO: 129681 - DNA, 2517 bp, Artificial Sequence
  derived and/or modified sequence
gtccgcagcggcaggtgaagtctagcagaggacgcggccaggcgattcggtgaagcgattcctgcaggcgttggttcccctctttgacctggatttgaatttgttgaaatgagcagtcgtaaatcaaagagtaacagcttaattcacacagagtgcctttcacaggtacaaagaattttacgtgaaagattttgtcgtcagagtccacatagtaacctatttggagtgcaagtacaatacaaacacttaagtgagctgctgaaaagaactgctctccatggagagagtaactctgtccttattatcggaccccgaggatcaggaaaaactatgttaataaatcatgctttgaaagaactcatggaaatagaagaagtgagtgaaaatgtattacaagttcacttaaatggactgctgcagatcaatgacaaaatcgccctaaaggaaatcacaaggcagttaaatctggaaaatgtagttggagataaagtttttggaagctttgctgaaaacctttcatttcttctggaagctttaaaaaaaggtgaccgaactagcagttgcccagtgatcttcatattagatgaatttgatctttttgctcatcataaaaaccaaacacttctctataatctttttgacatttctcagtctgcacagaccccaatagcagttattggtcttacatgtagattggatattttggaactcttagaaaaaagagtgaagtcaagattttctcaccggcagatacacttaatgaattcatttggttttccacagtatgttaaaatatttaaagaacagttatctctacctgcagagtttccagacaaggtttttgctgagaagtggaatgaaaatgttcagtatctctcagaagatagaagtgtgcaagaagtactacagaagcatttcaatatcagcaaaaacctgcggtcattacacatgctattgatgcttgctttaaatcgagtaacagcatcgcacccatttatgactgccgtagatctaatggaagcaagccaactgtgtagcatggactcgaaagcaaatattgtacatggtctatcagtcttggaaatctgtcttataatagcaatgaaacatttaaatgacatctatgaggaagagccatttaattttcaaatggtctataatgagtttcagaagtttgttcaaaggaaagcacattccgtttataattttgaaaaacctgttgtcatgaaggcttttgaacacttgcagcaattagaattaataaagcccatggaaagaacttcaggaaattcacagagagagtaccagctgatgaaactgcttttggataatactcaaattatgaatgctctgcagaaatatcccaactgtcctacagatgtgaggcagtgggcaacatcctcactaagctggttatgaatataaccagtgacttcaactttggcatttcattcatacttctgtagagaacggaaaactattgtccattaacatgatatgctaaacattctataaacattcttgtatttatgtgagacttgcccatctactgtcttggctgtgtcttgccttttaatcatgaacagttacatgatttataatttcactgattgagattactttgtaagtagctgttcagaagaataaaatatgactgttttagggactagaccatgtgcttttttaacacttatatatataatggtctatttgaagagctcacttcaacctaacagctagatgtctttacaaaccttaaaccaaaggagtaaaaaaaacaatggtaagcactgaagtataataagtaacctttggtacagcaggtttgctgcagtgtttttttctgtccacatgcaaattttggattctatcccagacccaggttttctagttcagaagactaaccagcttagtcagaagatggttccatggaagaaaaaggccaaggagtttgaagatttttcttctagacatctcaaaatgtggtactcataccatccacatcagaatcccttgtaggattttctaaaattacagattgttgagcctaccataggtcaaaaggactggaattttccttcttaacaagtatagtcatggcaccacgtaacattttggtcaatgacattgtataaagggtggtctcataagattataccatatttttactgtaccttttctatgtctaaatatacaaatgttttaccattgtgttacagttgcctacagtatgattacagtaacattctgtacagtgctatagctgaagagtaataggctaggctatctgtatagcctaagtgtgtaacaggctatatacatatcatcagggtctgtgtaagtatactctgtgatgttcatacagtgatgaaatcacccaaagacacatttctcagaacgtagccccatcatgaagtgacgtgactaccagagatttctggaaaagcactcccaaaagtaatgagatgtgtatggcaatgttaactgaacctgtttgtattaaaaagtaaatcccta

SEQ ID NO: 129682 - DNA, 2818 bp, Artificial Sequence
  derived and/or modified sequence
ggggcatgccgggagtggttgtgtacggtccgcagcggcaggtgaagtctagcagaggacgcggccaggcgattcggtgaagcgattcctgcaggcgttggttcccctctttgacctggtaaatgcaggcttttatgcgagaggatttgaatttgttgaaatgagcagtcgtaaatcaaagagtaacagcttaattcacacagagtgcctttcacaggtacaaagaattttacgtgaaagattttgtcgtcagagtccacatagtaacctatttggagtgcaagtacaatacaaacacttaagtgagctgctgaaaagaactgctctccatggagagagtaactctgtccttattatcggaccccgaggatcaggaaaaactatgttaataaatcatgctttgaaagaactcatggaaatagaagaagtgagtgaaaatgtattacaagttcacttaaatggactgctgcagatcaatgacaaaatcgccctaaaggaaatcacaaggcagttaaatctggaaaatgtagttggagataaagtttttggaagctttgctgaaaacctttcatttcttctggaagctttaaaaaaaggtgaccgaactagcagttgcccagtgatcttcatattagatgaatttgatctttttgctcatcataaaaaccaaacacttctctataatctttttgacatttctcagtctgcacagaccccaatagcagttattggtcttacatgtagattggatattttggaactcttagaaaaaagagtgaagtcaagattttctcaccggcagatacacttaatgaattcatttggttttccacagtatgttaaaatatttaaagaacagttatctctacctgcagagtttccagacaaggtttttgctgagaagtggaatgaaaatgttcagtatctctcagaagatagaagtgtgcaagaagtactacagaagcatttcaatatcagcaaaaacctgcggtcattacacatgctattgatgcttgctttaaatcgagtaacagcatcgcacccatttatgactgccgtagatctaatggaagcaagccaactgtgtagcatggactcgaaagcaaatattgtacatggtctatcagtcttggaaatctgtcttataatagcaatgaaacatttaaatgacatctatgaggaagagccatttaattttcaaatggtctataatgagtttcagaagtttgttcaaaggaaagcacattccgtttataattttgaaaaacctgttgtcatgaaggcttttgaacacttgcagcaattagaattaataaagcccatggaaagaacttcaggaaattcacagagagagtaccagctgatgaaactgcttttggataatactcaaattatgaatgctctgcagaaatatcccaactgtcctacagatgtgaggcagtgggcaacatcctcactaagctggttatgaatataaccagtgacttcaactttggcatttcattcatacttctgtagagaacggaaaactattgtccattaacatgatatgctaaacattctataaacattcttgtatttatgtgagacttgcccatctactgtcttggctgtgtcttgccttttaatcatgaacagttacatgatttataatttcactgattgagattactttgtaagtagctgttcagaagaataaaatatgactgttttagggactagaccatgtgcttttttaacacttatatatataatggtctatttgaagagctcacttcaacctaacagctagatgtctttacaaaccttaaaccaaaggagtaaaaaaaacaatggtaagcactgaagtataataagtaacctttggtacagcaggtttgctgcagtgtttttttctgtccacatgcaaattttggattctatcccagacccaggttttctagttcagaagactaaccagcttagtcagaagatggttccatggaagaaaaaggccaaggagtttgaagatttttcttctagacatctcaaaatgtggtactcataccatccacatcagaatcccttgtaggattttctaaaattacagattgttgagcctaccataggtcaaaaggactggaattttccttcttaacaagtatagtcatggcaccacgtaacattttggtcaatgacattgtataaagggtggtctcataagattataccatatttttactgtaccttttctatgtctaaatatacaaatgttttaccattgtgttacagttgcctacagtatgattacagtaacattctgtacagtgctatagctgaagagtaataggctaggctatctgtatagcctaagtgtgtaacaggctatatacatatcatcagggtctgtgtaagtatactctgtgatgttcatacagtgatgaaatcacccaaagacacatttctcagaacgtagccccatcatgaagtgacgtgactaccagagatttctggaaaagcactcccaaaagtaatgagatgtgtatggcaatgttaactgaacctgtttgtattaaaaagtaaatccctatgaggaatgtggaaatgtccgtcaaagcattgtcttttaagtaagttccaagatccatgaattaacagaggcatatatttaaaatgaaatttaatgagcacttagtgacttcatttgttcaagaatatttgatttcctattgtgtgcatgggaggtttacaaaagacagactgtccctatgcttgtgcagcttacaatctatttaactattagaggccctgtgagatgtaggcagttatttacagatga

SEQ ID NO: 129683 - DNA, 571 bp, Artificial Sequence
  derived and/or modified sequence
ggctgctcctgggtgtagtgagatgtctccagccagggccaagcagcagcagtagcagcagcagcagtagcagcagcagcagcaacagcagcagcagcagcaacagcagcagcaaagggatttgaatttgttgaaatgagcagtcgtaaatcaaagagtaacagcttaattcacacagagtgcctttcacaggtacaaagaattttacgtgaaagattttgtcgtcagagtccacatagtaacctatttggagtgcaagtacaatacaaacacttaagtgagctgctgaaaagaactgctctccatggagagagtaactctgtccttattatcggaccccgaggatcaggaaaaactatgttaataaatcatgctttgaaagaactcatggaaatagaagaagtgagtgaaaatgtattacaagttcacttaaatggactgctgcagatcaatgacaaaatcgccctaaaggaaatcacaaggcagttaaatctggaaaatgtagttggagataaagtttttggaagctttgctgaaaacctttcatttcttctggaagctttaaaaaaag

SEQ ID NO: 129684 - DNA, 552 bp, Artificial Sequence
  derived and/or modified sequence
gtgcgtgcgcggggcatgccgggagtggttgtgtacggtccgcagcggcaggtgaagtctagcagaggacgcggccaggcgattcggtgaagcgattcctgcaggcgttggttcccctctttgacctggtaaatgcaggcttttatgcgagaggatttgaatttgttgaaatgagcagtcgtaaatcaaagagtaacagcttaattcacacagagtgcctttcacaggtacaaagaattttacgtgaaagattttgtcgtcagagtccacatagtaacctatttggagtgcaagtacaatacaaacacttaagtgagctgctgaaaagaactgctctccatggagagagtaactctgtccttattatcggaccccgaggatcaggaaaaactatgttaataaatcatgctttgaaagaactcatggaaatagaagaagtgagtgaaaatgtattacaagttcacttaaatggactgctgcagatcaatgacaaaatcgccctaaaggaaatcacaaggcagttaaatctggaaaatgtagttggagataaag

SEQ ID NO: 129685 - DNA, 647 bp, Artificial Sequence
  derived and/or modified sequence
ggtccgcagcggcaggtgaagtctagcagaggacgcggccaggcgattcggtgaagcgattcctgcaggcgttggttcccctctttgacctggaagcctggagccagaggacttttggtggctgaggccttagctacctggcttacacattaaggaggacacagatttgcttgctgtctgtctgtcaaggcctggctcagctaaggacctgttaacatttctagagaagaaaacagcattaccatggatttgaatttgttgaaatgagcagtcgtaaatcaaagagtaacagcttaattcacacagagtgcctttcacaggtacaaagaattttacgtgaaagattttgtcgtcagagtccacatagtaacctatttggagtgcaagtacaatacaaacacttaagtgagctgctgaaaagaactgctctccatggagagagtaactctgtccttattatcggaccccgaggatcaggaaaaactatgttaataaatcatgctttgaaagaactcatggaaatagaagaagtgagtgaaaatgtattacaagttcacttaaatggactgctgcagatcaatgacaaaatcgccctaaaggaaatcacaaggcagttaaatctggaaaatgtagttggagataaagtt

SEQ ID NO: 129686 - DNA, 3091 bp, Artificial Sequence
  derived and/or modified sequence
ggaagtcgctacgcttttaacacccccagctccctcctccttcctaagggaaagtggaggaacggaagtgggcgtggacggagacgaaaggaggtcacgtgtttgggcgggagaggggcggggtgggagaggtagtgcgtgcgcggggcatgccgggagtggttgtgtacggtccgcagcggcaggtgaagtctagcagaggacgcggccaggcgattcggtgaagcgattcctgcaggcgttggttcccctctttgacctggaagcctggagccagaggacttttggtggctgaggccttagctacctggcttacacattaaggaggacacagatttgcttgctgtctgtctgtcaaggcctggctcagctaaggacctgttaacatttctagagaagaaaacagcattaccatggatttgaatttgttgaaatgagcagtcgtaaatcaaagagtaacagcttaattcacacagagtgcctttcacaggtacaaagaattttacgtgaaagattttgtcgtcagagtccacatagtaacctatttggagtgcaagtacaatacaaacacttaagtgagctgctgaaaagaactgctctccatggagagagtaactctgtccttattatcggaccccgaggatcaggaaaaactatgttaataaatcatgctttgaaagaactcatggaaatagaagaagtgagtgaaaatgtattacaagttcacttaaatggactgctgcagatcaatgacaaaatcgccctaaaggaaatcacaaggcagttaaatctggaaaatgtagttggagataaagtttttggaagctttgctgaaaacctttcatttcttctggaagctttaaaaaaaggtgaccgaactagcagttgcccagtgatcttcatattagatgaatttgatctttttgctcatcataaaaaccaaacacttctctataatctttttgacatttctcagtctgcacagaccccaatagcagttattggtcttacatgtagattggatattttggaactcttagaaaaaagagtgaagtcaagattttctcaccggcagatacacttaatgaattcatttggttttccacagtatgttaaaatatttaaagaacagttatctctacctgcagagtttccagacaaggtttttgctgagaagtggaatgaaaatgttcagtatctctcagaagatagaagtgtgcaagaagtactacagaagcatttcaatatcagcaaaaacctgcggtcattacacatgctattgatgcttgctttaaatcgagtaacagcatcgcacccatttatgactgccgtagatctaatggaagcaagccaactgtgtagcatggactcgaaagcaaatattgtacatggtctatcagtcttggaaatctgtcttataatagcaatgaaacatttaaatgacatctatgaggaagagccatttaattttcaaatggtctataatgagtttcagaagtttgttcaaaggaaagcacattccgtttataattttgaaaaacctgttgtcatgaaggcttttgaacacttgcagcaattagaattaataaagcccatggaaagaacttcaggaaattcacagagagagtaccagctgatgaaactgcttttggataatactcaaattatgaatgctctgcagaaatatcccaactgtcctacagatgtgaggcagtgggcaacatcctcactaagctggttatgaatataaccagtgacttcaactttggcatttcattcatacttctgtagagaacggaaaactattgtccattaacatgatatgctaaacattctataaacattcttgtatttatgtgagacttgcccatctactgtcttggctgtgtcttgccttttaatcatgaacagttacatgatttataatttcactgattgagattactttgtaagtagctgttcagaagaataaaatatgactgttttagggactagaccatgtgcttttttaacacttatatatataatggtctatttgaagagctcacttcaacctaacagctagatgtctttacaaaccttaaaccaaaggagtaaaaaaaacaatggtaagcactgaagtataataagtaacctttggtacagcaggtttgctgcagtgtttttttctgtccacatgcaaattttggattctatcccagacccaggttttctagttcagaagactaaccagcttagtcagaagatggttccatggaagaaaaaggccaaggagtttgaagatttttcttctagacatctcaaaatgtggtactcataccatccacatcagaatcccttgtaggattttctaaaattacagattgttgagcctaccataggtcaaaaggactggaattttccttcttaacaagtatagtcatggcaccacgtaacattttggtcaatgacattgtataaagggtggtctcataagattataccatatttttactgtaccttttctatgtctaaatatacaaatgttttaccattgtgttacagttgcctacagtatgattacagtaacattctgtacagtgctatagctgaagagtaataggctaggctatctgtatagcctaagtgtgtaacaggctatatacatatcatcagggtctgtgtaagtatactctgtgatgttcatacagtgatgaaatcacccaaagacacatttctcagaacgtagccccatcatgaagtgacgtgactaccagagatttctggaaaagcactcccaaaagtaatgagatgtgtatggcaatgttaactgaacctgtttgtattaaaaagtaaatccctatgaggaatgtggaaatgtccgtcaaagcattgtcttttaagtaagttccaagatccatgaattaacagaggcatatatttaaaatgaaatttaatgagcacttagtgacttcatttgttcaagaatatttgatttcctattgtgtgcatgggaggtttacaaaagacagactgtccctatgcttgtgcagcttacaatctatttaactattagaggccctgtgagatgtaggcagttatttacagatga

SEQ ID NO: 129687 - DNA, 2863 bp, Artificial Sequence
  derived and/or modified sequence
ggaagtcgctacgcttttaacacccccagctccctcctccttcctaagggaaagtggaggaacggaagtgggcgtggacggagacgaaaggaggtcacgtgtttgggcgggagaggggcggggtgggagaggtagtgcgtgcgcggggcatgccgggagtggttgtgtacggtccgcagcggcaggtgaagtctagcagaggacgcggccaggcgattcggtgaagcgattcctgcaggcgttggttcccctctttgacctggtacaaagaattttacgtgaaagattttgtcgtcagagtccacatagtaacctatttggagtgcaagtacaatacaaacacttaagtgagctgctgaaaagaactgctctccatggagagagtaactctgtccttattatcggaccccgaggatcaggaaaaactatgttaataaatcatgctttgaaagaactcatggaaatagaagaagtgagtgaaaatgtattacaagttcacttaaatggactgctgcagatcaatgacaaaatcgccctaaaggaaatcacaaggcagttaaatctggaaaatgtagttggagataaagtttttggaagctttgctgaaaacctttcatttcttctggaagctttaaaaaaaggtgaccgaactagcagttgcccagtgatcttcatattagatgaatttgatctttttgctcatcataaaaaccaaacacttctctataatctttttgacatttctcagtctgcacagaccccaatagcagttattggtcttacatgtagattggatattttggaactcttagaaaaaagagtgaagtcaagattttctcaccggcagatacacttaatgaattcatttggttttccacagtatgttaaaatatttaaagaacagttatctctacctgcagagtttccagacaaggtttttgctgagaagtggaatgaaaatgttcagtatctctcagaagatagaagtgtgcaagaagtactacagaagcatttcaatatcagcaaaaacctgcggtcattacacatgctattgatgcttgctttaaatcgagtaacagcatcgcacccatttatgactgccgtagatctaatggaagcaagccaactgtgtagcatggactcgaaagcaaatattgtacatggtctatcagtcttggaaatctgtcttataatagcaatgaaacatttaaatgacatctatgaggaagagccatttaattttcaaatggtctataatgagtttcagaagtttgttcaaaggaaagcacattccgtttataattttgaaaaacctgttgtcatgaaggcttttgaacacttgcagcaattagaattaataaagcccatggaaagaacttcaggaaattcacagagagagtaccagctgatgaaactgcttttggataatactcaaattatgaatgctctgcagaaatatcccaactgtcctacagatgtgaggcagtgggcaacatcctcactaagctggttatgaatataaccagtgacttcaactttggcatttcattcatacttctgtagagaacggaaaactattgtccattaacatgatatgctaaacattctataaacattcttgtatttatgtgagacttgcccatctactgtcttggctgtgtcttgccttttaatcatgaacagttacatgatttataatttcactgattgagattactttgtaagtagctgttcagaagaataaaatatgactgttttagggactagaccatgtgcttttttaacacttatatatataatggtctatttgaagagctcacttcaacctaacagctagatgtctttacaaaccttaaaccaaaggagtaaaaaaaacaatggtaagcactgaagtataataagtaacctttggtacagcaggtttgctgcagtgtttttttctgtccacatgcaaattttggattctatcccagacccaggttttctagttcagaagactaaccagcttagtcagaagatggttccatggaagaaaaaggccaaggagtttgaagatttttcttctagacatctcaaaatgtggtactcataccatccacatcagaatcccttgtaggattttctaaaattacagattgttgagcctaccataggtcaaaaggactggaattttccttcttaacaagtatagtcatggcaccacgtaacattttggtcaatgacattgtataaagggtggtctcataagattataccatatttttactgtaccttttctatgtctaaatatacaaatgttttaccattgtgttacagttgcctacagtatgattacagtaacattctgtacagtgctatagctgaagagtaataggctaggctatctgtatagcctaagtgtgtaacaggctatatacatatcatcagggtctgtgtaagtatactctgtgatgttcatacagtgatgaaatcacccaaagacacatttctcagaacgtagccccatcatgaagtgacgtgactaccagagatttctggaaaagcactcccaaaagtaatgagatgtgtatggcaatgttaactgaacctgtttgtattaaaaagtaaatccctatgaggaatgtggaaatgtccgtcaaagcattgtcttttaagtaagttccaagatccatgaattaacagaggcatatatttaaaatgaaatttaatgagcacttagtgacttcatttgttcaagaatatttgatttcctattgtgtgcatgggaggtttacaaaagacagactgtccctatgcttgtgcagcttacaatctatttaactattagaggccctgtgagatgtaggcagttatttacagatga

SEQ ID NO: 129688 - DNA, 1311 bp, Artificial Sequence
  derived and/or modified sequence
atgtccagccgaaagtctaagtccaactctctcattcataccgaatgcttgtcgcaggtccagagaattttaagagagcggttttgccggcagagtccacatagcaatttgttcggcgtgcaggtgcagtacaaacacctatctgaactcctcaaacgtactgcgctccatggggagagtaactccgttctgattatcggccctcgcggatctgggaagactatgttgatcaatcatgcactcaaggagctaatggagatcgaggaggtgtcggagaatgtgctccaggttcatcttaatggcctactgcagatcaacgacaaaatagccctcaaagagattactcggcagctaaatctggagaacgtggtgggagacaaagttttcggaagctttgcagagaacctgtcctttcttctagaggccctgaaaaaaggggaccgaacctcctcttgtcctgtcatttttattctcgacgagtttgatctcttcgcacaccacaagaatcagactctgttgtacaatctcttcgacattagtcagtcggcccagacacctatcgcagtgatcgggctcacttgtagactggatatcctggagctgctggagaagcgagttaagagcaggttcagccatagacagatccatctgatgaacagtttcggcttccctcaatacgtcaagatctttaaagagcaactcagcttgcccgcagagttcccagacaaggtgttcgccgaaaaatggaatgagaacgtgcagtacttgtccgaggataggtctgtccaggaagtcctgcagaagcacttcaatatttctaagaacctacggtctctgcacatgctcttaatgcttgctttaaacagggtgaccgcctcacaccctttcatgacagcagtggacctgatggaagcctctcaactctgcagtatggactcgaaagccaatattgttcacgggcttagcgtcctggagatttgtttaataatcgccatgaagcatctgaacgacatctacgaggaagaaccttttaactttcagatggtttataacgagtttcagaagttcgtacagagaaaagcgcactcagtgtacaatttcgagaagcctgtcgtaatgaaggccttcgaacacttgcagcagctggagctgattaagccaatggagcgaacctctggaaactcccagcgcgagtatcagttgatgaaactactcctggataacacccagataatgaacgctctccagaaatatccaaactgccccactgacgtgcggcagtgggcaacctccagcctctcatggctgtag

SEQ ID NO: 129689 - DNA, 1311 bp, Artificial Sequence
  derived and/or modified sequence
atgtcttctagaaaaagtaaatccaactcactgatccatacagagtgtctgagtcaagtgcagcggattctccgggagaggttttgcagacaaagtccgcattctaacctttttggtgtccaggtccagtataagcacctatcagaactgctgaagcgcaccgcattacacggcgagtcaaactccgtactaattatagggccacgaggatcgggtaagaccatgctgatcaaccacgctctcaaggagttaatggaaatcgaagaggtctccgagaacgtcctccaggtgcacttgaatggattgctgcaaattaacgataagatcgcccttaaggaaattactcggcagttgaacttagaaaacgtcgttggggacaaggtttttggctctttcgcggaaaacctttctttcctcctagaggcgctaaaaaaaggcgaccggacatcaagttgccctgttatctttattctggatgagtttgatctttttgcacaccataagaatcaaacccttttatacaacctgttcgatatatctcaatctgcccagactcccattgcggtcataggactaacctgccgcttggacattctggaactgcttgaaaaacgagtgaaatcgaggttttcacaccggcagattcaccttatgaactcgtttggattcccccaatatgtgaagattttcaaagaacagttatccctacccgctgagtttccagacaaggtttttgctgagaagtggaacgaaaacgttcaatacctctctgaagaccggagtgtgcaggaagtccttcagaaacacttcaatatctctaaaaatttacgcagcctccatatgctgttgatgctggcacttaatcgcgtgaccgccagtcatcccttcatgacggctgtggatctcatggaggcatcgcagctgtgcagcatggatagtaaagccaacatcgtccatggattgtccgttctggagatttgtttaataattgccatgaaacacctgaacgatatatatgaggaggaacctttcaactttcagatggtttataatgaattccagaaatttgttcagaggaaggcccactctgtatataatttcgagaaacctgtggtaatgaaagctttcgagcatttgcagcaacttgagttgattaagcctatggaacgcacttcagggaactcccagagggaataccagttgatgaagctcctgctggataatacccaaattatgaatgctttgcaaaaatatcccaattgcccaactgacgttcggcagtgggccacttcctcattgtcttggctttag

SEQ ID NO: 129690 - DNA, 1311 bp, Artificial Sequence
  derived and/or modified sequence
atgtcttctcgtaaatcaaaatcaaacagcttgatccacactgagtgcctttctcaggtccaaaggatcctgcgcgagcgtttctgtaggcagagtcctcacagcaatctctttggcgtacaggttcaatacaaacatctgtccgagctgctgaagcgtacagcgcttcacggcgagagcaacagcgtcttgataataggacccagaggctcggggaaaaccatgttgatcaaccatgccttgaaggaattaatggagatcgaggaggtctctgaaaacgtcctacaggtccatcttaacggccttctccagattaacgataagattgcactcaaagaaatcacccgccaactgaacctggaaaacgtagtcggcgataaggttttcggttcgtttgctgagaacttgtcatttttattagaagcactcaagaagggcgaccggacatcttcatgccctgtgatcttcattctcgatgagtttgacctgttcgcacaccataagaatcagacactactgtataatctgttcgatatttcccaatcggcccagacccctattgcagttatcggtctgacttgccggttggacattctggaacttctcgaaaagagggttaaatcgaggtttagccacaggcagatccatcttatgaatagcttcggttttccccagtacgtgaagatcttcaaggagcagctgtccttgccagctgagttccctgataaagtgtttgcagaaaagtggaacgagaacgtacagtatctgagtgaggacagaagtgttcaagaagtgcttcagaagcattttaacatttccaaaaaccttaggtcgctgcacatgctgctcatgcttgcgttgaaccgggtgaccgccagtcacccctttatgaccgccgttgacctgatggaagcgtctcagctatgtagtatggatagcaaggcgaacatcgtgcacggcttatcagtgctcgagatctgccttataatcgccatgaagcatctgaacgacatctacgaagaagagccctttaacttccagatggtctataacgaatttcagaaatttgtccaaaggaaggcccacagtgtgtataactttgagaaacctgtcgttatgaaagctttcgaacacctgcagcagctcgagctgatcaagcccatggaacgaactagcggtaatagccagagggagtaccaacttatgaagttgctgctcgataacacccaaatcatgaacgcactgcagaaataccctaattgtcccactgatgttaggcagtgggctacatcaagcctaagctggttgtag

SEQ ID NO: 129691 - DNA, 438 bp, Artificial Sequence
  derived and/or modified sequence
atgtctagtcggaagtccaagagcaacagtctgattcacacggagtgcttgagtcaggtgcagcgcatcctgcgggaaaggttctgcagacagagtccccattctaatctttttggagtgcaagtgcagtacaagcacctcagcgagttacttaagagaacggcactgcatggagaaagcaacagtgtgctgatcatcgggcctaggggctcaggcaaaacaatgttaattaaccatgccctgaaggagctcatggagatcgaggaagtgagtgagaacgtcctgcaggttcacttgaatggtttactgcagattaatgataagattgccctgaaggagattacgcgccagttgaatctcgagaacgtcgtcggagataaggtgttcggctcgttcgcggagaatctgtcttttctcctggaggccctcaaaaagtag

SEQ ID NO: 129692 - DNA, 384 bp, Artificial Sequence
  derived and/or modified sequence
atgtcttctcgcaagagtaagtcaaattcactcattcacacagagtgccttagtcaagtccagagaatcctgcgagagcgcttctgcagacagagccctcactcaaacttatttggggtgcaggtgcagtacaaacatttgtcagaactactgaagagaacagccttgcacggagaatcaaatagtgtcctcatcatcggcccacggggatctggtaagactatgctcattaaccacgctctcaaagagctgatggaaattgaggaagtatctgaaaatgtcctacaggtccatctgaacggcctcctgcagatcaatgataagattgctttaaaagagattacccgccagcttaatctcgaaaatgtcgtaggagataagtag

SEQ ID NO: 129693 - DNA, 387 bp, Artificial Sequence
  derived and/or modified sequence
atgagtagcaggaaaagcaagagcaactctctcattcataccgagtgcctctcgcaggtacagcggattcttagagagcgattttgcaggcagtcaccacactccaacctcttcggtgttcaggtgcagtataagcatttatctgaactccttaagcgcacagcccttcatggcgagtccaattctgtgctcatcatcggaccgagaggctcgggcaagacaatgctgattaaccacgcactcaaagaactcatggaaattgaggaggtgagtgagaacgtgctgcaggtccacctaaacggccttctccagatcaatgacaaaattgcccttaaagaaattaccagacaactgaacctggaaaacgtggtcggtgataaggtctag

SEQ ID NO: 129694 - DNA, 1311 bp, Artificial Sequence
  derived and/or modified sequence
atgtctagcaggaaatccaaatccaacagccttattcacactgagtgtttgtcacaagttcagcgcatcctaagagagcgattctgtagacagtctccacacagtaacctgtttggcgtgcaggtgcagtataaacatttgagcgaacttttaaagcgaacagctttgcatggcgaatcaaatagcgtgctgatcattggccctagaggatcaggaaaaaccatgctgataaaccacgcattgaaagaactaatggagattgaggaggtctccgaaaacgtccttcaggtgcacctgaacgggcttttacaaatcaacgataaaattgccctgaaggaaattactaggcagctgaatctggagaatgtcgtaggagacaaggtgtttggaagctttgctgagaacctcagctttctgctcgaagccttgaagaagggcgaccggaccagttcttgtcctgtgatatttatcttggatgagttcgacctgtttgctcatcataagaaccagacactgctgtataacttgtttgatatctcacagtcagcacagacccctattgctgtgattggcctgacatgtcgactcgatattctcgagctgctcgaaaaaagagtgaagtcccggttcagccacagacagattcatctcatgaactcttttgggtttccccagtacgtcaagatcttcaaggaacagttgtccttgcctgcagagttccccgataaggtttttgctgaaaaatggaatgaaaatgtgcaatacctctctgaggataggtcagtccaagaagtcctgcagaagcactttaacataagcaaaaatttgagatcgctgcacatgctcctgatgctcgctctgaaccgggtgaccgcctcccacccctttatgaccgctgtggatttgatggaagcttcacagctttgctcaatggattccaaagccaacatcgttcatggactcagcgtgctggagatatgtctgattatcgcaatgaagcacctgaacgacatttacgaggaagaaccgttcaacttccagatggtatataacgagttccagaaatttgtgcagcggaaggcacacagcgtgtacaacttcgaaaagccagtcgtcatgaaggcattcgagcacctccagcaattagagctgattaagcctatggaacggaccagcggcaattctcagcgggaataccagctcatgaagctgcttctggacaacacccagattatgaacgccctccaaaagtatccgaactgccccactgacgtacgacaatgggcaacaagcagtctctcatggctctag

SEQ ID NO: 129695 - DNA, 1311 bp, Artificial Sequence
  derived and/or modified sequence
atgagcagcagaaagagcaagagcaacagcctgatccacaccgagtgcctgagccaggtgcagagaatcctgagagagagattctgcagacagagcccccacagcaacctgttcggcgtgcaggtgcagtacaagcacctgagcgagctgctgaagagaaccgccctgcacggcgagagcaacagcgtgctgatcatcggccccagaggcagcggcaagaccatgctgatcaaccacgccctgaaggagctgatggagatcgaggaggtgagcgagaacgtgctgcaggtgcacctgaacggcctgctgcagatcaacgacaagatcgccctgaaggagatcaccagacagctgaacctggagaacgtggtgggcgacaaggtgttcggcagcttcgccgagaacctgagcttcctgctggaggccctgaagaagggcgacagaaccagcagctgccccgtgatcttcatcctggacgagttcgacctgttcgcccaccacaagaaccagaccctgctgtacaacctgttcgacatcagccagagcgcccagacccccatcgccgtgatcggcctgacctgcagactggacatcctggagctgctggagaagagagtgaagagcagattcagccacagacagatccacctgatgaacagcttcggcttcccccagtacgtgaagatcttcaaggagcagctgagcctgcccgccgagttccccgacaaggtgttcgccgagaagtggaacgagaacgtgcagtacctgagcgaggacagaagcgtgcaggaggtgctgcagaagcacttcaacatcagcaagaacctgagaagcctgcacatgctgctgatgctggccctgaacagagtgaccgccagccaccccttcatgaccgccgtggacctgatggaggccagccagctgtgcagcatggacagcaaggccaacatcgtgcacggcctgagcgtgctggagatctgcctgatcatcgccatgaagcacctgaacgacatctacgaggaggagcccttcaacttccagatggtgtacaacgagttccagaagttcgtgcagagaaaggcccacagcgtgtacaacttcgagaagcccgtggtgatgaaggccttcgagcacctgcagcagctggagctgatcaagcccatggagagaaccagcggcaacagccagagagagtaccagctgatgaagctgctgctggacaacacccagatcatgaacgccctgcagaagtaccccaactgccccaccgacgtgagacagtgggccaccagcagcctgagctggctgtag

SEQ ID NO: 129696 - DNA, 438 bp, Artificial Sequence
  derived and/or modified sequence
atgagcagcagaaagagcaagagcaacagcctgatccacaccgagtgcctgagccaggtgcagagaatcctgagagagagattctgcagacagagcccccacagcaacctgttcggcgtgcaggtgcagtacaagcacctgagcgagctgctgaagagaaccgccctgcacggcgagagcaacagcgtgctgatcatcggccccagaggcagcggcaagaccatgctgatcaaccacgccctgaaggagctgatggagatcgaggaggtgagcgagaacgtgctgcaggtgcacctgaacggcctgctgcagatcaacgacaagatcgccctgaaggagatcaccagacagctgaacctggagaacgtggtgggcgacaaggtgttcggcagcttcgccgagaacctgagcttcctgctggaggccctgaagaagtag

SEQ ID NO: 129697 - DNA, 384 bp, Artificial Sequence
  derived and/or modified sequence
atgagcagcagaaagagcaagagcaacagcctgatccacaccgagtgcctgagccaggtgcagagaatcctgagagagagattctgcagacagagcccccacagcaacctgttcggcgtgcaggtgcagtacaagcacctgagcgagctgctgaagagaaccgccctgcacggcgagagcaacagcgtgctgatcatcggccccagaggcagcggcaagaccatgctgatcaaccacgccctgaaggagctgatggagatcgaggaggtgagcgagaacgtgctgcaggtgcacctgaacggcctgctgcagatcaacgacaagatcgccctgaaggagatcaccagacagctgaacctggagaacgtggtgggcgacaagtag

SEQ ID NO: 129698 - DNA, 387 bp, Artificial Sequence
  derived and/or modified sequence
atgagcagcagaaagagcaagagcaacagcctgatccacaccgagtgcctgagccaggtgcagagaatcctgagagagagattctgcagacagagcccccacagcaacctgttcggcgtgcaggtgcagtacaagcacctgagcgagctgctgaagagaaccgccctgcacggcgagagcaacagcgtgctgatcatcggccccagaggcagcggcaagaccatgctgatcaaccacgccctgaaggagctgatggagatcgaggaggtgagcgagaacgtgctgcaggtgcacctgaacggcctgctgcagatcaacgacaagatcgccctgaaggagatcaccagacagctgaacctggagaacgtggtgggcgacaaggtgtag

SEQ ID NO: 129699 - protein, 435 aa, Artificial Sequence
  derived and/or modified sequence
MPHLENVVLCRESQVSILQSLFGERHHFSFPSIFIYGHTASGKTYVTQTLLKTLELPHVFVNCVECFTLRLLLEQILNKLNHLSSSEDGCSTEITCETFNDFVRLFKQVTTAENLKDQTVYIVLDKAEYLRDMEANLLPGFLRLQELADRNVTVLFLSEIVWEKFRPNTGCFEPFVLYFPDYSIGNLQKILSHDHPPEYSADFYAAYINILLGVFYTVCRDLKELRHLAVLNFPKYCEPVVKGEASERDTRKLWRNIEPHLKKAMQTVYLREISSSQWEKLQKDDTDPGQLKGLSAHTHVELPYYSKFILIAAYLASYNPARTDKRFFLKHHGKIKKTNFLKKHEKTSNHLLGPKPFPLDRLLAILYSIVDSRVAPTANIFSQITSLVTLQLLTLVGHDDQLDGPKYKCTVSLDFIRAIARTVNFDIIKYLYDFL

SEQ ID NO: 129700 - protein, 303 aa, Artificial Sequence
  derived and/or modified sequence
MEANLLPGFLRLQELADRNVTVLFLSEIVWEKFRPNTGCFEPFVLYFPDYSIGNLQKILSHDHPPEYSADFYAAYINILLGVFYTVCRDLKELRHLAVLNFPKYCEPVVKGEASERDTRKLWRNIEPHLKKAMQTVYLREISSSQWEKLQKDDTDPGQLKGLSAHTHVELPYYSKFILIAAYLASYNPARTDKRFFLKHHGKIKKTNFLKKHEKTSNHLLGPKPFPLDRLLAILYSIVDSRVAPTANIFSQITSLVTLQLLTLVGHDDQLDGPKYKCTVSLDFIRAIARTVNFDIIKYLYDFL

SEQ ID NO: 129701 - DNA, 1308 bp, Artificial Sequence
  derived and/or modified sequence
atgccccatctcgaaaacgtggtgctctgcagggaaagccaggtgagcatcctccagagcttatttggcgaaagacatcacttctcctttccaagcatcttcatttacggccacacagccagcggcaaaacctatgtcacccagaccctcctgaaaaccctcgagcttccgcatgtgttcgtgaactgtgtcgagtgttttactcttcgtctactgctcgagcagatcctgaataagttaaatcatttgtctagcagtgaggacggctgctctactgagattacatgtgaaacctttaatgattttgtgcggctctttaagcaggtcacaaccgcggagaatttaaaggaccagaccgtgtacatcgtgctggacaaggctgagtatctgagagatatggaagcaaacctgctgccagggtttctgcggctgcaggagctggcagaccgaaacgtgactgtcctgtttctcagcgaaatcgtatgggagaaatttaggcctaacacaggatgctttgagccgtttgtcctctacttcccagactactcaatcggaaatctgcagaagatcctgagtcacgaccacccaccagagtacagcgcagacttctacgccgcttacatcaacattctgcttggcgtcttttacaccgtgtgccgcgatctgaaggagcttaggcatcttgcggtgctcaactttccgaaatattgtgaacctgtggttaaaggagaggcgtcagaaagagatacaaggaaactctggcgaaatattgaaccacacctgaaaaaggctatgcagactgtgtatttgcgggaaatctcttcctctcagtgggagaaactccagaaggacgataccgacccaggccagctgaaaggactctccgcgcacacacacgttgagctgccttactatagcaaatttatattgattgccgcctatctggcctcttataaccctgccagaacagacaagcgtttctttctgaagcaccacggcaaaatcaagaagaccaacttcttaaagaagcacgagaagacttctaatcacctcctagggcccaagccctttccattagatagacttctggccattttgtattctatcgtggactcccgcgtggcaccaaccgcgaacatctttagtcaaatcacctctctggtaactctgcagctgctgacactggtcgggcacgacgaccagttggatgggcccaagtataagtgtaccgtgtccctcgattttatccgcgccatagctcggactgtgaactttgacatcattaaatatctgtatgactttctgtag

SEQ ID NO: 129702 - DNA, 912 bp, Artificial Sequence
  derived and/or modified sequence
atggaagctaatctcctccccggtttcctcaggctacaagaactggctgaccgaaacgtgaccgttttattcctctcagagatcgtctgggaaaaattcaggccaaataccggatgtttcgagccgttcgtactgtacttccccgactactctatcggcaatctgcagaaaatcttgtcccatgaccatccccctgaatattcagccgacttttacgctgcatacatcaacattctattgggtgtattctatacggtgtgtcgggatctgaaggaactccgccatctggcagtactgaatttccctaagtactgtgaacccgtggtgaagggcgaggcatctgaacgcgacacacggaagttatggcgcaacattgagccgcatctaaaaaaggctatgcagactgtgtacctccgagaaatctcgtcgtcccagtgggagaagctgcagaaggacgacactgaccctgggcaactgaaagggttaagcgctcacactcacgtggaactgccctattactcaaaatttatcttaattgcagcctacctggcctcctacaaccctgctcggacagacaagcgcttcttcctgaagcatcacggcaaaataaaaaaaacaaacttcctgaagaagcatgagaaaactagcaaccatttgctcggccctaagccctttcctttagatagactgttggccatcttgtatagtatcgtggattctagggtggcacccacagcaaatatcttctcacaaatcacctccctcgttactctgcagttactcactctcgtgggacacgacgatcagctggatggacccaaatataagtgcacagtgtccctcgatttcatccgggccatcgcgcgaactgtgaacttcgacataataaaatatctctacgacttcctgtag

SEQ ID NO: 129703 - DNA, 1308 bp, Artificial Sequence
  derived and/or modified sequence
atgccccacctggagaatgtggtgctgtgccgggagagccaggtgtccatcctgcagagcctgtttggagagcggcaccacttctccttccccagcatcttcatctacggccacacagccagcggcaagacctacgtgacccagaccctgctgaagaccctggagctgccccacgtgtttgtgaactgtgtggagtgcttcaccctgcggctgctgctggagcagatcctgaacaagctgaaccacctgagcagcagtgaagatggctgcagcacagagatcacctgtgagaccttcaatgactttgtgcggctcttcaagcaggtgaccacagctgagaacctgaaggaccagacagtgtacatcgtgctggacaaggccgagtacctgcgggacatggaggccaacctgctgcccggcttcctgcggctgcaggagctggccgacagaaatgtgacagtgctcttcctgtctgagatcgtgtgggagaagttccggcccaacacaggctgctttgagccctttgtgctgtacttcccagactacagcatcggcaacctgcagaagatcctgagccatgaccaccccccagagtacagcgctgacttctatgctgcctacatcaacatcctgctgggcgtcttctacacagtgtgccgggacctgaaggagctgcggcacctggccgtgctgaacttccccaagtactgtgagcctgtggtgaagggggaggccagcgagcgggacaccaggaagctgtggagaaatattgagccccacctgaagaaggccatgcagacagtgtacctgcgggagatcagcagcagccagtgggagaagctgcagaaggatgacacagaccccggccagctgaagggcctgagcgcccacacccacgtggagctgccctactacagcaagttcatcctgattgctgcctacctggccagctacaacccagccaggacagacaagcgcttcttcctgaagcaccacggcaagatcaagaagaccaacttcctgaagaagcatgagaagaccagcaaccacctgctgggccccaagcccttccccctggaccggctgctggccatcctgtacagcatcgtggacagccgggtggcccccacagccaacatcttcagccagatcaccagcctggtgaccctgcagctgctgaccctggtgggccatgatgaccagctggatggccccaagtacaagtgcaccgtgtccctggacttcatccgggccatcgccaggacagtgaactttgacatcatcaagtacctgtatgacttcctgtag

SEQ ID NO: 129704 - DNA, 912 bp, Artificial Sequence
  derived and/or modified sequence
atggaggccaacctgctgcccggcttcctgcggctgcaggagctggccgacagaaatgtgacagtgctcttcctgtctgagatcgtgtgggagaagttccggcccaacacaggctgctttgagccctttgtgctgtacttcccagactacagcatcggcaacctgcagaagatcctgagccatgaccaccccccagagtacagcgctgacttctatgctgcctacatcaacatcctgctgggcgtcttctacacagtgtgccgggacctgaaggagctgcggcacctggccgtgctgaacttccccaagtactgtgagcctgtggtgaagggggaggccagcgagcgggacaccaggaagctgtggagaaatattgagccccacctgaagaaggccatgcagacagtgtacctgcgggagatcagcagcagccagtgggagaagctgcagaaggatgacacagaccccggccagctgaagggcctgagcgcccacacccacgtggagctgccctactacagcaagttcatcctgattgctgcctacctggccagctacaacccagccaggacagacaagcgcttcttcctgaagcaccacggcaagatcaagaagaccaacttcctgaagaagcatgagaagaccagcaaccacctgctgggccccaagcccttccccctggaccggctgctggccatcctgtacagcatcgtggacagccgggtggcccccacagccaacatcttcagccagatcaccagcctggtgaccctgcagctgctgaccctggtgggccatgatgaccagctggatggccccaagtacaagtgcaccgtgtccctggacttcatccgggccatcgccaggacagtgaactttgacatcatcaagtacctgtatgacttcctgtag

SEQ ID NO: 129705 - DNA, 1308 bp, Artificial Sequence
  derived and/or modified sequence
atgccccacctggagaacgtggtgctgtgccgggagagccaggtgtctatcctgcaatcactgttcggggagcggcatcatttttctttcccctccatttttatttacggccatacagcgagtggtaagacgtacgttacccagactcttctgaagacattagagctgccccacgtctttgtgaactgcgtggaatgcttcacgcttcgcctcctacttgaacagattttaaacaaactgaatcacctgagcagctccgaggacggctgcagtacagagatcacctgcgagactttcaacgacttcgtacggctatttaagcaggtaacaaccgcagaaaatctaaaagaccaaactgtgtacattgttttagacaaagcagaatacctgcgggacatggaggccaatctcttgcctggctttctgcgcctgcaggagctcgcagatagaaacgtaacagtgctgtttctgagtgagatcgtctgggagaaatttcggcctaacacaggatgcttcgaacccttcgtgttgtattttcccgactatagcattggcaatctgcaaaaaattctcagccacgaccacccccccgagtacagcgcagacttttatgcagcatatattaatattttgctcggggtgttttatacagtatgcagggatttgaaggagctccgacatctcgccgtcctgaatttcccaaagtactgtgagcccgtggttaaaggcgaggcctccgaaagagatacccgcaagctgtggaggaacatcgagcctcacctgaagaaggccatgcaaaccgtgtacttgagagaaatctcgagttcccagtgggagaaactccaaaaggacgatacagatccaggtcaactgaagggactctcagcccacacccacgttgagctgccctattactctaaatttatcctgatcgcagcttatctggcatcgtacaacccagccaggaccgataaacggttcttcctcaagcaccacggcaagatcaaaaaaactaactttctgaagaaacatgagaaaactagcaaccatctgctcggccccaagcctttcccgttggatagattgctcgcaatcctatacagtatagtggatagccgtgtagctcctactgctaacatttttagtcagataacttccttggtaaccctgcagctcctgacactggtgggccacgatgatcagctcgatggacccaaatacaaatgtacagtgtcgctggattttattcgagctattgctcgtactgtgaatttcgacataatcaagtatctgtatgactttctgtag

SEQ ID NO: 129706 - DNA, 912 bp, Artificial Sequence
  derived and/or modified sequence
atggaggccaacctgctgcccggcttcctgcggctgcaggagctggcagaccgcaacgtgacagttctgttcctgagtgaaatcgtgtgggagaagttccggcctaataccggttgtttcgagcccttcgttttgtattttcctgactactccatcggcaacctgcagaaaatactgagccatgatcatccgcctgaatactcagcagatttctacgccgcctacattaacatcctactgggcgtgttctacacggtgtgccgggacctgaaggagctgaggcatctcgccgttttgaatttccccaagtactgcgagcccgtagtgaagggtgaagcatcggaacgagacacacgcaagctttggagaaatatagagccccatctgaagaaagccatgcaaactgtgtacttaagagaaatttctagctcacagtgggagaagctgcagaaagacgacacagaccccggacaactgaagggcctgtccgcccacacccatgtcgaactaccatattattctaaatttatacttattgccgcctatttggcctcatacaaccccgcccggacggataagcggtttttcctaaagcaccacggaaagattaagaagaccaattttttaaaaaagcatgaaaaaacctccaaccaccttctaggccccaaacctttccccttagatagactcctggctattctttattctatagtggattctcgggtcgctcccacagcaaacatattctcccagatcacttcattggtcaccctgcagttattgactctggttggacacgatgatcagttggacggaccaaagtataagtgcacggtgtccttagactttatcagggccatcgcccgaacggtgaacttcgatattatcaagtacctgtacgactttttgtag

SEQ ID NO: 129707 - DNA, 1958 bp, Artificial Sequence
  derived and/or modified sequence
agcccggcagcgcaggctcctcccacgacgctgcgggtccggtttccggcgggagcgtgggccgccagactcgggagaggctccgtcttgtgcaagggtcctgtgggctggctgcactggcctctgcggtggtgcctgccagaatgccccacttggaaaacgtggtgctttgtcgcgagtctcaagtgtccatcttgcagtccttgtttggagagagacatcatttcagctttccatccatttttatttatggacatactgctagtggaaagacctatgtaacacaaacgttgttgaaaactttagagctcccacatgtgtttgtgaattgtgttgaatgctttacattgaggctgcttttggaacaaattttaaacaaattgaatcatcttagttcttcagaggatggatgttctactgaaataacctgtgaaacatttaatgactttgttcgcttgtttaaacaagtaaccacagctgaaaatcttaaagatcagactgtatatattgttctagataaagcagagtatctaagagatatggaagcaaatcttttgcctggatttcttagattacaagaattggctgacagaaatgtgactgttctctttctcagtgaaattgtttgggaaaagtttcgtccaaatactggatgctttgagccgtttgtcttatatttccctgattacagcataggcaaccttcaaaagatcctgtcccatgatcatcctccagagtattcagctgatttctatgctgcctacattaacattcttcttggagttttctacactgtttgtcgagatttgaaagagctcagacatctggcagtacttaattttcctaaatattgtgaacccgtggttaaaggagaagcaagtgaacgtgatactcgcaaactgtggagaaatattgaacctcatttgaagaaagctatgcagactgtttatctcagggaaatatcaagttcccagtgggaaaagctacagaaagatgacacagatccggggcaactgaaaggcctctcagcgcatactcatgtggaacttccatattactctaagttcattctaattgctgcataccttgcttcatacaatccagcaagaactgacaagaggttttttcttaagcatcatggaaaaatcaagaaaaccaactttctaaaaaaacacgaaaagacaagcaatcatctccttgggccaaaaccatttccactagacagattattagcaatattatatagtatcgtggacagcagagttgctccaacagcaaatattttttcccagattacctctctagtgacccttcagctgttaaccctggttggccatgacgatcagcttgatggaccaaaatacaaatgcacagtgtctctagacttcatcagagctattgcaaggacggtgaactttgacataataaaatacttgtatgatttcttgtgaaaacaagcttcaaagccatatggacactgtgacaatgactaagccaagctgtgttcatccagctacttagctggccaaggagaggagttctttggctctattggatttgtccaaacaggtgctggcccagcatggaatctgatgaaaatattctgattggtctgggtggatgtgagcagaagactatttaccagggaccctggagtatttggaagcaacgtgttaattataaacagcagggtttgagcacaatctgttctactcttaatgatgttatcttaacactgaaattgcctgaaacccatttacttaggactacattttgctctgtgaactatcccctgcgctttgaacgtgccagcagcccttgtttatatgcccattcttttcacttcctctccacaggagcctctgcagtcgcttgccaaagcagattttcctaaggccactgttttaaaagatcatagttgcaaaatataataaatacaagttctttttaaaatccaa

SEQ ID NO: 129708 - DNA, 2043 bp, Artificial Sequence
  derived and/or modified sequence
ggcgggagcgtgggccgccagactcgggagaggctccgtcttgtgcaagggtcctgtgggctggctgcactggcctctgcggtggtgcctgccagaatgccccacttggaaaacgtggtgctttgtcgcgagtctcaagtgtccatcttgcagtccttgtttggagagagacatcatttcagctttccatccatttttatttatggacatactgctagtggaaagacctatgtaacacaaacgttgttgaaaactttagagggactcagacaggcacttagaatatgctgcctttaaaagtcatggatggtacaaatgccgtaagcaagacactattcataacagagatgttgtggacttttgttcttaaaggacagtaaaggagtgagagagaactcccacatgtgtttgtgaattgtgttgaatgctttacattgaggctgcttttggaacaaattttaaacaaattgaatcatcttagttcttcagaggatggatgttctactgaaataacctgtgaaacatttaatgactttgttcgcttgtttaaacaagtaaccacagctgaaaatcttaaagatcagactgtatatattgttctagataaagcagagtatctaagagatatggaagcaaatcttttgcctggatttcttagattacaagaattggctgacagaaatgtgactgttctctttctcagtgaaattgtttgggaaaagtttcgtccaaatactggatgctttgagccgtttgtcttatatttccctgattacagcataggcaaccttcaaaagatcctgtcccatgatcatcctccagagtattcagctgatttctatgctgcctacattaacattcttcttggagttttctacactgtttgtcgagatttgaaagagctcagacatctggcagtacttaattttcctaaatattgtgaacccgtggttaaaggagaagcaagtgaacgtgatactcgcaaactgtggagaaatattgaacctcatttgaagaaagctatgcagactgtttatctcagggaaatatcaagttcccagtgggaaaagctacagaaagatgacacagatccggggcaactgaaaggcctctcagcgcatactcatgtggaacttccatattactctaagttcattctaattgctgcataccttgcttcatacaatccagcaagaactgacaagaggttttttcttaagcatcatggaaaaatcaagaaaaccaactttctaaaaaaacacgaaaagacaagcaatcatctccttgggccaaaaccatttccactagacagattattagcaatattatatagtatcgtggacagcagagttgctccaacagcaaatattttttcccagattacctctctagtgacccttcagctgttaaccctggttggccatgacgatcagcttgatggaccaaaatacaaatgcacagtgtctctagacttcatcagagctattgcaaggacggtgaactttgacataataaaatacttgtatgatttcttgtgaaaacaagcttcaaagccatatggacactgtgacaatgactaagccaagctgtgttcatccagctacttagctggccaaggagaggagttctttggctctattggatttgtccaaacaggtgctggcccagcatggaatctgatgaaaatattctgattggtctgggtggatgtgagcagaagactatttaccagggaccctggagtatttggaagcaacgtgttaattataaacagcagggtttgagcacaatctgttctactcttaatgatgttatcttaacactgaaattgcctgaaacccatttacttaggactacattttgctctgtgaactatcccctgcgctttgaacgtgccagcagcccttgtttatatgcccattcttttcacttcctctccacaggagcctctgcagtcgcttgccaaagcagattttcctaaggccactgttttaaaagatcatagttgcaaaatataataaatacaagttctttttaaaatcc

SEQ ID NO: 129709 - DNA, 1308 bp, Artificial Sequence
  derived and/or modified sequence
atgccccacctggagaatgtggtgctttgtcgggagtcccaagtcagcatccttcagtcacttttcggcgagcgtcaccattttagctttccttctatctttatctatggccacacagcatctggcaagacttatgtaacccagacactcctcaagaccctggaacttccccatgtttttgtgaactgcgtagaatgctttacgttgcggctgctcctagaacagatactgaataaactcaatcacttgagtagctctgaggatggttgcagcacggagatcacctgcgagaccttcaatgatttcgtgaggctgttcaaacaagttactactgccgaaaatctgaaagatcagaccgtgtacattgtcctcgataaagctgagtatctacgcgacatggaagccaaccttctgccagggttcttgcgactccaggagctcgctgaccgcaacgttactgttctattcctatccgaaatcgtgtgggagaaatttaggcctaacaccggatgcttcgagcctttcgtcctgtactttccggactacagtatcggcaatctgcagaagattctgtctcacgatcatccaccggagtactccgctgacttctacgctgcctacattaacatcctgctaggagtgttctacaccgtgtgtagagatctcaaagagctcaggcacctggccgttctgaactttcccaaatattgcgagcctgtcgttaagggcgaggcaagtgagagggatacaagaaaactttggcgcaatattgagccccaccttaaaaaagctatgcagaccgtctacctgagggagatctccagctcccagtgggagaaactccaaaaagacgatacggacccagggcagctcaaagggctctctgcgcatacacacgttgagctgccctattacagcaaatttatcctgatcgcggcatacctcgcctcatataacccagctcggactgacaagagatttttcttgaagcaccatggaaaaatcaagaagacgaattttttgaagaagcatgaaaaaacttccaatcatctactgggaccaaagccatttcccctggacaggttgctcgctatcctgtacagcattgtggactcccgggtggctccaaccgctaacatcttctctcagatcacaagtctggtcacattgcagctcctgacgttggtgggacacgacgaccagttggatggaccaaagtacaaatgtactgtgtccctagatttcatccgagccatcgcgcgaactgtgaacttcgatattatcaagtacctgtacgacttcctgtag

SEQ ID NO: 129710 - DNA, 912 bp, Artificial Sequence
  derived and/or modified sequence
atggaggcaaacctgctgcctggcttcctccggctgcaggagcttgccgataggaatgtgactgtgctgttcctgtctgagatcgtttgggagaaatttcgacctaatactgggtgcttcgagccatttgttttatacttcccagattattctatcggaaacctccagaaaatattgagtcatgaccaccctccagaatattccgcagacttctacgccgcatacataaatatccttttgggtgtgttctatactgtatgccgggacctgaaagaactccgacacttggcggtcctcaacttccctaagtactgcgagcccgtggtcaaaggagaggcctctgaacgggacactcgcaagctgtggcgaaatattgagcctcatctgaagaaagcaatgcagaccgtctacctcagagagatttcctcctctcagtgggagaaactccagaaagatgacactgaccctggccagcttaaaggcctgtccgcccacacacatgtcgaactgccttactattcgaagttcatccttatcgccgcatatttggccagctacaacccagcacgcaccgataagagattctttctgaaacatcacgggaagataaaaaagaccaatttcctcaaaaaacacgaaaaaacctccaaccaccttcttggacctaagccttttcctttagaccgcctactcgccatcctgtattccattgtggactcccgagtcgccccaacggcaaacatattttcacagatcactagcttggttacgctgcagttactgacattggtgggccacgatgaccagctggacggtccaaagtacaaatgcacggtgtccctcgatttcatccgcgctatcgccagaacggttaactttgatatcatcaagtacttgtatgattttctgtag

SEQ ID NO: 129711 - DNA, 1308 bp, Artificial Sequence
  derived and/or modified sequence
atgccccacctggagaacgtggtgctgtgcagagagagccaggtgagcatcctgcagagcctgttcggcgagagacaccacttcagcttccccagcatcttcatctacggccacaccgccagcggcaagacctacgtgacccagaccctgctgaagaccctggagctgccccacgtgttcgtgaactgcgtggagtgcttcaccctgagactgctgctggagcagatcctgaacaagctgaaccacctgagcagcagcgaggacggctgcagcaccgagatcacctgcgagaccttcaacgacttcgtgagactgttcaagcaggtgaccaccgccgagaacctgaaggaccagaccgtgtacatcgtgctggacaaggccgagtacctgagagacatggaggccaacctgctgcccggcttcctgagactgcaggagctggccgacagaaacgtgaccgtgctgttcctgagcgagatcgtgtgggagaagttcagacccaacaccggctgcttcgagcccttcgtgctgtacttccccgactacagcatcggcaacctgcagaagatcctgagccacgaccacccccccgagtacagcgccgacttctacgccgcctacatcaacatcctgctgggcgtgttctacaccgtgtgcagagacctgaaggagctgagacacctggccgtgctgaacttccccaagtactgcgagcccgtggtgaagggcgaggccagcgagagagacaccagaaagctgtggagaaacatcgagccccacctgaagaaggccatgcagaccgtgtacctgagagagatcagcagcagccagtgggagaagctgcagaaggacgacaccgaccccggccagctgaagggcctgagcgcccacacccacgtggagctgccctactacagcaagttcatcctgatcgccgcctacctggccagctacaaccccgccagaaccgacaagagattcttcctgaagcaccacggcaagatcaagaagaccaacttcctgaagaagcacgagaagaccagcaaccacctgctgggccccaagcccttccccctggacagactgctggccatcctgtacagcatcgtggacagcagagtggcccccaccgccaacatcttcagccagatcaccagcctggtgaccctgcagctgctgaccctggtgggccacgacgaccagctggacggccccaagtacaagtgcaccgtgagcctggacttcatcagagccatcgccagaaccgtgaacttcgacatcatcaagtacctgtacgacttcctgtag

SEQ ID NO: 129712 - DNA, 912 bp, Artificial Sequence
  derived and/or modified sequence
atggaggccaacctgctgcccggcttcctgagactgcaggagctggccgacagaaacgtgaccgtgctgttcctgagcgagatcgtgtgggagaagttcagacccaacaccggctgcttcgagcccttcgtgctgtacttccccgactacagcatcggcaacctgcagaagatcctgagccacgaccacccccccgagtacagcgccgacttctacgccgcctacatcaacatcctgctgggcgtgttctacaccgtgtgcagagacctgaaggagctgagacacctggccgtgctgaacttccccaagtactgcgagcccgtggtgaagggcgaggccagcgagagagacaccagaaagctgtggagaaacatcgagccccacctgaagaaggccatgcagaccgtgtacctgagagagatcagcagcagccagtgggagaagctgcagaaggacgacaccgaccccggccagctgaagggcctgagcgcccacacccacgtggagctgccctactacagcaagttcatcctgatcgccgcctacctggccagctacaaccccgccagaaccgacaagagattcttcctgaagcaccacggcaagatcaagaagaccaacttcctgaagaagcacgagaagaccagcaaccacctgctgggccccaagcccttccccctggacagactgctggccatcctgtacagcatcgtggacagcagagtggcccccaccgccaacatcttcagccagatcaccagcctggtgaccctgcagctgctgaccctggtgggccacgacgaccagctggacggccccaagtacaagtgcaccgtgagcctggacttcatcagagccatcgccagaaccgtgaacttcgacatcatcaagtacctgtacgacttcctgtag

SEQ ID NO: 129713 - protein, 807 aa, Artificial Sequence
  derived and/or modified sequence
MAATELRGVVGPGPAAIAALGGGGAGPPVVGGGGGRGDAGPGSGAASGTVVAAAAGGPGPGAGGVAAAGPAPAPPTGGSGGSGAGGSGSAREGWLFKWTNYIKGYQRRWFVLSNGLLSYYRSKAEMRHTCRGTINLATANITVEDSCNFIISNGGAQTYHLKASSEVERQRWVTALELAKAKAVKMLAESDESGDEESVSQTDKTELQNTLRTLSSKVEDLSTCNDLIAKHGTALQRSLSELESLKLPAESNEKIKQVNERATLFRITSNAMINACRDFLMLAQTHSKKWQKSLQYERDQRIRLEETLEQLAKQHNHLERAFRGATVLPANTPGNVGSGKDQCCSGKGDMSDEDDENEFFDAPEIITMPENLGHKRTGSNISGASSDISLDEQYKHQLEETKKEKRTRIPYKPNYSLNLWSIMKNCIGKELSKIPMPVNFNEPLSMLQRLTEDLEYHELLDRAAKCENSLEQLCYVAAFTVSSYSTTVFRTSKPFNPLLGETFELDRLEENGYRSLCEQVSHHPPAAAHHAESKNGWTLRQEIKITSKFRGKYLSIMPLGTIHCIFHATGHHYTWKKVTTTVHNIIVGKLWIDQSGEIDIVNHKTGDKCNLKFVPYSYFSRDVARKVTGEVTDPSGKVHFALLGTWDEKMECFKVQPVIGENGGDARQRGHEAEESRVMLWKRNPLPKNAENMYYFSELALTLNAWESGTAPTDSRLRPDQRLMENGRWDEANAEKQRLEEKQRLSRKKREAEAMKATEDGTPYDPYKALWFERKKDPVTKELTHIYRGEYWECKEKQDWSSCPDIF

SEQ ID NO: 129714 - protein, 407 aa, Artificial Sequence
  derived and/or modified sequence
MAATELRGVVGPGPAAIAALGGGGAGPPVVGGGGGRGDAGPGSGAALQRLTEDLEYHELLDRAAKCENSLEQLCYVAAFTVSSYSTTVFRTSKPFNPLLGETFELDRLEENGYRSLCEQVSHHPPAAAHHAESKNGWTLRQEIKITSKFRGKYLSIMPLGTIHCIFHATGHHYTWKKVTTTVHNIIVGKLWIDQSGEIDIVNHKTGDKCNLKFVPYSYFSRDVARKVTGEVTDPSGKVHFALLGTWDEKMECFKVQPVIGENGGDARQRGHEAEESRVMLWKRNPLPKNAENMYYFSELALTLNAWESGTAPTDSRLRPDQRLMENGRWDEANAEKQRLEEKQRLSRKKREAEAMKATEDGTPYDPYKALWFERKKDPVTKELTHIYRGEYWECKEKQDWSSCPDIF

SEQ ID NO: 129715 - DNA, 2424 bp, Artificial Sequence
  derived and/or modified sequence
atggctgctactgagctacgcggtgtggtcggaccaggccctgcagcaattgcagctctaggcggcgggggtgccggacctccggtagtcgggggggggggcggtaggggcgacgccgggccgggcagcggggctgcctcaggaacggtggtggctgccgcggcaggaggccctggtcctggagccggcggagtggctgcggcaggaccagcacctgcacctcctacaggaggcagcggcggaagcggagctggaggaagtggttccgccagggaaggttggctttttaaatggactaattacataaagggatatcaaagacgctggtttgttctttccaatggactcctgtcctattatcggagtaaggctgagatgagacacacatgtagaggtaccatcaacctggccaccgctaacattaccgtagaagacagctgcaattttattattagtaatggtggcgcgcagacctatcatctgaaggcaagcagcgaggtggagcgccagcgttgggttactgctcttgaactagctaaagcaaaagctgtcaagatgctcgctgagagcgacgagtccggcgatgaagaatccgtcagtcaaactgataagacggagttgcaaaacactctcaggaccctgagctcaaaggtcgaagatctgtctacctgcaacgacttaatcgcaaaacacgggacagctctgcagcgcagtcttagtgaactggagtcactgaaactccccgccgaatctaacgaaaaaatcaagcaggtcaatgagcgcgcaacgctgtttagaattacatcgaacgccatgatcaatgcatgtcgagactttctgatgctggcgcagacacacagcaagaaatggcaaaaatccctgcagtatgaacgagaccagcgtattcgcttggaagagaccctcgaacagctggccaagcagcacaatcatctcgaaagggccttccgtggtgctactgtgctgcctgctaacacgccaggaaacgtgggctcaggcaaagaccagtgctgctctgggaagggagatatgagcgatgaagacgatgaaaatgaattctttgatgcaccagagattatcacaatgcccgaaaacttagggcacaagagaacaggctctaatatttctggagcgtcatctgacatctctctcgacgagcagtataagcatcagttagaagagactaaaaaggagaagcgtacccgcattccctataagccaaactactccctgaatttgtggagtataatgaaaaactgcattggtaaagagttgtctaagattcctatgccagtcaacttcaatgaaccattgtcaatgttacagcggctcaccgaggacctggaatatcatgaacttttagaccgggccgctaagtgtgagaactcactggaacagctatgttacgtggcggcgttcacggtgtcgtcatactcaacaactgtgtttcggacctctaaacctttcaacccgctgttgggggagacattcgaactggataggctcgaggagaacggatatagatctctgtgtgaacaggtcagccaccaccctccagctgcggcgcatcacgccgagtcaaagaatggatggactttgcgacaggagatcaagatcacgtcaaagttcagaggcaagtacctaagtatcatgccgctggggaccatccactgtatctttcatgctaccggccaccattacacatggaagaaagtgacaacaacagtgcacaacatcattgtgggtaaactgtggattgaccagtccggtgagatcgacattgtgaatcacaagactggtgacaaatgcaatttgaagtttgtgccatactcttacttctctagggacgttgctaggaaggtcactggtgaagtaactgatcctagtggcaaagtccacttcgcccttctggggacttgggacgaaaagatggaatgtttcaaagtgcaacccgtcatcggggaaaatgggggggacgccaggcagcgcggacatgaagctgaagagtcgcgggtaatgctttggaaacggaatccactgcctaagaacgccgaaaatatgtattactttagcgaactggcactgactctcaatgcatgggaaagcggaaccgccccgacagatagtcgcctgaggcctgaccagagactcatggaaaatgggcgttgggacgaggccaatgctgaaaaacagagactcgaggagaaacagcgcctaagcagaaaaaaaagggaggccgaagccatgaaagctacagaggacggcacgccttatgacccttataaggcactttggttcgagaggaaaaaggatccggtgactaaagagctgacacacatctaccggggtgaatattgggaatgcaaggaaaagcaggattggagctcgtgcccagacattttctag

SEQ ID NO: 129716 - DNA, 1224 bp, Artificial Sequence
  derived and/or modified sequence
atggccgctacagagcttcggggagtggtcggtccagggcctgccgccattgctgcactcggggggggtggagccgggccaccagtggtgggcgggggcgggggaagaggcgacgcaggaccgggttctggtgctgccctccagagattgacagaggatctggaataccacgagctattggaccgggcggccaagtgtgaaaactccctggaacagctgtgctacgtggcggcttttacagtcagtagttactcaaccaccgtctttaggaccagcaagcccttcaatcccttacttggcgaaacctttgagctggacagactcgaggaaaacggttacaggtcgctatgtgaacaggtgagtcatcaccctcctgcagccgcccatcacgccgaatctaaaaacggctggactctgcggcaagagatcaagatcacatctaaatttcgtggaaagtatctgagcattatgcccctcggcaccatccactgcattttccatgctaccggtcaccattacacgtggaagaaggttacgacaacagtccataatatcattgtaggcaagctgtggatcgaccagtcaggcgaaatcgatattgtcaaccacaaaactggcgataaatgcaacctcaaatttgtgccctattcttactttagccgcgacgtagccagaaaagtgaccggggaggtcacagatccatccggcaaagtgcacttcgctttactcggaacctgggacgaaaaaatggaatgcttcaaagtccaacctgtcatcggcgaaaacggaggcgacgcgcggcaaagggggcacgaggctgaggagagtagagtaatgttgtggaagcggaatcccctgcctaaaaacgccgagaatatgtattatttcagcgagctggctctcaccttaaatgcttgggaaagcggaaccgcaccgacagactctcgcttgcgcccagatcagaggcttatggagaatggtcgatgggacgaagccaacgctgaaaagcagcgcttagaggagaaacagaggctcagccgcaagaagcgggaggccgaggctatgaaagccaccgaagacggcaccccttacgacccatacaaggccctgtggttcgaaaggaaaaaggatcccgttaccaaggaactgacccatatctataggggagagtactgggaatgtaaggagaagcaggattggtcttcctgcccagacatcttctag

SEQ ID NO: 129717 - DNA, 2424 bp, Artificial Sequence
  derived and/or modified sequence
atggccgccacagagctgcggggcgtggtgggccctggccctgctgccatcgccgccctgggcggcggcggggccggcccccctgtggtgggcggcggcggcggcagaggagatgctggccctggcagcggggccgccagcggcaccgtggtggccgctgctgctgggggccctggccctggggccggcggcgtggccgccgccggccctgccccagccccacccaccggcggcagcggcggcagcggggccggcggcagcggcagcgcccgggagggctggctgttcaagtggaccaactacatcaagggctaccagaggcgctggtttgtgctgagcaatggcctgctgagctactaccgcagcaaggccgagatgaggcacacctgccggggcaccatcaacctggccacagccaacatcaccgtggaggacagctgcaacttcatcatcagcaatggaggagcccagacctaccacctgaaggccagcagcgaggtggagcggcagcgctgggtgacagccctggagctggccaaggccaaggctgtgaagatgctggccgagagtgatgaaagtggagatgaggagagcgtgtcccagacagacaagacagagctgcagaacaccctgcggaccctgagcagcaaggtggaggacctgagcacctgcaatgacctgattgccaagcatggaacagccctgcagaggagcctgtctgagctggagagcctgaagctgcctgctgagagcaatgagaagatcaagcaggtgaatgaaagagccaccctcttccgcatcaccagcaatgccatgatcaatgcctgccgggacttcctgatgctggcccagacccacagcaagaagtggcagaagagcctgcagtatgaaagagaccagaggatccggctggaggagaccctggagcagctggccaagcagcacaaccacctggagcgggccttccggggggccaccgtgctgcctgccaacaccccaggaaatgtgggcagcggcaaggaccagtgctgcagcgggaaaggagacatgtctgatgaagatgatgaaaatgagttctttgatgcccctgagatcatcaccatgcctgagaacctgggccacaagaggacaggcagcaacatcagcggggccagcagtgacatcagcctggatgagcagtacaagcaccagctggaggagaccaagaaggagaagaggacccgcatcccctacaagcccaactacagcctgaacctgtggagcatcatgaagaactgcatcggcaaggagctgagcaagatccccatgcctgtgaacttcaatgagcccctgtccatgctgcagaggctgacagaggacctggagtaccacgagctgctggacagagctgccaagtgtgagaacagcctggagcagctgtgctacgtggccgccttcaccgtgtcctcctacagcaccaccgtcttccgcaccagcaagcccttcaaccccctgctgggggagacctttgagctggaccggctggaggagaatggctaccgcagcctgtgtgagcaggtgagccaccaccccccagctgctgcccaccacgccgagagcaagaatggctggaccctgcggcaggagatcaagatcaccagcaagttccggggcaagtacctgagcatcatgcccctgggcaccatccactgcatcttccacgccaccggccaccactacacctggaagaaggtgaccaccaccgtgcacaacatcatcgtgggcaagctgtggattgaccagagcggggagattgacatcgtgaaccacaagacaggagacaagtgcaacctgaagtttgtgccctacagctacttcagcagagatgtggccaggaaggtgactggagaggtgacagaccccagcggcaaggtgcactttgccctgctgggcacctgggatgagaagatggagtgcttcaaggtgcagcctgtgattggagaaaatggaggagatgcccggcagaggggccatgaagctgaggagagccgggtgatgctgtggaagaggaaccccctgcccaagaatgctgagaacatgtactacttcagcgagctggccctgaccctgaatgcctgggagagcggcacagcccccacagacagccggctgcggccagaccagaggctgatggagaatggccgctgggatgaggccaatgctgagaagcagaggctggaggagaagcagaggctgagcaggaagaagcgggaggccgaggccatgaaggccacagaagatggcaccccctatgacccctacaaggccctgtggtttgagaggaagaaggaccctgtgaccaaggagctgacccacatctacagaggagagtactgggagtgcaaggagaagcaggactggagcagctgcccagacatcttctag

SEQ ID NO: 129718 - DNA, 1224 bp, Artificial Sequence
  derived and/or modified sequence
atggccgccacagagctgcggggcgtggtgggccctggccctgctgccatcgccgccctgggcggcggcggggccggcccccctgtggtgggcggcggcggcggcagaggagatgctggccctggcagcggggccgccctgcagaggctgacagaggacctggagtaccacgagctgctggacagagctgccaagtgtgagaacagcctggagcagctgtgctacgtggccgccttcaccgtgtcctcctacagcaccaccgtcttccgcaccagcaagcccttcaaccccctgctgggggagacctttgagctggaccggctggaggagaatggctaccgcagcctgtgtgagcaggtgagccaccaccccccagctgctgcccaccacgccgagagcaagaatggctggaccctgcggcaggagatcaagatcaccagcaagttccggggcaagtacctgagcatcatgcccctgggcaccatccactgcatcttccacgccaccggccaccactacacctggaagaaggtgaccaccaccgtgcacaacatcatcgtgggcaagctgtggattgaccagagcggggagattgacatcgtgaaccacaagacaggagacaagtgcaacctgaagtttgtgccctacagctacttcagcagagatgtggccaggaaggtgactggagaggtgacagaccccagcggcaaggtgcactttgccctgctgggcacctgggatgagaagatggagtgcttcaaggtgcagcctgtgattggagaaaatggaggagatgcccggcagaggggccatgaagctgaggagagccgggtgatgctgtggaagaggaaccccctgcccaagaatgctgagaacatgtactacttcagcgagctggccctgaccctgaatgcctgggagagcggcacagcccccacagacagccggctgcggccagaccagaggctgatggagaatggccgctgggatgaggccaatgctgagaagcagaggctggaggagaagcagaggctgagcaggaagaagcgggaggccgaggccatgaaggccacagaagatggcaccccctatgacccctacaaggccctgtggtttgagaggaagaaggaccctgtgaccaaggagctgacccacatctacagaggagagtactgggagtgcaaggagaagcaggactggagcagctgcccagacatcttctag

SEQ ID NO: 129719 - DNA, 2424 bp, Artificial Sequence
  derived and/or modified sequence
atggccgccaccgagctgcggggcgtggtgggccccggccccgccgctatcgcagctctgggaggtgggggggccgggccacctgtcgtaggaggcgggggtggtagaggcgacgccggcccaggtagtggtgcagcctcaggaacggtggtggcagccgccgctggagggcccggacccggggccggcggagtggccgcagccggaccggctccggctcccccaacgggcggttctgggggctccggtgccggaggatcagggtccgcccgcgagggatggttattcaagtggacgaactacattaaaggatatcagcggagatggtttgtgctgtctaatggcctgctgagctactacaggtcaaaagctgagatgcgacatacctgtaggggaaccatcaacctggctactgccaatattacagtcgaggactcctgtaattttattataagcaacggtggggcccagacttaccatttgaaggctagctctgaggtcgaacggcaacgctgggtgacagcactggaacttgcgaaggctaaagcggtaaaaatgctagccgaatctgatgagagtggggacgaagagtccgtgtctcagactgataagaccgagctacagaataccctgagaactctgagttcaaaggttgaggacctgtccacatgtaacgacttgattgcaaaacacgggacggcgctccagcgctccctcagcgagctcgaaagtctcaaactccctgctgaatctaatgagaagatcaagcaggtaaatgaacgagccaccctcttccgcattaccagcaatgccatgataaacgcatgccgggatttcttgatgttggctcaaacccactccaagaagtggcagaagagcctgcagtacgagcgcgaccagcgaatacggttagaagaaacactggaacagctcgccaagcagcacaatcatctggaaagggcattcagaggggccaccgtccttcctgcaaacaccccggggaacgtaggatccggtaaagaccagtgttgtagtggcaaaggagatatgagcgacgaagacgatgaaaatgagttcttcgacgcacccgagattattacaatgccagagaacttgggccacaagcgaacaggatctaatatcagcggcgcctcctctgacatttccctagatgagcagtacaaacaccagttggaggaaaccaagaaagagaaacgcaccaggattccctacaagccgaactactccctaaacctgtggtcaatcatgaagaactgcattggaaaggagttgagtaagatacccatgcctgttaattttaacgaacctctaagtatgctgcagcgcctcacggaagaccttgaataccatgagctcctggaccgggcagccaaatgcgaaaattctcttgaacagctgtgctacgtggcagccttcaccgtgtcttcctactctaccactgtttttagaacttcaaagccgttcaaccccttgttgggcgagaccttcgagctcgaccgactggaagagaatgggtatcgatctctgtgcgaacaggtgagccatcaccccccggctgctgctcatcacgcagaatcaaagaacggctggacgctgcgtcaagaaatcaagatcacgagcaaatttaggggaaaatacctatccattatgcctctgggcaccattcattgtatatttcatgcaacggggcaccattacacatggaaaaaggttacaaccaccgtacataatatcatagtcgggaaactttggattgaccagagcggcgaaattgacatcgttaatcacaagactggcgacaagtgcaatctgaaatttgtaccttacagttatttcagccgcgacgtggctcgaaaagtaacaggggaagtgaccgatccttctggaaaggtgcactttgcgctcttggggacgtgggatgaaaagatggagtgtttcaaagtgcagccagtgataggggagaacgggggcgatgcaagacaaagaggccacgaggccgaggaatctcgggtcatgctatggaagaggaatccccttccaaagaatgctgagaatatgtattacttctcggaactggccctgaccttgaacgcctgggagtccggtacagcccctacggacagtcgacttagacctgatcagcgcttgatggagaatggtcgttgggatgaggcaaacgcagaaaagcagaggttggaagagaaacagagactaagtaggaaaaagagggaggccgaggccatgaaggcaactgaggacggcaccccctatgacccctacaaagccttatggttcgaaagaaaaaaggatcctgttactaaagaactgacacacatctatagaggcgaatattgggagtgtaaggagaaacaagactggtcctcatgcccagatatattctag

SEQ ID NO: 129720 - DNA, 1224 bp, Artificial Sequence
  derived and/or modified sequence
atggccgccaccgagctgcggggcgtggtgggccccggccccgccgctatcgctgccctaggcggtgggggagccggaccgccggtggtcggtggcggcggcggccgaggagacgcaggccctggtagcggcgctgccctgcagcgcctgaccgaggatctagaatatcatgagctgcttgatcgagccgctaaatgcgagaattccctcgagcagctctgttacgttgctgcctttaccgtgagcagctattcgaccacagttttccgcacctcaaaacccttcaacccactattgggtgaaacttttgagctggatcgactggaggaaaatggctatcggagcctgtgcgagcaggtaagccatcacccaccagccgcggctcaccatgccgagagcaaaaacggttggacgttacgacaggagattaaaattacgtctaagttccggggaaagtatctttcgatcatgcccctgggcacaatacactgcattttccacgctacaggtcatcattatacgtggaagaaggttacgactacagttcacaatattatcgtgggaaagctgtggatagaccagagtggagagatcgacatagtcaaccataagaccggtgacaagtgtaacttgaaatttgttccatactcttacttttccagggatgtagcgagaaaggtgactggcgaggtcaccgatccaagtggaaaagtgcactttgctttactggggacgtgggacgaaaagatggagtgctttaaggtgcagccggtgattggtgaaaatggcggcgacgcacgacagagggggcatgaggccgaagagtcacgggtcatgctatggaaacggaatcccctgccaaaaaatgccgaaaacatgtactatttttcggagctcgcactgaccctgaacgcgtgggagtcaggcaccgcccctacagattccaggctgaggccagatcaacggctgatggaaaacggtcgctgggacgaggccaacgctgaaaagcaaaggctcgaagagaagcaacgcctgagtcgaaaaaagcgcgaggccgaagcaatgaaggcaacagaagatgggactccgtacgatccgtacaaggccctgtggttcgagcggaagaaggatccagtgacaaaggagctgacgcatatttaccgaggagaatactgggaatgcaaggagaaacaggactggtcttcttgtcctgatattttctag

SEQ ID NO: 129721 - DNA, 5083 bp, Artificial Sequence
  derived and/or modified sequence
agaagagcgatgggagggggtgacgtggcagtgacaggcgcataaactgaaatgaatggcggaaacagcagccaatcggcgatcagattggccgggcattccgcattctcccgtcctccctgagcgctggaaacttcaggaaagcaccaatgagcttccccaaaagtctgattggcctttatctgaaccaatcaaaggtgggtctggcggacgcgtcccaccccaggctctcactgggcgctgtagaatgacaggcccgagagaaatgccaatatccgcggggtcttcctcaagtgacactcagcggcaccaatcgacgtccttcttcccggcggccgagccctcctccccgcggctggccgggcggggcggggacgctgcgcggcggtggctgatgcggtagccgtgtggggcgctccgggcggcgacggcggctctcgtaggcggttccggtcttgtatctccaggcggcggcggctcatggcggcgacggagctgagaggagtggtggggccaggcccggcagccattgcagcacttggcggcggcggcgccggtcccccagtggtgggaggaggcggcggccgcggagatgcggggccaggctccggggccgcgtcagggacggtggtcgcggcggcggcgggaggcccgggcccgggggccgggggagtggcggcggctggcccggcccctgcgccgccgactgggggctcgggcggctcgggcgctgggggttcgggctcggctcgagagggctggctcttcaaatggaccaattatatcaaaggctaccagcggcgatggttcgtgctgagcaacgggctcctgagctactacagatcaaaggcagaaatgagacatacctgccgtggtaccatcaacctcgccacagccaacatcaccgtggaggactcctgcaacttcatcatttccaatgggggtgctcagacctaccatctgaaagctagttcagaagttgagcggcagcgctgggtgacggccctggaactggccaaggccaaagctgtgaagatgctggcagagtcagatgaatcaggagatgaagagtctgtctcacaaactgacaagactgagctgcagaatacccttcggaccctctctagcaaagtagaggacttgagcacgtgcaatgacttgatagctaagcatggcacagctctgcagcgttctctcagtgagctggagtccctgaagttgcctgctgagagcaatgaaaagatcaaacaggtcaacgaacgagccacactctttaggataacatccaatgccatgatcaacgcctgcagagatttcctcatgttagcccagacccatagtaaaaaatggcaaaagtcactacagtatgaaagagaccagcgtatccgactggaagaaaccctcgagcagctggcgaagcagcataatcacctggagagggccttccgaggagccacggtgctgccggcaaacactcctggcaatgtgggttctggtaaagatcagtgctgctctggcaaaggggacatgagcgatgaagatgatgagaatgaattttttgatgcacctgagatcatcaccatgcctgaaaatttgggccacaaacgtactggcagcaatatcagtggagccagcagtgacatcagccttgatgaacagtacaagcatcagctggaggagaccaaaaaggaaaagagaaccagaataccatacaagccaaactatagcctcaatttatggagcatcatgaagaactgcattggaaaagaactctctaagatccccatgccggtaaactttaatgagcccttgtccatgcttcagcgccttactgaagatctggaataccatgagctgttagaccgagctgcaaaatgtgagaattctctagaacagctctgttatgttgcagctttcaccgtgtcctcctactccactactgtcttccgcaccagtaagccattcaacccactgcttggggagacctttgagctggaccgattagaggagaatgggtaccgatccctctgtgaacaggtgagtcatcatccccctgctgctgcgcaccatgctgagtccaaaaatggctggacattgcgtcaggaaatcaaaatcaccagcaagtttcgaggcaaatacctctccattatgcccctcggtaccattcattgtattttccatgcaactgggcaccactacacttggaagaaagttaccacaactgtacacaacattattgtgggcaagttgtggatagatcagtctggcgaaattgatattgtgaatcacaagacaggagacaagtgtaatcttaaatttgttccttatagctacttctctcgggatgtagcaagaaaggtgacgggggaagtgacagatccatcaggaaaagtccactttgctcttctggggacgtgggatgagaaaatggaatgtttcaaagtacagccagtcattggggaaaatgggggtgatgctcgacagagaggccatgaagcagaggaaagcagggtcatgctgtggaaaaggaatcctttaccgaagaatgcagaaaacatgtactacttctcagagcttgctctgactctcaatgcttgggaaagtggcactgcccccacagacagccggttacgacctgaccagagactgatggaaaatggacgctgggatgaagcaaatgcggagaagcagcgcctggaggaaaaacaaagactttccagaaagaagagagaagcggaagctatgaaagccacagaggatggcacaccatatgatccctataaggcactgtggtttgagcggaagaaggaccctgttaccaaggagttaacccatatttataggggagaatactgggagtgtaaagaaaaacaggactggagctcatgcccggacattttctgaaacggcagtaacaaaaaagaggagcatataatggagaagaggacagaggatgtgtgggaaagctggaagttgtgactctcttaccaagtgctttcctcaagtttgtctctcttgaccaatcattttttccaaatcaatcaccagaaggagacaccagtggtggtgattggctggttgccttagctgattgaaactgaaatcgacataggagatactatgtctgtaagggagaggtttagtggccgaaggttagtgttattccacatccacgaagtcaagtattcttggctcttctttctccctctgcccccatttaagacaatgtcactcaccctccccttgtagtatcctgctcagccaagatctgcctaagattatgattcaggggcattttggtgctgttaaaagcaagagccgaatttagaagttcccttaaaaagaaacacataagacttaccaatggaggcattgtgaatggttgcagtggagcttaggtataacatcatcaagtgtgttcacacgcggggtcggtttaatggagtgtccacgcggagataactgcgatattggaacacctgtgagagagattgttctatagggctggaatattcagagttacattcttggaagtttctgtttttacttgcatcaaacacccctctgttgttctccatcatctttaatagcaactggagaccactttggtcattggtaagggggtgcattctcctcacaaaggggttttatggacttcctcaggcggagagcttctgagaacacaggcaggatggaaaaagactactagccacttttgctttcccaaccccccttaatgccatccttcattgtctttctggcttctcttcttctggcacagtaccattttgggtctgtgccccagtgtggagcaaaacattgcctgtcccattctgatatacttcagaatttgagagcagaagttaatgtggaacaaaagttttcaccatctctcaagccccaaggactggagccacctctggaataatgtgttaaatatctgtatattatatatatgtagagaaaaatctaattttttggtttgatttccttcccattaagaatcttgttttttgatacccttgtctccctgagactctttcttggacacgtgttgatgtggatggcactcctgctctccatcttttatgggcagagagatttcaaaacctgagcaggatcatgtctggcagttactaaacagggactttgtccatggtttgtatcatggggtgcctactgctgtctaaactctgctctcctaattagctgactcttgaaaatgaaatcctaacctctttcctgcctcttttctttctcttttcaggaagagtgtgggtagaaagtccggagggcaacttccaatttaattctgctctgtccggcgcataggctgaattccaaaagaactttcttcctaggatgtggggcttaaagcaccgtcatgtggggtggatcagataattgctcctgtggggccctggcttccttctctgtttgtgcagtatttgtttttgttgtcttgttgagaaatatcccctgtgcaacccacccttggttgaggatcacaaattgaggtgccttccttgtatgctttttgttagtattttttgtttttgttccttaactgctgagcctcagccagcgtgggtcctgggggaaataccattccaaaggaagccatccctatggggaaattggttttactgggtaaattaatacttttatttcttcccctatcccttccttcctagttgtgataaacatgggagaggagtgactttgactgctggggaatttcctcctaagaaccttattcccaaaataagccagggattatgtcaaggcttctttcaaggaggctcataaaagcagtgacctcatccggggctttggatagagtgagaattccccaactaaattggacttctctgctttatccccttctcttccttcaccatctgcactacatttctggctgatcccaatcagattcccgctaatggaagaagtttagaatctttcaggtggaataaagtcacatgaaaacaaaacacaactatatatattttcagtttttttgccttattgatttttttccaaaaaaaaaaaactactaaattaaataattttttaaaagtca

SEQ ID NO: 129722 - DNA, 3403 bp, Artificial Sequence
  derived and/or modified sequence
atggcggcgacggagctgagaggagtggtggggccaggcccggcagccattgcagcacttggcggcggcggcgccggtcccccagtggtgggaggaggcggcggccgcggagatgcggggccaggctccggggccgcgcttcagcgccttactgaagatctggaataccatgagctgttagaccgagctgcaaaatgtgagaattctctagaacagctctgttatgttgcagctttcaccgtgtcctcctactccactactgtcttccgcaccagtaagccattcaacccactgcttggggagacctttgagctggaccgattagaggagaatgggtaccgatccctctgtgaacaggtgagtcatcatccccctgctgctgcgcaccatgctgagtccaaaaatggctggacattgcgtcaggaaatcaaaatcaccagcaagtttcgaggcaaatacctctccattatgcccctcggtaccattcattgtattttccatgcaactgggcaccactacacttggaagaaagttaccacaactgtacacaacattattgtgggcaagttgtggatagatcagtctggcgaaattgatattgtgaatcacaagacaggagacaagtgtaatcttaaatttgttccttatagctacttctctcgggatgtagcaagaaaggtgacgggggaagtgacagatccatcaggaaaagtccactttgctcttctggggacgtgggatgagaaaatggaatgtttcaaagtacagccagtcattggggaaaatgggggtgatgctcgacagagaggccatgaagcagaggaaagcagggtcatgctgtggaaaaggaatcctttaccgaagaatgcagaaaacatgtactacttctcagagcttgctctgactctcaatgcttgggaaagtggcactgcccccacagacagccggttacgacctgaccagagactgatggaaaatggacgctgggatgaagcaaatgcggagaagcagcgcctggaggaaaaacaaagactttccagaaagaagagagaagcggaagctatgaaagccacagaggatggcacaccatatgatccctataaggcactgtggtttgagcggaagaaggaccctgttaccaaggagttaacccatatttataggggagaatactgggagtgtaaagaaaaacaggactggagctcatgcccggacattttctgaaacggcagtaacaaaaaagaggagcatataatggagaagaggacagaggatgtgtgggaaagctggaagttgtgactctcttaccaagtgctttcctcaagtttgtctctcttgaccaatcattttttccaaatcaatcaccagaaggagacaccagtggtggtgattggctggttgccttagctgattgaaactgaaatcgacataggagatactatgtctgtaagggagaggtttagtggccgaaggttagtgttattccacatccacgaagtcaagtattcttggctcttctttctccctctgcccccatttaagacaatgtcactcaccctccccttgtagtatcctgctcagccaagatctgcctaagattatgattcaggggcattttggtgctgttaaaagcaagagccgaatttagaagttcccttaaaaagaaacacataagacttaccaatggaggcattgtgaatggttgcagtggagcttaggtataacatcatcaagtgtgttcacacgcggggtcggtttaatggagtgtccacgcggagataactgcgatattggaacacctgtgagagagattgttctatagggctggaatattcagagttacattcttggaagtttctgtttttacttgcatcaaacacccctctgttgttctccatcatctttaatagcaactggagaccactttggtcattggtaagggggtgcattctcctcacaaaggggttttatggacttcctcaggcggagagcttctgagaacacaggcaggatggaaaaagactactagccacttttgctttcccaaccccccttaatgccatccttcattgtctttctggcttctcttcttctggcacagtaccattttgggtctgtgccccagtgtggagcaaaacattgcctgtcccattctgatatacttcagaatttgagagcagaagttaatgtggaacaaaagttttcaccatctctcaagccccaaggactggagccacctctggaataatgtgttaaatatctgtatattatatatatgtagagaaaaatctaattttttggtttgatttccttcccattaagaatcttgttttttgatacccttgtctccctgagactctttcttggacacgtgttgatgtggatggcactcctgctctccatcttttatgggcagagagatttcaaaacctgagcaggatcatgtctggcagttactaaacagggactttgtccatggtttgtatcatggggtgcctactgctgtctaaactctgctctcctaattagctgactcttgaaaatgaaatcctaacctctttcctgcctcttttctttctcttttcaggaagagtgtgggtagaaagtccggagggcaacttccaatttaattctgctctgtccggcgcataggctgaattccaaaagaactttcttcctaggatgtggggcttaaagcaccgtcatgtggggtggatcagataattgctcctgtggggccctggcttccttctctgtttgtgcagtatttgtttttgttgtcttgttgagaaatatcccctgtgcaacccacccttggttgaggatcacaaattgaggtgccttccttgtatgctttttgttagtattttttgtttttgttccttaactgctgagcctcagccagcgtgggtcctgggggaaataccattccaaaggaagccatccctatggggaaattggttttactgggtaaattaatacttttatttcttcccctatcccttccttcctagttgtgataaacatgggagaggagtgactttgactgctggggaatttcctcctaagaaccttattcccaaaataagccagggattatgtcaaggcttctttcaaggaggctcataaaagcagtgacctcatccggggctttggatagagtgagaattccccaactaaattggacttctctgctttatccccttctcttccttcaccatctgcactacatttctggctgatcccaatcagattcccgctaatggaagaagtttagaatctttcaggtggaataaagtcacatgaaaacaaaacacaactatatatattttcagtttttttgccttattgatttttttccaaaaaaaaaaaactactaaattaaataattttttaaaagtca

SEQ ID NO: 129723 - DNA, 2424 bp, Artificial Sequence
  derived and/or modified sequence
atggctgcaactgaactcaggggcgtcgttggacctggcccagctgccattgcggcattaggaggcggaggggctggccctccggtggtgggtggagggggaggcaggggagatgcgggaccgggatctggcgctgcaagtggaacggttgtcgcagccgctgctggcggacccggaccaggggctggcggtgtggccgctgcagggccagcacccgctcccccaaccgggggaagtgggggaagtggtgccggaggttctgggagcgcaagggaagggtggctattcaaatggacgaactacattaagggctatcagaggagatggttcgtactcagcaatggtcttctgagctattacaggtccaaggcagagatgcgacacacatgccggggtaccatcaatctcgccacagctaacattaccgtggaagacagctgtaactttattattagcaacggcggtgctcagacatatcacctcaaggccagttccgaggtggagcgccagagatgggtcacagcgttggagcttgcgaaggccaaagccgtaaagatgctggccgagagtgatgagtctggggacgaagagtctgtctcacagactgacaaaaccgagctgcagaacaccctcagaactctcagtagcaaagtggaagatctaagcacttgtaatgatttgattgctaaacacgggaccgccttgcagcgctccctcagtgaactggagtctcttaagctcccggctgaaagcaatgagaaaattaaacaggtgaatgagcgggctaccctattcagaataacaagtaatgcaatgatcaacgcgtgccgggactttctcatgctggctcagactcatagcaaaaagtggcagaagtcactgcaatacgagagagaccagaggattcggttggaggaaactctagagcagctcgcgaagcagcacaatcatttagagagggcttttcgaggtgcaactgttctgcctgccaacactcctggaaacgttggctccggcaaggatcaatgctgtagcggtaaaggcgacatgtcagacgaagacgatgaaaacgagttttttgacgcaccggagataataacgatgccggagaacctaggtcacaaacggactggatccaatatcagtggagctagctccgatatatcgctggatgaacagtacaagcaccagctggaggaaaccaagaaggagaaacgcacacggatcccgtataaacccaattactccctgaatctgtggtctatcatgaaaaattgcatcggcaaggagctgagtaagatacctatgcccgtcaatttcaatgagccactatccatgctgcagcgactgacggaggatttggaataccacgaactcctggaccgagccgctaaatgcgaaaatagcttagagcagttatgctacgtggccgcttttacagtgagtagctactcgaccactgtgttccgcacatctaaacctttcaatccactgctgggagaaacctttgaattggatcggctggaggaaaacggttaccgaagcctgtgcgaacaggtctctcatcacccaccggctgccgcacaccacgccgaatccaagaacggctggaccctcagacaggaaatcaaaattacaagcaaatttagaggcaaatatctgagcatcatgccactgggcaccatccactgtatttttcacgccacaggacaccactacacctggaagaaagtaactaccactgtgcataatatcatcgttggcaagctgtggatagaccagagcggggaaatagatatcgtcaaccacaagacgggcgacaaatgtaacctgaagtttgtaccgtactcgtacttctctcgagacgttgctagaaaggtgactggagaggtgactgatcccagcggcaaggtgcactttgctctgcttggcacatgggatgaaaaaatggaatgcttcaaagtgcaacccgtgattggcgagaatgggggagatgcacggcagagagggcatgaagctgaagagagcagggtgatgctgtggaaaaggaatcccttacctaaaaatgcagagaacatgtattacttctctgagctcgccctgacgcttaatgcatgggaaagtggtacagcccctacggattcaaggctcagacctgaccagaggctcatggaaaatggccgatgggatgaggctaatgcagaaaagcagaggctggaggagaaacagaggctttcccgcaagaagcgggaggcggaggccatgaaggcaaccgaggatggtacaccgtacgatccctataaagcgctttggttcgagcgaaagaaggacccagtcacaaaagagcttactcacatttaccgcggagagtattgggagtgtaaggaaaaacaagattggtcctcctgtccagacatattctag

SEQ ID NO: 129724 - DNA, 1224 bp, Artificial Sequence
  derived and/or modified sequence
atggccgcaactgaattgagaggcgtcgtgggtccaggtccagctgctattgccgcactcggaggtggtggagccggacccccagtagtgggaggcggaggcggacgtggggacgcaggtccagggagcggggcagccctgcagcgactgactgaagatctcgagtaccatgagctcctggatagggccgcaaaatgtgagaattccctagaacagctctgctatgtggctgcctttactgtaagttcttattctactactgtgttccggacttcaaagccctttaatccattgcttggcgagacctttgagttggaccggttagaggagaacggatatcgctcactgtgcgaacaggtgtctcatcatccaccagcagctgcacaccatgccgaatcaaaaaatggctggacccttcgtcaggagatcaagattacctcaaagtttcgaggcaaatatctgtcaataatgcccttaggaaccatccactgcatattccatgcgactggtcatcactacacatggaagaaggtcaccacgacagtccataatatcatcgtagggaaactttggattgatcagtcaggtgaaatcgatatcgtgaatcacaaaacgggggacaagtgcaatttgaaatttgtaccttactcttacttctcccgggacgtagctcgcaaagtgaccggtgaggtgaccgatccctcaggtaaggtgcacttcgcactgttagggacttgggacgaaaagatggagtgcttcaaagttcagcccgtgattggcgaaaatggcggtgacgcaagacagcgtggccatgaagcagaggaatcaagagtgatgttatggaagcgaaatcctctgcctaaaaatgcagagaatatgtactacttctccgagctggctctcactttgaatgcctgggagtctggtaccgcaccaactgactcaaggctgcgccctgaccagcgcctgatggaaaacggacgttgggatgaggccaacgccgagaagcagcggctagaagaaaaacagcggctatcgcggaaaaagagagaggcagaggccatgaaggccacagaagacggaacgccctacgacccatacaaggcactgtggttcgagcgcaagaaagacccagtgactaaagagctgacccatatttataggggcgaatactgggaatgcaaagagaaacaggattggagttcttgcccagatattttctag

SEQ ID NO: 129725 - DNA, 2424 bp, Artificial Sequence
  derived and/or modified sequence
atggccgccaccgagctgagaggcgtggtgggccccggccccgccgccatcgccgccctgggcggcggcggcgccggcccccccgtggtgggcggcggcggcggcagaggcgacgccggccccggcagcggcgccgccagcggcaccgtggtggccgccgccgccggcggccccggccccggcgccggcggcgtggccgccgccggccccgcccccgccccccccaccggcggcagcggcggcagcggcgccggcggcagcggcagcgccagagagggctggctgttcaagtggaccaactacatcaagggctaccagagaagatggttcgtgctgagcaacggcctgctgagctactacagaagcaaggccgagatgagacacacctgcagaggcaccatcaacctggccaccgccaacatcaccgtggaggacagctgcaacttcatcatcagcaacggcggcgcccagacctaccacctgaaggccagcagcgaggtggagagacagagatgggtgaccgccctggagctggccaaggccaaggccgtgaagatgctggccgagagcgacgagagcggcgacgaggagagcgtgagccagaccgacaagaccgagctgcagaacaccctgagaaccctgagcagcaaggtggaggacctgagcacctgcaacgacctgatcgccaagcacggcaccgccctgcagagaagcctgagcgagctggagagcctgaagctgcccgccgagagcaacgagaagatcaagcaggtgaacgagagagccaccctgttcagaatcaccagcaacgccatgatcaacgcctgcagagacttcctgatgctggcccagacccacagcaagaagtggcagaagagcctgcagtacgagagagaccagagaatcagactggaggagaccctggagcagctggccaagcagcacaaccacctggagagagccttcagaggcgccaccgtgctgcccgccaacacccccggcaacgtgggcagcggcaaggaccagtgctgcagcggcaagggcgacatgagcgacgaggacgacgagaacgagttcttcgacgcccccgagatcatcaccatgcccgagaacctgggccacaagagaaccggcagcaacatcagcggcgccagcagcgacatcagcctggacgagcagtacaagcaccagctggaggagaccaagaaggagaagagaaccagaatcccctacaagcccaactacagcctgaacctgtggagcatcatgaagaactgcatcggcaaggagctgagcaagatccccatgcccgtgaacttcaacgagcccctgagcatgctgcagagactgaccgaggacctggagtaccacgagctgctggacagagccgccaagtgcgagaacagcctggagcagctgtgctacgtggccgccttcaccgtgagcagctacagcaccaccgtgttcagaaccagcaagcccttcaaccccctgctgggcgagaccttcgagctggacagactggaggagaacggctacagaagcctgtgcgagcaggtgagccaccacccccccgccgccgcccaccacgccgagagcaagaacggctggaccctgagacaggagatcaagatcaccagcaagttcagaggcaagtacctgagcatcatgcccctgggcaccatccactgcatcttccacgccaccggccaccactacacctggaagaaggtgaccaccaccgtgcacaacatcatcgtgggcaagctgtggatcgaccagagcggcgagatcgacatcgtgaaccacaagaccggcgacaagtgcaacctgaagttcgtgccctacagctacttcagcagagacgtggccagaaaggtgaccggcgaggtgaccgaccccagcggcaaggtgcacttcgccctgctgggcacctgggacgagaagatggagtgcttcaaggtgcagcccgtgatcggcgagaacggcggcgacgccagacagagaggccacgaggccgaggagagcagagtgatgctgtggaagagaaaccccctgcccaagaacgccgagaacatgtactacttcagcgagctggccctgaccctgaacgcctgggagagcggcaccgcccccaccgacagcagactgagacccgaccagagactgatggagaacggcagatgggacgaggccaacgccgagaagcagagactggaggagaagcagagactgagcagaaagaagagagaggccgaggccatgaaggccaccgaggacggcaccccctacgacccctacaaggccctgtggttcgagagaaagaaggaccccgtgaccaaggagctgacccacatctacagaggcgagtactgggagtgcaaggagaagcaggactggagcagctgccccgacatcttctag

SEQ ID NO: 129726 - DNA, 1224 bp, Artificial Sequence
  derived and/or modified sequence
atggccgccaccgagctgagaggcgtggtgggccccggccccgccgccatcgccgccctgggcggcggcggcgccggcccccccgtggtgggcggcggcggcggcagaggcgacgccggccccggcagcggcgccgccctgcagagactgaccgaggacctggagtaccacgagctgctggacagagccgccaagtgcgagaacagcctggagcagctgtgctacgtggccgccttcaccgtgagcagctacagcaccaccgtgttcagaaccagcaagcccttcaaccccctgctgggcgagaccttcgagctggacagactggaggagaacggctacagaagcctgtgcgagcaggtgagccaccacccccccgccgccgcccaccacgccgagagcaagaacggctggaccctgagacaggagatcaagatcaccagcaagttcagaggcaagtacctgagcatcatgcccctgggcaccatccactgcatcttccacgccaccggccaccactacacctggaagaaggtgaccaccaccgtgcacaacatcatcgtgggcaagctgtggatcgaccagagcggcgagatcgacatcgtgaaccacaagaccggcgacaagtgcaacctgaagttcgtgccctacagctacttcagcagagacgtggccagaaaggtgaccggcgaggtgaccgaccccagcggcaaggtgcacttcgccctgctgggcacctgggacgagaagatggagtgcttcaaggtgcagcccgtgatcggcgagaacggcggcgacgccagacagagaggccacgaggccgaggagagcagagtgatgctgtggaagagaaaccccctgcccaagaacgccgagaacatgtactacttcagcgagctggccctgaccctgaacgcctgggagagcggcaccgcccccaccgacagcagactgagacccgaccagagactgatggagaacggcagatgggacgaggccaacgccgagaagcagagactggaggagaagcagagactgagcagaaagaagagagaggccgaggccatgaaggccaccgaggacggcaccccctacgacccctacaaggccctgtggttcgagagaaagaaggaccccgtgaccaaggagctgacccacatctacagaggcgagtactgggagtgcaaggagaagcaggactggagcagctgccccgacatcttctag

SEQ ID NO: 129727 - protein, 399 aa, Artificial Sequence
  derived and/or modified sequence
MARRFQEELAAFLFEYDTPRMVLVRNKKVGVIFRLIQLVVLVYVIGWVFLYEKGYQTSSGLISSVSVKLKGLAVTQLPGLGPQVWDVADYVFPAQGDNSFVVMTNFIVTPKQTQGYCAEHPEGGICKEDSGCTPGKAKRKAQGIRTGKCVAFNDTVKTCEIFGWCPVEVDDDIPRPALLREAENFTLFIKNSISFPRFKVNRRNLVEEVNAAHMKTCLFHKTLHPLCPVFQLGYVVQESGQNFSTLAEKGGVVGITIDWHCDLDWHVRHCRPIYEFHGLYEEKNLSPGFNFRFARHFVENGTNYRHLFKVFGIRFDILVDGKAGKFDIIPTMTTIGSGIGIFGVATVLCDLLLLHILPKRHYYKQKKFKYAEDMGPGAAERDLAATSSTLGLQENMRTS

SEQ ID NO: 129728 - DNA, 1200 bp, Artificial Sequence
  derived and/or modified sequence
atggctaggcggtttcaggaggaactggcggcctttctttttgagtatgacacgccacgaatggtcctggtccggaacaaaaaggtcggggtgatattcaggctgatccaactggtggtgctggtctatgtgattgggtgggttttcctctatgagaaagggtatcagacttctagtggacttatctcttctgttagtgttaaacttaaaggcctggccgtgacccagttgccagggcttggacctcaggtgtgggatgtagctgattacgtttttcctgcgcagggcgataactcttttgtggtgatgactaacttcatcgtcaccccaaagcagacacagggctactgcgccgaacacccagaagggggcatttgcaaagaggactccggctgcactcccgggaaggctaagaggaaggcccagggtataaggacaggaaagtgtgtggcctttaacgataccgtcaagacgtgcgaaattttcgggtggtgtccagtagaagtggacgacgatattccccgccccgctctcctgcgggaggccgaaaactttactctttttattaaaaactcaatcagttttcctaggtttaaagtgaatagacgcaacctggtggaagaggtcaacgctgctcacatgaagacctgtctgtttcacaaaaccttgcaccccttgtgcccggtgtttcagcttggttacgtcgtgcaggagtccggtcagaatttcagtacactagcggagaagggcggcgtggtcggtatcactatcgattggcactgcgatttggattggcacgtaagacattgccgtccaatctatgaatttcacggcctgtacgaggagaagaacctgtccccgggcttcaatttcaggttcgcccggcacttcgtagagaacggaaccaactaccgccacctcttcaaggtcttcgggatccgattcgacatcttggtggacggcaaggctggcaaatttgacattattccgaccatgactaccattggatccggaatcggtatatttggggtcgcaacagtgctctgtgacctcctgcttctgcatatactgcctaaaaggcactattacaagcaaaaaaaattcaagtatgccgaggacatgggacctggcgctgcagagagagatctggcagccacctcttctacactgggcttacaggagaacatgcgcacatcctag

SEQ ID NO: 129729 - DNA, 1200 bp, Artificial Sequence
  derived and/or modified sequence
atggcccggcgcttccaggaggagctggccgccttcctgtttgaatatgacacccccaggatggtgctggtgaggaacaagaaggtgggcgtcatcttccgcctcatccagctggtggtgctggtgtatgtgattggctgggtgttcctgtatgagaagggctaccagaccagcagcggcctcatcagctctgtgtctgtgaagctgaagggcctggccgtgacccagctgcccggcctgggcccccaggtgtgggatgtggccgactatgtgtttcctgcccagggcgacaacagctttgtggtgatgaccaacttcatcgtgacccccaagcagacccagggctactgtgccgagcaccctgagggcggcatctgcaaggaggacagcggctgcacccctgggaaggccaagaggaaggcccagggcatcagaactggaaaatgtgtggccttcaatgacacagtgaagacctgtgagatcttcggctggtgccctgtggaggtggatgatgacatccccaggcctgccctgctgcgggaggccgagaacttcaccctcttcatcaagaacagcatctccttcccccgcttcaaggtgaacagaagaaacctggtggaggaggtgaatgctgcccacatgaagacctgcctcttccacaagaccctgcaccccctgtgccctgtgttccagctgggctacgtggtgcaggagagcggccagaacttcagcaccctggccgagaagggcggcgtggtgggcatcaccatcgactggcactgtgacctggactggcacgtgcgccactgccggcccatctatgagttccacggcctgtatgaggagaagaacctgagccctggcttcaacttccgctttgcccggcactttgtggagaatggcaccaactaccgccacctgttcaaggtgtttggcatccgctttgacatcctggtggatggcaaggccggcaagtttgacatcatccccaccatgaccaccatcggcagcggcatcggcatcttcggcgtggccaccgtgctgtgtgacctgctgctgctgcacatcctgcccaagaggcactactacaagcagaagaagttcaagtatgcagaggacatgggccctggagctgctgagcgggacctggccgccaccagcagcaccctgggcctgcaggagaacatgaggaccagctag

SEQ ID NO: 129730 - DNA, 1200 bp, Artificial Sequence
  derived and/or modified sequence
atggcccggcggttccaggaggagctggccgccttcctgttcgagtatgacacccctaggatggtgcttgtgcgcaacaaaaaagtgggtgtcatcttccgcttaatacagctggtcgtgctggtgtacgttattggatgggtgttcctctatgagaaagggtatcagacctctagcggcctgatctcctcggtgtctgtgaaactgaaaggtctggctgtgacccagctgcctggactcggaccgcaggtgtgggatgtggcggattacgtctttcctgcgcagggcgacaattcgttcgttgttatgaccaatttcatcgtgactcccaagcagacacagggctattgcgcagagcatcccgaaggaggcatctgcaaggaggacagcggctgcacccccggaaaagccaagagaaaggcccagggcattcggacgggcaaatgcgtagcattcaatgataccgtgaagacgtgcgaaatcttcggttggtgtccagtggaagtggacgacgacattcctaggcctgccctccttcgcgaggctgagaacttcacactcttcataaaaaactctattagcttcccacgcttcaaagtgaacagacgaaacctggtggaggaggttaatgcagctcatatgaaaacatgcctctttcataaaacccttcaccccttgtgtccagtcttccaactcgggtatgtcgttcaggagtctgggcagaatttttctacgctggccgagaagggtggagtagtcggtatcacaatcgattggcattgcgacttagactggcacgttcggcattgtagacctatctacgaattccacggactgtatgaggagaagaatctgtcgcctggcttcaactttcgtttcgctcgccatttcgtcgagaacgggaccaactacagacacctgttcaaggtatttggaatacggtttgatatacttgtggatgggaaagctggcaagttcgatatcatccctacgatgactaccatagggtcagggatcgggattttcggggtggcaaccgtgctatgcgaccttctgttacttcacatcctgcccaagagacattattacaaacaaaagaaattcaaatacgctgaagacatggggcccggagcggcagaacgggacctggctgctacttcatctaccctgggtttacaagagaacatgcgcacttcctag

SEQ ID NO: 129731 - DNA, 1200 bp, Artificial Sequence
  derived and/or modified sequence
atggccaggcggttccaggaggagctggccgcattccttttcgagtacgacactcctcgcatggttctggtcagaaacaaaaaagtgggcgtcatcttcagattgattcagctggtggttctggtttacgtcatcggttgggtgtttctctacgaaaagggttatcagacgtctagtggcttgatctcatccgtgagcgtgaagctcaaggggctcgccgtcactcagctgcctggcctggggccacaagtgtgggatgtggcagactacgtttttccagctcagggtgacaattccttcgtggtgatgacaaatttcatcgtcacacctaaacaaacccagggctactgtgctgagcatccggagggtggcatttgtaaggaggacagcggttgcactcctgggaaggcaaaaaggaaggcacaggggatccgaactgggaaatgcgtggcctttaatgatacggttaagacttgcgagatattcggttggtgtcccgtggaggtggacgacgacatcccgaggccagccctattgcgtgaagcagagaattttaccttatttatcaagaactcaatcagttttcccagattcaaggtaaatcgcagaaacttggttgaggaggtgaacgccgctcacatgaagacgtgcctgtttcacaaaacactccaccctctgtgtcccgtgttccaattaggatatgtggtgcaggagtcaggccagaacttctcgaccctcgccgaaaagggaggcgtcgtcggaatcactatcgactggcactgtgacctcgattggcatgtgaggcattgtaggcctatctacgagtttcatggtctttatgaggagaagaacctgtcaccgggattcaactttagattcgcgaggcattttgtggagaatggtaccaactacagacacctgttcaaggtctttgggattcgatttgatattctcgtggacgggaaggccggaaagttcgacattatccccactatgacaaccattggctccgggatcggtatcttcggggtcgctacggttctttgtgacctcctcctgctccacatcctccccaagagacactactataaacagaaaaagtttaaatacgcagaggacatgggccctggggctgcagagagggaccttgcagctacttcctctactttgggcctgcaggaaaatatgaggacaagctag

SEQ ID NO: 129732 - DNA, 2858 bp, Artificial Sequence
  derived and/or modified sequence
acttgaggagtcgactgagagctttatctttgcccctgtgacgggtggcctgtggtttcctgccaacaactcctgtttccggaggcccaacaaggcccacgcagagccaggaggggcagtggggctgggcctgggtggccccaccagccccgccccatctatctttgggaatttatttgtccatgggcgaggctggcctgcagtctgttgccttccaggggccaagagctgctctgatcacccagggattctctctccaacccaagtgcctccagctgacctctggctcctgtcctctggctccacctgcaccgccctgctcttcctaaggggccaggaagcccccagaagctctaccatcgacgtgggtggtggcacccggctcaccctgagagcagaggccgtgcagggggctcagttctgagccccagccggcccaccatggcacggcggttccaggaggagctggccgccttcctcttcgagtatgacaccccccgcatggtgctggtgcgtaataagaaggtgggcgttatcttccgactgatccagctggtggtcctggtctacgtcatcgggtgggtgtttctctatgagaagggctaccagacctcgagcggcctcatcagcagtgtctctgtgaaactcaagggcctggccgtgacccagctccctggcctcggcccccaggtctgggatgtggctgactacgtcttcccagcccagggggacaactccttcgtggtcatgaccaatttcatcgtgaccccgaagcagactcaaggctactgcgcagagcacccagaagggggcatatgcaaggaagacagtggctgtacccctgggaaggccaagaggaaggcccaaggcatccgcacgggcaagtgtgtggccttcaacgacactgtgaagacgtgtgagatctttggctggtgccccgtggaggtggatgacgacatcccgcgccctgcccttctccgagaggccgagaacttcactcttttcatcaagaacagcatcagctttccacgcttcaaggtcaacaggcgcaacctggtggaggaggtgaatgctgcccacatgaagacctgcctctttcacaagaccctgcaccccctgtgcccagtcttccagcttggctacgtggtgcaagagtcaggccagaacttcagcaccctggctgagaagggtggagtggttggcatcaccatcgactggcactgtgacctggactggcacgtacggcactgcagacccatctatgagttccatgggctgtacgaagagaaaaatctctccccaggcttcaacttcaggtttgccaggcactttgtggagaacgggaccaactaccgtcacctcttcaaggtgtttgggattcgctttgacatcctggtggacggcaaggccgggaagtttgacatcatccctacaatgaccaccatcggctctggaattggcatctttggggtggccacagttctctgtgacctgctgctgcttcacatcctgcctaagaggcactactacaagcagaagaagttcaaatacgctgaggacatggggccaggggcggctgagcgtgacctcgcagctaccagctccaccctgggcctgcaggagaacatgaggacatcctgatgctcgggccccaactcctgactgggtgcagcgtgaggcttcagcctggagccctggtgggtcccagccagggcagaggggcctccccaggaagtctcctaccctctcagccaggcagagagcagtttgccagaagctcagggtgcatagtaggagagacctgtgcaaatctgagctccggctccgaccccacacaccctgagggagccctaccctagcctcagccgctcctggtggggaatggctggggctgggcaggaccctcccacacacctgcaccctagcttcgtgcttctctctccggactctcattatccaacccgctgcctccatttctctagatctgtgctctccgatgtggcagtcagtaaccataggtgactaaattaaactaaaataaaatagaatgaaacacaaaattcaattcctcggctgaactagccacatttcaactgctcagtagatacgtgtggttagtggctgccatactggacagctcggggcattttcactgtcaaagaaagttctattagacagccctgcttgagccctgtttcttcctggccttcggtttccctggggaacttatcgacaatgcaagctcctgggcccacccccagacctcctgaaccaaaagctccagggctggccgtatgatctgtgtggatggcaaactccccaggccattctgggacctaagtttaagaagtgccgtcctcgaactttctgactctaagctcctgagcgggagtcagacttagccctgagcctgcacttcctgttcaggtgcagacactgaacagggtctcaaacaccttcagcatgtgtgttgtgtgctcacgtgccacacagtgtctcatgcacacaacccagtgtacacaccacctacgtgcacacagcatccttccacactgtgtatgtgaacagcttgggccctgcaaacacaaccatctacacacatctacacccccaagcacacacacatggtccgtgccatgtcacctccatagggaaaggcttctctccaagtgtgccaggccaggacagccctcccagccatgaatccttactcagctacctcgggttggggtgggagccccagccaaatcctgggctccctgcctgtggctcagccccagctcccaaggcctgcctggctctgtctgaacagaaggtctgggggaagcgacgggtggagtacaataaagggaatgagg

SEQ ID NO: 129733 - DNA, 1200 bp, Artificial Sequence
  derived and/or modified sequence
atggccagaagattccaggaggagctggccgccttcctgttcgagtacgacacccccagaatggtgctggtgagaaacaagaaggtgggcgtgatcttcagactgatccagctggtggtgctggtgtacgtgatcggctgggtgttcctgtacgagaagggctaccagaccagcagcggcctgatcagcagcgtgagcgtgaagctgaagggcctggccgtgacccagctgcccggcctgggcccccaggtgtgggacgtggccgactacgtgttccccgcccagggcgacaacagcttcgtggtgatgaccaacttcatcgtgacccccaagcagacccagggctactgcgccgagcaccccgagggcggcatctgcaaggaggacagcggctgcacccccggcaaggccaagagaaaggcccagggcatcagaaccggcaagtgcgtggccttcaacgacaccgtgaagacctgcgagatcttcggctggtgccccgtggaggtggacgacgacatccccagacccgccctgctgagagaggccgagaacttcaccctgttcatcaagaacagcatcagcttccccagattcaaggtgaacagaagaaacctggtggaggaggtgaacgccgcccacatgaagacctgcctgttccacaagaccctgcaccccctgtgccccgtgttccagctgggctacgtggtgcaggagagcggccagaacttcagcaccctggccgagaagggcggcgtggtgggcatcaccatcgactggcactgcgacctggactggcacgtgagacactgcagacccatctacgagttccacggcctgtacgaggagaagaacctgagccccggcttcaacttcagattcgccagacacttcgtggagaacggcaccaactacagacacctgttcaaggtgttcggcatcagattcgacatcctggtggacggcaaggccggcaagttcgacatcatccccaccatgaccaccatcggcagcggcatcggcatcttcggcgtggccaccgtgctgtgcgacctgctgctgctgcacatcctgcccaagagacactactacaagcagaagaagttcaagtacgccgaggacatgggccccggcgccgccgagagagacctggccgccaccagcagcaccctgggcctgcaggagaacatgagaaccagctag

SEQ ID NO: 129734 - protein, 388 aa, Artificial Sequence
  derived and/or modified sequence
MAGCCAALAAFLFEYDTPRIVLIRSRKVGLMNRAVQLLILAYVIGWVFVWEKGYQETDSVVSSVTTKVKGVAVTNTSKLGFRIWDVADYVIPAQEENSLFVMTNVILTMNQTQGLCPEIPDATTVCKSDASCTAGSAGTHSNGVSTGRCVAFNGSVKTCEVAAWCPVEDDTHVPQPAFLKAAENFTLLVKNNIWYPKFNFSKRNILPNITTTYLKSCIYDAKTDPFCPIFRLGKIVENAGHSFQDMAVEGGIMGIQVNWDCNLDRAASLCLPRYSFRRLDTRDVEHNVSPGYNFRFAKYYRDLAGNEQRTLIKAYGIRFDIIVFGKAGKFDIIPTMINIGSGLALLGMATVLCDIIVLYCMKKRLYYREKKYKYVEDYEQGLASELDQ

SEQ ID NO: 129735 - protein, 287 aa, Artificial Sequence
  derived and/or modified sequence
MTNVILTMNQTQGLCPEIPDATTVCKSDASCTAGSAGTHSNGVSTGRCVAFNGSVKTCEVAAWCPVEDDTHVPQPAFLKAAENFTLLVKNNIWYPKFNFSKRNILPNITTTYLKSCIYDAKTDPFCPIFRLGKIVENAGHSFQDMAVEGGIMGIQVNWDCNLDRAASLCLPRYSFRRLDTRDVEHNVSPGYNFRFAKYYRDLAGNEQRTLIKAYGIRFDIIVFGKAGKFDIIPTMINIGSGLALLGMATVLCDIIVLYCMKKRLYYREKKYKYVEDYEQGLASELDQ

SEQ ID NO: 129736 - DNA, 1167 bp, Artificial Sequence
  derived and/or modified sequence
atggccggctgctgcgcagccctggctgcttttttgtttgagtacgacacaccccgtatagtgttaatcagatccagaaaagtgggcctgatgaacagggcagtgcagctactcatcttagcctacgtcataggttgggtatttgtctgggagaaaggatatcaggagacagacagtgttgtttcatccgttaccactaaagtgaagggtgtagctgtcactaacacctccaaactgggcttcaggatatgggacgtggcagattatgtgatccccgctcaggaggaaaatagcctatttgtgatgactaacgttatccttactatgaatcaaacacaaggactttgtccagagattcccgacgctactaccgtatgcaaatctgatgcctcttgtacggccgggtccgcgggtactcatagtaatggcgtgtctactggaagatgtgtggctttcaacggatccgtgaaaacatgcgaagtggccgcctggtgcccagtggaagatgatacacatgtgccgcagcctgcttttctcaaggccgcagaaaactttactctcctggttaaaaacaacatttggtatcccaagtttaacttttcaaaacgcaacatcctgcccaacatcaccacgacgtatctcaagagctgcatctatgacgccaagacagaccccttctgtccaatcttccgccttggcaaaattgtggagaacgccgggcacagtttccaggatatggctgttgaggggggaatcatgggaattcaggtcaactgggactgtaacctcgaccgtgcagcatcactctgcctgccgaggtactcctttagacggctcgatacccgcgatgtcgaacacaacgtctcgccaggatacaacttccgctttgcgaaatactatagggacctcgcaggcaatgaacagcgcacactgatcaaagcatacgggataaggtttgatatcatagtgtttggtaaagcagggaagttcgacattatccccaccatgatcaacatagggtccgggctggctctgctgggcatggctacagttctctgcgacataatcgtgctttactgcatgaagaagaggctgtattatagagaaaagaagtacaagtacgtggaggattatgagcagggcttggcatcagaactggatcagtag

SEQ ID NO: 129737 - DNA, 864 bp, Artificial Sequence
  derived and/or modified sequence
atgaccaatgtaatcttaactatgaaccaaacacagggcttgtgcccggaaatacctgacgcaaccactgtgtgtaaatcagacgcatcgtgtacggctggcagcgccgggactcattctaatggagtttctacagggagatgtgtggccttcaatgggagtgttaagacgtgtgaagtagccgcatggtgtcccgtcgaggatgatacgcatgttccccagcccgcctttctgaaggcagctgagaactttacactgctggtaaaaaataacatatggtaccccaaatttaattttagcaagaggaatatcttgccaaacattaccacaacctatctgaagtcttgtatatacgatgcaaagactgaccccttttgtccgatcttccgattgggcaagatcgttgagaacgctggccattcctttcaggatatggcagtggaaggcggcattatggggatccaagtgaactgggactgcaatctggatcgcgcagccagcttgtgcctgcccagatatagttttcgtcgcctggacactcgcgacgtggaacacaatgtgagtccaggctataacttccgtttcgctaagtactacagagacttagctggcaacgaacagcgaacgctgattaaggcttatgggatccgatttgatattatcgtcttcggtaaagcaggcaagtttgatattatccccaccatgattaatattgggtccggattagccttactgggcatggccaccgtgctgtgcgatatcatcgtcctatactgcatgaagaaacggctctactatagagagaagaagtataaatatgtggaggactatgagcagggcctggccagcgaactcgatcaatag

SEQ ID NO: 129738 - DNA, 1167 bp, Artificial Sequence
  derived and/or modified sequence
atggccggctgctgtgccgccctggccgccttcctgtttgaatatgacaccccccgcatcgtgctgatccgcagcaggaaggtgggcctgatgaacagagctgtgcagctgctgatcctggcctacgtgattggctgggtgtttgtgtgggagaagggctaccaggagacagattctgtggtgtcctctgtgaccaccaaggtgaagggcgtggccgtgaccaacaccagcaagctgggcttccgcatctgggatgtggccgactatgtgatcccagcccaggaggagaacagcctgtttgtgatgaccaacgtcatcctgaccatgaaccagacccagggcctgtgcccagagatcccagatgccaccaccgtgtgcaagagtgatgccagctgcacagctggcagcgctggcacccacagcaatggagtgtccacaggccgctgtgtggccttcaatggatctgtgaagacctgtgaggtggccgcctggtgccctgtggaggatgacacccacgtgccccagcctgccttcctgaaggctgctgagaacttcaccctgctggtgaagaacaacatctggtaccccaagttcaacttcagcaagaggaacatcctgcccaacatcaccaccacctacctgaagagctgcatctatgatgccaagacagaccccttctgccccatcttccggctgggcaagatcgtggagaatgccggccacagcttccaggacatggctgtggagggcggcatcatgggcatccaggtgaactgggactgcaacctggaccgggccgccagcctgtgcctgccccgctacagcttccggcggctggacaccagagatgtggagcacaacgtgtccccaggctacaacttccgctttgccaagtactacagagacctggccggaaatgagcagaggaccctcatcaaggcctacggcatccgctttgacatcatcgtgtttgggaaggccggcaagtttgacatcatccccaccatgatcaacatcggcagcggcctggccctgctgggcatggccaccgtgctgtgtgacatcatcgtgctgtactgcatgaagaagaggctgtactaccgggagaagaagtacaagtatgtggaggactatgagcagggcctggccagcgagctggaccagtag

SEQ ID NO: 129739 - DNA, 864 bp, Artificial Sequence
  derived and/or modified sequence
atgaccaacgtcatcctgaccatgaaccagacccagggcctgtgcccagagatcccagatgccaccaccgtgtgcaagagtgatgccagctgcacagctggcagcgctggcacccacagcaatggagtgtccacaggccgctgtgtggccttcaacggctctgtgaagacctgtgaggtggccgcctggtgccctgtggaggatgacacccacgtgccccagcctgccttcctgaaggctgctgagaacttcaccctgctggtgaagaacaacatctggtaccccaagttcaacttcagcaagaggaacatcctgcccaacatcaccaccacctacctgaagagctgcatctatgatgccaagacagaccccttctgccccatcttccggctgggcaagatcgtggagaatgccggccacagcttccaggacatggctgtggagggcggcatcatgggcatccaggtgaactgggactgcaacctggacagagctgccagcctgtgcctgccccgctacagcttccggcggctggacaccagagatgtggagcacaacgtgtccccaggctacaacttccgctttgccaagtactacagagacctggccggaaatgagcagaggaccctcatcaaggcctacggcatccgctttgacatcatcgtgtttgggaaggccggcaagtttgacatcatccccaccatgatcaacatcggcagcggcctggccctgctgggcatggccaccgtgctgtgtgacatcatcgtgctgtactgcatgaagaagaggctgtactaccgggagaagaagtacaagtatgtggaggactatgagcagggcctggccagcgagctggaccagtag

SEQ ID NO: 129740 - DNA, 1167 bp, Artificial Sequence
  derived and/or modified sequence
atggccggctgctgcgccgccctggccgccttcctgttcgagtacgacactcccaggatcgttctgattagatcacgaaaagtgggcttgatgaatagagccgttcaactcctaattttagcttacgtcataggctgggtctttgtgtgggagaagggttaccaggaaaccgactctgtggtttccagcgtcactactaaggttaaaggcgtggcagtgacgaacacatctaagcttgggtttaggatctgggatgtggcagactatgtgattccggctcaggaggaaaacagcctcttcgttatgaccaacgtgatactgacaatgaaccaaacacagggcctctgcccagagatccctgacgccacaacagtgtgtaagtccgatgctagctgtacagccggctccgccggaacacactctaatggggtgtccaccgggagatgtgtggccttcaacggatccgttaaaacatgcgaggttgccgcctggtgccctgtggaagacgacacccacgtccctcaaccagcatttctgaaagctgctgagaattttaccctcctggtcaagaataatatttggtatcctaagttcaacttcagtaagagaaacattcttcctaatataaccaccacttacctgaagagctgcatctatgacgccaagacagatccgttctgtccgatcttccgtctgggcaaaatagtggagaacgccggccactcctttcaggacatggcagtggaaggaggaatcatgggcatacaagtgaactgggattgcaacctggaccgggccgcgtcactgtgcttaccacggtactcctttcggcgattagatacccgggatgtggaacacaacgtcagtcccggatataattttaggtttgccaaatattacagagacctggctgggaatgaacagagaacactgatcaaagcgtacggaatccgattcgacattatcgtgttcgggaaggccgggaaatttgacatcatcccgacaatgattaatatcggctcagggcttgccctcctcggcatggccaccgtgctttgcgacattatagtgctgtactgtatgaaaaagcggctgtactatcgtgaaaagaaatacaagtatgtcgaggactatgaacagggcctggcctcagagctggaccaatag

SEQ ID NO: 129741 - DNA, 864 bp, Artificial Sequence
  derived and/or modified sequence
atgaccaacgtgatcctgaccatgaaccagacccagggcctgtgccctgagatcccagacgccaccacagtgtgcaagtccgacgcatcctgtaccgccggctccgctgggacacacagtaatggcgtcagcacaggaagatgtgtggccttcaatggttccgtcaaaacttgtgaggtcgcagcctggtgccctgtggaggatgacactcacgtgccacagcctgccttcttgaaagctgctgagaatttcacccttttagtgaagaataatatctggtaccccaagttcaatttcagcaagagaaacatactgcccaatattacaacaacctaccttaaatcctgtatatatgacgctaaaactgacccattctgccctatttttcggctgggcaaaatcgtagagaacgcaggacactctttccaggacatggccgtggaaggcggcatcatgggcattcaggttaattgggactgtaacctggatagggccgcatccctgtgtttaccaagatactcatttcgaaggctggacacacgggatgtcgaacataacgtaagccctgggtacaattttaggttcgccaagtactaccgagatctggccgggaacgaacagcgcaccctgatcaaggcttacggtattcgcttcgatattatcgtgttcggaaaggccggtaagtttgacatcattccgaccatgatcaatatcgggagcggactggcattgctcggcatggccaccgttctgtgtgacatcatagtcttgtactgtatgaaaaagcgcctctattatagggaaaagaaatacaaatatgtcgaagactatgaacagggcctggcatccgagctagatcagtag

SEQ ID NO: 129742 - DNA, 1167 bp, Artificial Sequence
  derived and/or modified sequence
atggcagggtgctgcgcagcactggccgcatttctcttcgagtacgatacgccacgcatagtgcttattaggtctcgaaaagtgggcctcatgaacagggccgtgcaactcctaattctggcgtatgtaatcggctgggtgtttgtgtgggagaagggttatcaggaaaccgacagcgtcgtgtcctcggtcacaaccaaagtgaagggggtggccgtcaccaatacctccaagctcggctttcgtatctgggacgtagccgactacgtcatccccgcacaggaagagaacagcctatttgtcatgactaatgtgatcttgacaatgaatcagacacaaggtctgtgcccagaaattcctgatgcgacaaccgtatgcaagagtgatgctagctgcactgccggatctgcaggcactcattctaacggggttagcactggtcggtgtgttgcatttaatggttccgtcaagacatgcgaagtcgccgcttggtgtccagtcgaggacgatacgcatgtcccccagcctgcatttcttaaggccgcagaaaatttcaccctgcttgtaaagaacaacatctggtatcctaaatttaacttttccaaaagaaacatcctcccaaatattacaaccacctatctcaaatcctgcatctatgacgccaagactgatcctttttgtccaatattcagattgggcaaaatcgttgaaaacgctggccattcctttcaggatatggcagttgagggcggtataatggggatccaggtgaattgggactgcaacctcgaccgcgcagcctctctgtgcctccctcggtattcctttagaagactcgatactcgggacgtggagcataatgtgagtcccggatacaatttccgttttgcaaagtactaccgggacctcgcaggaaatgagcagagaaccttaattaaagcctatggcatccgctttgatataatcgtatttggtaaagcgggtaaatttgatattatacctactatgattaacataggtagcggactagcactgctaggaatggccaccgtgctttgtgacatcattgtgctgtactgtatgaagaaacggctatattatcgtgagaaaaagtacaagtacgtcgaagactacgagcaaggcctggctagtgagctggaccagtag

SEQ ID NO: 129743 - DNA, 864 bp, Artificial Sequence
  derived and/or modified sequence
atgactaatgtcatcctgaccatgaatcagacccaaggactgtgcccggaaattcccgatgccaccaccgtgtgcaaaagtgatgcgtcttgtacagcaggcagtgccggtactcactcaaatggcgtctccacagggcgatgcgtggccttcaacggctcagtaaagacatgcgaggtggcagcctggtgtcccgttgaggatgacacacatgtgccccagcccgcatttctgaaagccgctgaaaatttcaccctgctcgtcaagaacaacatctggtaccccaagttcaacttcagcaagcgaaatatactgccgaacattacaacgacctaccttaaaagttgcatttacgacgcaaagaccgacccattttgcccaattttcaggctggggaagatcgtggagaacgctgggcattcttttcaggacatggcagtagagggcggtattatgggcatccaagtcaattgggactgtaacctggatagggccgcaagcttatgcttacccagatattccttcaggaggctcgatactagagatgtggagcataacgtgtcccctggctacaatttcagattcgccaaatactaccgcgatttggctgggaacgagcagcgcaccctcattaaggcatacggcatcaggtttgacattattgtgttcggaaaagctggaaaattcgatatcatccctacaatgatcaacattggtagcggactggcactcctgggcatggcaacagtgttgtgtgatattattgtgctgtactgtatgaagaagaggctgtactatcgggaaaagaagtataagtatgttgaagattatgagcagggcttggcaagtgagctggatcagtag

SEQ ID NO: 129744 - DNA, 2032 bp, Artificial Sequence
  derived and/or modified sequence
ccgcaagtgctgggatgacaggtgtgagccaccgcccccggcccctcgcccgccttttgaaggagcctttcgtcctcaagggcgaggccactccccccccgcgagttccatgccccctagagggtcatcgttcccgacggggaggtggcgccctcccccgggccccgggccccgaccgcccgtgctgcctccttccgggccctcctccgcgatgacggcgccgccagcaggccaggcggactgggcggggctccgagcggggactgggacccagaccgactaggggactgggagcgggcggcgcggccatggcgggctgctgcgccgcgctggcggccttcctgttcgagtacgacacgccgcgcatcgtgctcatccgcagccgcaaagtggggctcatgaaccgcgccgtgcaactgctcatcctggcctacgtcatcgggtgggtgtttgtgtgggaaaagggctaccaggaaactgactccgtggtcagctccgttacgaccaaggtcaagggcgtggctgtgaccaacacttctaaacttggattccggatctgggatgtggcggattatgtgataccagctcaggaggaaaactccctcttcgtcatgaccaacgtgatcctcaccatgaaccagacacagggcctgtgccccgagattccagatgcgaccactgtgtgtaaatcagatgccagctgtactgccggctctgccggcacccacagcaacggagtctcaacaggcaggtgcgtagctttcaacgggtctgtcaagacgtgtgaggtggcggcctggtgcccggtggaggatgacacacacgtgccacaacctgcttttttaaaggctgcagaaaacttcactcttttggttaagaacaacatctggtatcccaaatttaatttcagcaagaggaatatccttcccaacatcaccactacttacctcaagtcgtgcatttatgatgctaaaacagatcccttctgccccatattccgtcttggcaaaatagtggagaacgcaggacacagtttccaggacatggccgtggagggaggcatcatgggcatccaggtcaactgggactgcaacctggacagagccgcctccctctgcttgcccaggtactccttccgccgcctcgatacacgggacgttgagcacaacgtatctcctggctacaatttcaggtttgccaagtactacagagacctggctggcaacgagcagcgcacgctcatcaaggcctatggcatccgcttcgacatcattgtgtttgggaaggcagggaaatttgacatcatccccactatgatcaacatcggctctggcctggcactgctaggcatggcgaccgtgctgtgtgacatcatagtcctctactgcatgaagaaaagactctactatcgggagaagaaatataaatatgtggaagattacgagcagggtcttgctagtgagctggaccagtgaggcctaccccacacctgggctctccacagccccatcaaagaacagagaggaggaggagggagaaatggccaccacatcaccccagagaaatttctggaatctgattgagtctccactccacaagcactcagggttccccagcagctcctgtgtgttgtgtgcaggatctgtttgcccactcggcccaggaggtcagcagtctgttcttggctgggtcaactctgcttttcccgcaacctggggttgtcgggggagcgctggcccgacgcagtggcactgctgtggctttcagggctggagctggctttgctcagaagcctcctgtctccagctctctccaggacaggcccagtcctctgaggcacggcggctctgttcaagcactttatgcggcaggggaggccgcctggctgcagtcactagacttgtagcaggcctgggctgcaggcttccccccgaccattccctgcagccatgcggcagagctggcatttctcctcagagaagcgctgtgctaaggtgatcgaggaccagacattaaagcgtgattttcttaa

SEQ ID NO: 129745 - DNA, 1612 bp, Artificial Sequence
  derived and/or modified sequence
agaccgactaggggactgggagcgggcggcgcggccatggcgggctgctgcgccgcgctggcggccttcctgttcgagtacgacacgccgcgcatcgtgctcatccgcagccgcaaagtggggctcatgaaccgcgccgtgcaactgctcatcctggcctacgtcatcgggaggaaaactccctcttcgtcatgaccaacgtgatcctcaccatgaaccagacacagggcctgtgccccgagattccagatgcgaccactgtgtgtaaatcagatgccagctgtactgccggctctgccggcacccacagcaacggagtctcaacaggcaggtgcgtagctttcaacgggtctgtcaagacgtgtgaggtggcggcctggtgcccggtggaggatgacacacacgtgccacaacctgcttttttaaaggctgcagaaaacttcactcttttggttaagaacaacatctggtatcccaaatttaatttcagcaagaggaatatccttcccaacatcaccactacttacctcaagtcgtgcatttatgatgctaaaacagatcccttctgccccatattccgtcttggcaaaatagtggagaacgcaggacacagtttccaggacatggccgtggagggaggcatcatgggcatccaggtcaactgggactgcaacctggacagagccgcctccctctgcttgcccaggtactccttccgccgcctcgatacacgggacgttgagcacaacgtatctcctggctacaatttcaggtttgccaagtactacagagacctggctggcaacgagcagcgcacgctcatcaaggcctatggcatccgcttcgacatcattgtgtttgggaaggcagggaaatttgacatcatccccactatgatcaacatcggctctggcctggcactgctaggcatggcgaccgtgctgtgtgacatcatagtcctctactgcatgaagaaaagactctactatcgggagaagaaatataaatatgtggaagattacgagcagggtcttgctagtgagctggaccagtgaggcctaccccacacctgggctctccacagccccatcaaagaacagagaggaggaggagggagaaatggccaccacatcaccccagagaaatttctggaatctgattgagtctccactccacaagcactcagggttccccagcagctcctgtgtgttgtgtgcaggatctgtttgcccactcggcccaggaggtcagcagtctgttcttggctgggtcaactctgcttttcccgcaacctggggttgtcgggggagcgctggcccgacgcagtggcactgctgtggctttcagggctggagctggctttgctcagaagcctcctgtctccagctctctccaggacaggcccagtcctctgaggcacggcggctctgttcaagcactttatgcggcaggggaggccgcctggctgcagtcactagacttgtagcaggcctgggctgcaggcttccccccgaccattccctgcagccatgcggcagagctggcatttctcctcagagaagcgctgtgctaaggtgatcgaggaccagacattaaagcgtgattttcttaa

SEQ ID NO: 129746 - DNA, 1167 bp, Artificial Sequence
  derived and/or modified sequence
atggccggctgctgcgccgccctggccgccttcctgttcgagtacgacacccccagaatcgtgctgatcagaagcagaaaggtgggcctgatgaacagagccgtgcagctgctgatcctggcctacgtgatcggctgggtgttcgtgtgggagaagggctaccaggagaccgacagcgtggtgagcagcgtgaccaccaaggtgaagggcgtggccgtgaccaacaccagcaagctgggcttcagaatctgggacgtggccgactacgtgatccccgcccaggaggagaacagcctgttcgtgatgaccaacgtgatcctgaccatgaaccagacccagggcctgtgccccgagatccccgacgccaccaccgtgtgcaagagcgacgccagctgcaccgccggcagcgccggcacccacagcaacggcgtgagcaccggcagatgcgtggccttcaacggcagcgtgaagacctgcgaggtggccgcctggtgccccgtggaggacgacacccacgtgccccagcccgccttcctgaaggccgccgagaacttcaccctgctggtgaagaacaacatctggtaccccaagttcaacttcagcaagagaaacatcctgcccaacatcaccaccacctacctgaagagctgcatctacgacgccaagaccgaccccttctgccccatcttcagactgggcaagatcgtggagaacgccggccacagcttccaggacatggccgtggagggcggcatcatgggcatccaggtgaactgggactgcaacctggacagagccgccagcctgtgcctgcccagatacagcttcagaagactggacaccagagacgtggagcacaacgtgagccccggctacaacttcagattcgccaagtactacagagacctggccggcaacgagcagagaaccctgatcaaggcctacggcatcagattcgacatcatcgtgttcggcaaggccggcaagttcgacatcatccccaccatgatcaacatcggcagcggcctggccctgctgggcatggccaccgtgctgtgcgacatcatcgtgctgtactgcatgaagaagagactgtactacagagagaagaagtacaagtacgtggaggactacgagcagggcctggccagcgagctggaccagtag

SEQ ID NO: 129747 - DNA, 864 bp, Artificial Sequence
  derived and/or modified sequence
atgaccaacgtgatcctgaccatgaaccagacccagggcctgtgccccgagatccccgacgccaccaccgtgtgcaagagcgacgccagctgcaccgccggcagcgccggcacccacagcaacggcgtgagcaccggcagatgcgtggccttcaacggcagcgtgaagacctgcgaggtggccgcctggtgccccgtggaggacgacacccacgtgccccagcccgccttcctgaaggccgccgagaacttcaccctgctggtgaagaacaacatctggtaccccaagttcaacttcagcaagagaaacatcctgcccaacatcaccaccacctacctgaagagctgcatctacgacgccaagaccgaccccttctgccccatcttcagactgggcaagatcgtggagaacgccggccacagcttccaggacatggccgtggagggcggcatcatgggcatccaggtgaactgggactgcaacctggacagagccgccagcctgtgcctgcccagatacagcttcagaagactggacaccagagacgtggagcacaacgtgagccccggctacaacttcagattcgccaagtactacagagacctggccggcaacgagcagagaaccctgatcaaggcctacggcatcagattcgacatcatcgtgttcggcaaggccggcaagttcgacatcatccccaccatgatcaacatcggcagcggcctggccctgctgggcatggccaccgtgctgtgcgacatcatcgtgctgtactgcatgaagaagagactgtactacagagagaagaagtacaagtacgtggaggactacgagcagggcctggccagcgagctggaccagtag

SEQ ID NO: 129748 - protein, 422 aa, Artificial Sequence
  derived and/or modified sequence
MGQAGCKGLCLSLFDYKTEKYVIAKNKKVGLLYRLLQASILAYLVVWVFLIKKGYQDVDTSLQSAVITKVKGVAFTNTSDLGQRIWDVADYVIPAQGENVFFVVTNLIVTPNQRQNVCAENEGIPDGACSKDSDCHAGEAVTAGNGVKTGRCLRRENLARGTCEIFAWCPLETSSRPEEPFLKEAEDFTIFIKNHIRFPKFNFSKSNVMDVKDRSFLKSCHFGPKNHYCPIFRLGSVIRWAGSDFQDIALEGGVIGINIEWNCDLDKAASECHPHYSFSRLDNKLSKSVSSGYNFRFARYYRDAAGVEFRTLMKAYGIRFDVMVNGKGAFFCDLVLIYLIKKREFYRDKKYEEVRGLEDSSQEAEDEASGLGLSEQLTSGPGLLGMPEQQELQEPPEAKRGSSSQKGNGSVCPQLLEPHRST

SEQ ID NO: 129749 - protein, 432 aa, Artificial Sequence
  derived and/or modified sequence
MGQAGCKGLCLSLFDYKTEKYVIAKNKKVGLLYRLLQASILAYLVVWVFLIKKGYQDVDTSLQSAVITKVKGVAFTNTSDLGQRIWDVADYVIPAQGENVFFVVTNLIVTPNQRQNVCAENEGIPDGACSKDSDCHAGEAVTAGNGVKTGRCLRRENLARGTCEIFAWCPLETSSRPEEPFLKEAEDFTIFIKNHIRFPKFNFSKSNVMDVKDRSFLKSCHFGPKNHYCPIFRLGSVIRWAGSDFQDIALEGGVIGINIEWNCDLDKAASECHPHYSFSRLDNKLSKSVSSGYNFRFARYYRDAAGVEFRTLMKAYGIRFDVMVNGKGAFFCDLVLIYLIKKREFYRDKKYEEVRGLEDSSQEAEDEASGLGLSEQLTSGPGLLGMPEQQELQEPPEAKRGSSSQKGNGSVCPQLLEPHRLRTPSASPLHQE

SEQ ID NO: 129750 - DNA, 1299 bp, Artificial Sequence
  derived and/or modified sequence
atgggccaggccggctgcaagggcctgtgcctgagcctgttcgactacaagaccgagaagtacgtgatcgccaagaacaagaaggtgggcctgctgtacagactgctgcaggccagcatcctggcctacctggtggtgtgggtgttcctgatcaagaagggctaccaggacgtggacaccagcctgcagagcgccgtgatcaccaaggtgaagggcgtggccttcaccaacaccagcgacctgggccagagaatctgggacgtggccgactacgtgatccccgcccagggcgagaacgtgttcttcgtggtgaccaacctgatcgtgacccccaaccagagacagaacgtgtgcgccgagaacgagggcatccccgacggcgcctgcagcaaggacagcgactgccacgccggcgaggccgtgaccgccggcaacggcgtgaagaccggcagatgcctgagaagagagaacctggccagaggcacctgcgagatcttcgcctggtgccccctggagaccagcagcagacccgaggagcccttcctgaaggaggccgaggacttcaccatcttcatcaagaaccacatcagattccccaagttcaacttcagcaagagcaacgtgatggacgtgaaggacagaagcttcctgaagagctgccacttcggccccaagaaccactactgccccatcttcagactgggcagcgtgatcagatgggccggcagcgacttccaggacatcgccctggagggcggcgtgatcggcatcaacatcgagtggaactgcgacctggacaaggccgccagcgagtgccacccccactacagcttcagcagactggacaacaagctgagcaagagcgtgagcagcggctacaacttcagattcgccagatactacagagacgccgccggcgtggagttcagaaccctgatgaaggcctacggcatcagattcgacgtgatggtgaacggcaagggcgccttcttctgcgacctggtgctgatctacctgatcaagaagagagagttctacagagacaagaagtacgaggaggtgagaggcctggaggacagcagccaggaggccgaggacgaggccagcggcctgggcctgagcgagcagctgaccagcggccccggcctgctgggcatgcccgagcagcaggagctgcaggagccccccgaggccaagagaggcagcagcagccagaagggcaacggcagcgtgtgcccccagctgctggagccccacagactgagaacccccagcgccagccccctgcaccaggagtag

SEQ ID NO: 129751 - DNA, 1299 bp, Artificial Sequence
  derived and/or modified sequence
atgggccaggccggctgtaaaggcctttgcctgtccttattcgactacaaaactgagaagtatgtcatcgctaagaacaagaaagttggattgctgtatagactcttgcaggcatcaattttggcatacctagtggtatgggtttttttaatcaagaagggctatcaggatgtggacaccagcttacagagtgcggtgatcacaaaagtcaagggagttgctttcacaaacaccagcgatcttgggcagagaatctgggatgtggccgattacgtgatcccagctcagggcgaaaacgtgttttttgtggtgaccaatttgattgtgacacctaaccaacggcagaatgtgtgtgctgagaatgaaggaatccctgatggggcatgcagtaaggacagcgactgccacgctggggaagcagtgacagccggcaacggagtaaaaacaggccgctgcctgcgcagagagaacttagctcgtgggacatgcgagattttcgcttggtgtccactcgagacgtcgtcgaggcctgaggagcccttcctcaaggaagcggaggacttcactattttcatcaaaaatcacatcaggtttcctaagttcaacttttcaaaaagcaatgtcatggatgttaaggacaggagttttctgaagtcatgccacttcgggcccaaaaatcattactgtcctatattccggttaggttccgtaatccgctgggccgggtccgatttccaggatattgccctggaaggtggggtgattggtattaacatagagtggaattgcgatctggacaaagctgctagcgaatgtcatccacattattctttctccagacttgataacaaattatccaaatccgtcagctccgggtacaacttcagatttgccagatactacagagacgctgcaggcgtggagttccgtacactgatgaaggcatacggcatcaggtttgacgtgatggtgaacggtaaaggagcattcttctgcgacctggtgctgatttacctaattaagaaaagggagttctaccgtgacaagaaatatgaagaggttcgcggtctggaagactcatcgcaggaggccgaggacgaagcatccggattgggcctgtccgaacaactgacctcaggacccggcctactgggcatgcccgagcagcaggagctgcaggagcccccagaagctaagagaggctcttccagtcagaaaggcaatggttctgtttgcccacaacttctggagccacaccgccttcgaaccccttctgccagcccacttcaccaagaatag

SEQ ID NO: 129752 - DNA, 1299 bp, Artificial Sequence
  derived and/or modified sequence
atgggccaggccggctgcaagggcctgtgcctgagcctgtttgactacaagacagagaagtatgtgattgccaagaacaagaaggtgggcctgctgtaccgcctgctgcaggccagcatcctggcctacctggtggtgtgggtgttcctgatcaagaagggctaccaggatgtggacaccagcctgcagagcgctgtgatcaccaaggtgaagggcgtggccttcaccaacaccagtgacctgggccagaggatctgggatgtggccgactatgtgatcccagcccagggagaaaatgtgttctttgtggtgaccaacctgattgtgacccccaaccagaggcagaatgtgtgtgccgagaatgaaggcatcccagatggagcctgcagcaaggacagcgactgccacgccggggaggccgtgacagctggaaatggagtgaagacaggccgctgcctgcggcgggagaacctggcccggggcacctgtgagatctttgcctggtgccccctggagaccagcagcaggcctgaggagcccttcctgaaggaggccgaggacttcaccatcttcatcaagaaccacatccgcttccccaagttcaacttcagcaagagcaatgtgatggatgtgaaggaccgctccttcctgaagagctgccacttcggccccaagaaccactactgccccatcttccggctgggcagcgtcatccgctgggccggcagtgacttccaggacatcgccctggagggcggcgtgattggcatcaacatcgagtggaactgtgacctggacaaggccgccagcgagtgccacccccactacagcttcagccggctggacaacaagctgagcaagtctgtgagcagcggctacaacttccgctttgcccgctactacagagatgctgctggggtggagttccgcaccctgatgaaggcctacggcatccgctttgatgtgatggtgaatggaaaaggagccttcttctgtgacctggtgctgatctacctgatcaagaagcgggagttctacagagacaagaagtatgaggaggtgcggggcctggaggacagcagccaggaggctgaagatgaggccagcggcctgggcctgtctgagcagctgaccagcggccctggcctgctgggcatgcctgagcagcaggagctgcaggagcccccagaggccaagaggggcagcagcagccagaagggaaatggatctgtgtgcccccagctgctggagccccaccggctgcggaccccatctgccagccccctgcaccaggagtag

SEQ ID NO: 129753 - DNA, 1299 bp, Artificial Sequence
  derived and/or modified sequence
atgggccaggccggctgcaagggcctgtgcctgagcctgttcgactataaaactgaaaagtacgtgatcgctaagaacaagaaggtggggttgctttacagactgctccaagcgtccatcctggcctatttagtggtctgggtgttcctgatcaaaaaagggtaccaggatgttgacacaagtctgcagtctgcagtgatcactaaggtgaaaggggttgccttcaccaatacctccgacctcggccagcggatttgggacgtggcagactatgtcatcccggcccagggcgagaacgtattttttgttgtgacaaatctgatagtgacgccaaatcagcggcagaacgtatgtgccgagaatgagggaattcctgatggagcctgctctaaagactctgactgccacgcaggagaagctgtgacggctggcaacggggtcaaaacaggccgttgtctgaggcgcgagaatctggcacgaggaacatgcgaaatcttcgcctggtgcccgctcgaaacgtcctcacggcccgaggaaccgttcctgaaagaggccgaggactttacaattttcattaagaaccacattcgatttccgaaattcaatttctcaaaatccaatgtaatggatgtcaaagatcggagtttcttaaagagctgtcattttgggccaaagaaccactactgccccatcttcagactgggctctgtcatcaggtgggctggaagtgacttccaggacatcgccctggaagggggggtgataggaatcaatatagagtggaactgcgacctggacaaggccgcgagtgaatgccatccacactactccttttcgagactggacaacaagctgtctaaatctgtctctagcggctacaatttcagatttgccagatattatagagatgcggccggggtggaattcaggactcttatgaaggcctatggaattcggtttgacgtgatggtgaacggcaagggcgcattcttctgtgacctcgttttaatctatttgattaaaaagagagaattctacagggacaaaaagtacgaagaggtacgaggactggaagatagttctcaagaagcagaggatgaggcctcaggacttggtctcagtgagcagctcacttcaggtccgggtctgcttggcatgccagagcagcaagagctccaggagcccccggaagcgaaaagagggtccagtagccaaaaaggcaatggaagcgtgtgtccacaactcctggaaccccaccgactgcgcacaccaagcgctagccctctgcaccaggaatag

SEQ ID NO: 129754 - DNA, 2309 bp, Artificial Sequence
  derived and/or modified sequence
tccgcgatcgctgctttcagctgggcaacagcacagggcggtcctgcgcatccggggggctgcgctcccagaccggtggctggggagtaggttgcaggggtgtcactgtgtcaggggaggaggaggaggaggaggaagaagaggtagcggcaaggtcgcggtctgaggttccggtgctcgccgccgcccagctcccagccgaggctttctcaaccgcgtcaataaaaggccgccccgacccgcccccgcgccccgcagccctgccggacaccccgggctgcagctgagcgggcgcagacgggccgaggcgggcgccgggcgcgcagggaccgagggaccgagtgctccccatgagcgcacgtgggccgggcggtccgcaagcccggctgagagcgcgccatggggcaggcgggctgcaaggggctctgcctgtcgctgttcgactacaagaccgagaagtatgtcatcgccaagaacaagaaggtgggcctgctgtaccggctgctgcaggcctccatcctggcgtacctggtcgtatgggtgttcctgataaagaagggttaccaagacgtcgacacctccctgcagagtgctgtcatcaccaaagtcaagggcgtggccttcaccaacacctcggatcttgggcagcggatctgggatgtcgccgactacgtcattccagcccagggagagaacgtcttttttgtggtcaccaacctgattgtgacccccaaccagcggcagaacgtctgtgctgagaatgaaggcattcctgatggcgcgtgctccaaggacagcgactgccacgctggggaagcggttacagctggaaacggagtgaagaccggccgctgcctgcggagagagaacttggccaggggcacctgtgagatctttgcctggtgcccgttggagacaagctccaggccggaggagccattcctgaaggaggccgaagacttcaccattttcataaagaaccacatccgtttccccaaattcaacttctccaaaagcaatgtgatggacgtcaaggacagatctttcctgaaatcatgccactttggccccaagaaccactactgccccatcttccgactgggctccgtgatccgctgggccgggagcgacttccaggatatagccctggagggtggcgtgataggaattaatattgaatggaactgtgatcttgataaagctgcctctgagtgccaccctcactattcttttagccgtctggacaataaactttcaaagtctgtctcctccgggtacaacttcagatttgccagatattaccgagacgcagccggggtggagttccgcaccctgatgaaagcctacgggatccgctttgacgtgatggtgaacggcaagggtgctttcttctgcgacctggtactcatctacctcatcaaaaagagagagttttaccgtgacaagaagtacgaggaagtgaggggcctagaagacagttcccaggaggccgaggacgaggcatcggggctggggctatctgagcagctcacatctgggccagggctgctggggatgccggagcagcaggagctgcaggagccacccgaggcgaagcgtggaagcagcagtcagaaggggaacggatctgtgtgcccacagctcctggagccccacaggagcacgtgaattgcctctgcttacgttcaggccctgtcctaaacccagccgtctagcacccagtgatcccatgcctttgggaatcccaggatgctgcccaacgggaaatttgtacattgggtgctatcaatgccacatcacagggaccagccatcacagagcaaagtgacctccacgtctgatgctggggtcatcaggacggacccatcatggctgtctttttgccccaccccctgccgtcagttcttcctttctccgtggctggcttcccgcactagggaacgggttgtaaatggggaacatgacttccttccggagtccttgagcacctcagctaaggaccgcagtgccctgtagagttcctagattacctcactgggaatagcattgtgcgtgtccggaaaagggctccatttggttccagcccactcccctctgcaagtgccgcagcttccctcagagcatactctccagtggatccaagtactctctctcctaaagacaccaccttcctgccagctgtttgcccttaggccagtacacagaattaaagtgggggagatggcagacgctttctgggacctgcccaagatatgtattctctgacactcttatttggtcataaaacaataaatggtgtcaatttcaaa

SEQ ID NO: 129755 - DNA, 1508 bp, Artificial Sequence
  derived and/or modified sequence
gctcccagccgaggctttctcaaccgcgtcaataaaaggccgccccgacccgcccccgcgccccgcagccctgccggacaccccgggctgcagctgagcgggcgcagacgggccgaggcgggcgccgggcgcgcagggaccgagggaccgagtgctccccatgagcgcacgtgggccgggcggtccgcaagcccggctgagagcgcgccatggggcaggcgggctgcaaggggctctgcctgtcgctgttcgactacaagaccgagaagtatgtcatcgccaagaacaagaaggtgggcctgctgtaccggctgctgcaggcctccatcctggcgtacctggtcgtatgggtgttcctgataaagaagggttaccaagacgtcgacacctccctgcagagtgctgtcatcaccaaagtcaagggcgtggccttcaccaacacctcggatcttgggcagcggatctgggatgtcgccgactacgtcattccagcccagggagagaacgtcttttttgtggtcaccaacctgattgtgacccccaaccagcggcagaacgtctgtgctgagaatgaaggcattcctgatggcgcgtgctccaaggacagcgactgccacgctggggaagcggttacagctggaaacggagtgaagaccggccgctgcctgcggagagagaacttggccaggggcacctgtgagatctttgcctggtgcccgttggagacaagctccaggccggaggagccattcctgaaggaggccgaagacttcaccattttcataaagaaccacatccgtttccccaaattcaacttctccaaaagcaatgtgatggacgtcaaggacagatctttcctgaaatcatgccactttggccccaagaaccactactgccccatcttccgactgggctccgtgatccgctgggccgggagcgacttccaggatatagccctggagggtggcgtgataggaattaatattgaatggaactgtgatcttgataaagctgcctctgagtgccaccctcactattcttttagccgtctggacaataaactttcaaagtctgtctcctccgggtacaacttcagatttgccagatattaccgagacgcagccggggtggagttccgcaccctgatgaaagcctacgggatccgctttgacgtgatggtgaacggcaagggtgctttcttctgcgacctggtactcatctacctcatcaaaaagagagagttttaccgtgacaagaagtacgaggaagtgaggggcctagaagacagttcccaggaggccgaggacgaggcatcggggctggggctatctgagcagctcacatctgggccagggctgctggggatgccggagcagcaggagctgcaggagccacccgaggcgaagcgtggaagcagcagtcagaaggggaacggatctgtgtgcccacagctcctggagccccacaggctgaggactccctctgcttctcccttacaccaggaatga

SEQ ID NO: 129756 - DNA, 1299 bp, Artificial Sequence
  derived and/or modified sequence
atggggcaagccggatgcaaggggctttgtctgagccttttcgattataaaaccgagaaatatgtgattgctaagaacaaaaaagtaggattgctatacaggctgctccaggcctctatcctcgcctacctcgtcgtgtgggtgtttttgattaagaaggggtaccaagatgtggatacttctttgcagtccgcagtgataactaaggtgaagggggtagctttcaccaacacttcagacctcggacagcgcatttgggacgtagcagattatgtcattcctgcccaaggcgagaacgttttttttgtggtgacaaacctgatcgtgactccgaatcaaaggcagaatgtgtgcgccgaaaatgaaggcatcccagacggagcatgcagtaaagatagtgattgtcatgcaggggaagcggtgacggccggaaacggagtgaaaacgggcaggtgtctgcggcgagagaatcttgctcgaggaacttgcgagattttcgcttggtgcccactggaaaccagctcccgtcctgaagaaccgtttctcaaggaggctgaggactttacaattttcataaagaatcatattcgatttcccaagttcaacttttccaaatctaacgtgatggacgtgaaggaccggagcttcctgaagtcatgtcactttggaccaaagaatcactactgcccaatcttcagactggggtcagtgatacgctgggccggtagtgattttcaggatatcgcactggagggaggagtgattggtatcaacatagagtggaattgcgaccttgacaaggctgcgagtgaatgccatcctcactattccttttcaaggctggacaacaaactttcaaagagtgtctctagcggctataactttagattcgccaggtactacagggatgctgcaggcgttgagttccggacattaatgaaagcctacggtattaggtttgacgtcatggttaatggcaagggtgccttcttctgtgatctagtgttgatttacctcatcaagaaaagggaattctaccgcgacaagaaatacgaggaggtgcgtggcctcgaagattcttctcaggaagctgaggatgaggcctctggattgggcctcagtgaacagttaacgagtggtcccggtctattagggatgccagagcaacaggagctgcaagagccaccagaggccaagcgtggcagcagctctcagaagggcaacgggtccgtctgtcctcagctgctcgaaccacaccggttacgaacaccctccgcctcacctttgcaccaggagtag

SEQ ID NO: 129757 - DNA, 1269 bp, Artificial Sequence
  derived and/or modified sequence
atgggtcaagctggctgtaaaggtctgtgcctgtccctattcgactacaaaactgagaaatacgtgatcgctaaaaataaaaaggtgggcctgctttatcgcctgttacaggctagcatactcgcctacctggtagtgtgggtttttttgataaaaaaaggctatcaggatgtcgacaccagccttcagtccgccgtgatcacaaaagtgaaaggagtcgccttcaccaatactagcgacttgggacaaagaatctgggatgtggcagactacgtcataccagctcagggggagaatgtgttcttcgtggtgacgaatctgatcgtgaccccaaatcagcggcagaacgtgtgcgctgaaaacgaaggcattccggacggcgcatgcagcaaagatagcgactgccacgccggagaagcagttacagctggcaacggggtaaaaaccgggcggtgtctgcggcgtgagaacttggccaggggtacgtgtgaaatcttcgcctggtgccctctggagacatccagtcgccccgaggaaccattcttaaaggaggctgaagactttactattttcatcaaaaatcatattcgcttccccaagtttaactttagcaaatccaatgtgatggacgtgaaggaccgttctttcctgaagagttgccattttggacctaagaaccattactgtcctatttttaggttgggctcagtgatcagatgggcggggtctgattttcaagacatagccctcgaagggggtgtcattggtatcaatatcgaatggaattgtgacctggataaggccgccagcgaatgtcacccacactactctttctcgcgcttggacaataaactctctaagagcgtgtcctccggttataatttcaggttcgcacgctattaccgggacgcagctggcgtggaattccgtacacttatgaaggcctatggaattagatttgatgtgatggtgaatggaaaaggagcattcttctgtgatttggtgttgatatatctcataaaaaaacgcgaattctatagagataagaagtatgaggaggtgcggggcttagaagacagcagccaagaggcagaagacgaagcctcaggattgggtctgtctgaacaactgacaagcggccctggactacttggtatgcccgaacagcaggaactccaagaacctcccgaggcgaagcgcggctcttcgtcacagaaaggcaacgggagtgtgtgcccacagttgttggagccacaccgctctacgtag

SEQ ID NO: 129758 - DNA, 1269 bp, Artificial Sequence
  derived and/or modified sequence
atgggccaggccggctgcaagggcctgtgcctgagcctgtttgactacaagacagagaagtatgtgattgccaagaacaagaaggtgggcctgctgtaccgcctgctgcaggccagcatcctggcctacctggtggtgtgggtgttcctgatcaagaagggctaccaggatgtggacaccagcctgcagagcgctgtgatcaccaaggtgaagggcgtggccttcaccaacaccagtgacctgggccagaggatctgggatgtggccgactatgtgatcccagcccagggagaaaatgtgttctttgtggtgaccaacctgattgtgacccccaaccagaggcagaatgtgtgtgccgagaatgaaggcatcccagatggagcctgcagcaaggacagcgactgccacgccggggaggccgtgacagctggaaatggagtgaagacaggccgctgcctgcggcgggagaacctggcccggggcacctgtgagatctttgcctggtgccccctggagaccagcagcaggcctgaggagcccttcctgaaggaggccgaggacttcaccatcttcatcaagaaccacatccgcttccccaagttcaacttcagcaagagcaatgtgatggatgtgaaggaccgctccttcctgaagagctgccacttcggccccaagaaccactactgccccatcttccggctgggcagcgtcatccgctgggccggcagtgacttccaggacatcgccctggagggcggcgtgattggcatcaacatcgagtggaactgtgacctggacaaggccgccagcgagtgccacccccactacagcttcagccggctggacaacaagctgagcaagtctgtgagcagcggctacaacttccgctttgcccgctactacagagatgctgctggggtggagttccgcaccctgatgaaggcctacggcatccgctttgatgtgatggtgaatggaaaaggagccttcttctgtgacctggtgctgatctacctgatcaagaagcgggagttctacagagacaagaagtatgaggaggtgcggggcctggaggacagcagccaggaggctgaagatgaggccagcggcctgggcctgtctgagcagctgaccagcggccctggcctgctgggcatgcctgagcagcaggagctgcaggagcccccagaggccaagaggggcagcagcagccagaagggaaatggatctgtgtgcccccagctgctggagccccacaggagcacctag

SEQ ID NO: 129759 - DNA, 1269 bp, Artificial Sequence
  derived and/or modified sequence
atgggccaggccggctgcaagggcctgtgcctgagcctgttcgactataagacagagaaatacgtaattgcaaagaataaaaaagtagggctactgtatagactgttgcaggcctctattctggcttacttagtggtgtgggtctttcttatcaaaaaaggttatcaagatgtagacacaagtttacagtccgccgtaatcacaaaggtgaaaggagttgccttcactaacacttccgatttaggccagcggatctgggatgtggctgattacgtcattccggctcaaggggagaatgtgttcttcgtggtaaccaatctgatcgtgacacctaaccagcgtcaaaatgtatgcgcggaaaacgaaggcattccagatggcgcttgttccaaggattctgattgtcatgcgggtgaagccgtcaccgccgggaatggcgtgaaaactggacgttgcctcaggcgggagaatctcgcaagaggtacatgcgagatctttgcctggtgccctctggagacgagcagtcgccctgaagagcctttcctcaaagaggcagaagactttacgatcttcattaaaaaccacatcaggtttccgaagttcaactttagcaaatccaacgtcatggacgtgaaagaccgcagttttctgaagagctgccacttcgggcccaagaaccattattgtccaatttttcgactggggtccgtcatccgctgggcgggctctgattttcaggacattgctctcgaaggaggggtgattgggatcaacatcgaatggaactgtgaccttgacaaggcagcatccgagtgtcacccacactactccttctcacggttggataataaactgagcaagtcagtgtctagcggctacaacttcagatttgcaagatactaccgcgatgccgccggggtggagtttaggaccctgatgaaagcatatggcatcaggttcgatgttatggttaatggcaagggcgctttcttttgcgacctggttcttatttacctgattaagaagagggaattctatcgggacaaaaagtatgaggaagttcgtggcctggaagatagctcccaggaggccgaagatgaagcctccggtctcgggttgagcgagcaactcaccagcggccccggactgcttgggatgccagagcaacaggagctgcaagaacctccggaggcaaagcggggcagctcaagccaaaaagggaacggatcagtgtgtccccagctcctggagcctcatcggtctacatag

SEQ ID NO: 129760 - DNA, 1269 bp, Artificial Sequence
  derived and/or modified sequence
atgggacaagccggatgcaaaggcctatgtctgtccttgttcgactacaaaacagaaaaatacgtgattgccaagaacaaaaaagtgggcctgctgtaccggctcctgcaggcctcaatccttgcgtatctggtcgtctgggtgttcctgatcaaaaagggatatcaggatgtggatacttccctgcagagcgctgtgatcacgaaagtgaaaggcgtggcatttacaaacacttccgacttagggcagaggatttgggacgtggcagactatgtcatccctgcacagggcgaaaacgtatttttcgtcgtaactaatcttatcgtgacacccaatcaacgtcagaatgtttgcgcggaaaatgagggcattcccgatggggcatgctccaaggactctgactgccatgctggcgaagccgttaccgccggtaatggagttaagaccggcaggtgtctgaggagggagaatctggcaagaggtacctgcgagatctttgcctggtgcccgctggagacatcttcccggccagaagaaccattcttgaaggaagccgaggatttcacaatatttatcaagaaccatattcggtttcctaagttcaattttagcaagagcaacgtgatggatgtcaaggacaggagttttttaaagtcctgtcactttgggcctaagaatcattactgcccgatctttcggctcggctctgtgatcaggtgggcgggttccgatttccaggacattgccttggagggaggtgtgattggtatcaatatcgagtggaactgcgatctggacaaggctgcaagcgagtgccacccacactatagtttcagtcggctggataataaattgtcgaagagcgtgtcctctgggtataatttccgcttcgccaggtattacagggatgccgctggcgtggagttcagaacgctcatgaaggcttatggcattcggttcgacgtgatggtcaatgggaagggcgctttcttttgcgacttagtcctgatttacttgataaaaaaacgcgaattttacagagataagaagtacgaggaggtacgcggtctggaggattctagccaggaggctgaggacgaggccagtggtttggggttgagtgagcagttgactagtggcccagggttactcggcatgcctgaacagcaggaacttcaggagcctccagaggccaagcgtggctccagtagccagaagggtaatggatccgtgtgtcctcagctgctagagccacaccgatcaacctag

SEQ ID NO: 129761 - DNA, 1269 bp, Artificial Sequence
  derived and/or modified sequence
atgggccaggccggctgcaagggcctgtgcctgagcctgttcgactacaagaccgagaagtacgtgatcgccaagaacaagaaggtgggcctgctgtacagactgctgcaggccagcatcctggcctacctggtggtgtgggtgttcctgatcaagaagggctaccaggacgtggacaccagcctgcagagcgccgtgatcaccaaggtgaagggcgtggccttcaccaacaccagcgacctgggccagagaatctgggacgtggccgactacgtgatccccgcccagggcgagaacgtgttcttcgtggtgaccaacctgatcgtgacccccaaccagagacagaacgtgtgcgccgagaacgagggcatccccgacggcgcctgcagcaaggacagcgactgccacgccggcgaggccgtgaccgccggcaacggcgtgaagaccggcagatgcctgagaagagagaacctggccagaggcacctgcgagatcttcgcctggtgccccctggagaccagcagcagacccgaggagcccttcctgaaggaggccgaggacttcaccatcttcatcaagaaccacatcagattccccaagttcaacttcagcaagagcaacgtgatggacgtgaaggacagaagcttcctgaagagctgccacttcggccccaagaaccactactgccccatcttcagactgggcagcgtgatcagatgggccggcagcgacttccaggacatcgccctggagggcggcgtgatcggcatcaacatcgagtggaactgcgacctggacaaggccgccagcgagtgccacccccactacagcttcagcagactggacaacaagctgagcaagagcgtgagcagcggctacaacttcagattcgccagatactacagagacgccgccggcgtggagttcagaaccctgatgaaggcctacggcatcagattcgacgtgatggtgaacggcaagggcgccttcttctgcgacctggtgctgatctacctgatcaagaagagagagttctacagagacaagaagtacgaggaggtgagaggcctggaggacagcagccaggaggccgaggacgaggccagcggcctgggcctgagcgagcagctgaccagcggccccggcctgctgggcatgcccgagcagcaggagctgcaggagccccccgaggccaagagaggcagcagcagccagaagggcaacggcagcgtgtgcccccagctgctggagccccacagaagcacctag

SEQ ID NO: 129762 - protein, 425 aa, Artificial Sequence
  derived and/or modified sequence
MDGPAEQRPALLNSAENFTVLIKNNIDFPGHNYTTRNILPGLNITCTFHKTQNPQCPIFRLGDIFRETGDNFSDVAIQGGIMGIEIYWDCNLDRWFHHCRPKYSFRRLDDKTTNVSLYPGYNFRYAKYYKENNVEKRTLIKVFGIRFDILVFGTGGKFDIIQLVVYIGSTLSYFGLAAVFIDFLIDTYSSNCCRSHIYPWCKCCQPCVVNEYYYRKKCESIVEPKPTLKYVSFVDESHIRMVNQQLLGRSLQDVKGQEVPRPAMDFTDLSRLPLALHDTPPIPGQPEEIQLLRKEATPRSRDSPVWCQCGSCLPSQLPESHRCLEELCCRKKPGACITTSELFRKLVLSRHVLQFLLLYQEPLLALDVDSTNSRLRHCAYRCYATWRFGSQDMADFANLPSCCRWRIRKEFPKSEGQYSGFKSPY

SEQ ID NO: 129763 - protein, 505 aa, Artificial Sequence
  derived and/or modified sequence
MTPGDHSWGNSFFVMTNFLKTEGQEQRLCPEYPTRRTLCSSDRGCKKGWMDPQSKGIQTGRCVVYEGNQKTCEVSAWCPIEAVEEAPRPALLNSAENFTVLIKNNIDFPGHNYTTRNILPGLNITCTFHKTQNPQCPIFRLGDIFRETGDNFSDVAIQGGIMGIEIYWDCNLDRWFHHCRPKYSFRRLDDKTTNVSLYPGYNFRYAKYYKENNVEKRTLIKVFGIRFDILVFGTGGKFDIIQLVVYIGSTLSYFGLAAVFIDFLIDTYSSNCCRSHIYPWCKCCQPCVVNEYYYRKKCESIVEPKPTLKYVSFVDESHIRMVNQQLLGRSLQDVKGQEVPRPAMDFTDLSRLPLALHDTPPIPGQPEEIQLLRKEATPRSRDSPVWCQCGSCLPSQLPESHRCLEELCCRKKPGACITTSELFRKLVLSRHVLQFLLLYQEPLLALDVDSTNSRLRHCAYRCYATWRFGSQDMADFANLPSCCRWRIRKEFPKSEGQYSGFKSPY

SEQ ID NO: 129764 - protein, 595 aa, Artificial Sequence
  derived and/or modified sequence
MPACCSCSDVFQYETNKVTRIQSMNYGTIKWFFHVIIFSYVCFALVSDKLYQRKEPVISSVHTKVKGIAEVKEEIVENGVKKLVHSVFDTADYTFPLQGNSFFVMTNFLKTEGQEQRLCPEYPTRRTLCSSDRGCKKGWMDPQSKGIQTGRCVVYEGNQKTCEVSAWCPIEAVEEAPRPALLNSAENFTVLIKNNIDFPGHNYTTRNILPGLNITCTFHKTQNPQCPIFRLGDIFRETGDNFSDVAIQGGIMGIEIYWDCNLDRWFHHCRPKYSFRRLDDKTTNVSLYPGYNFRYAKYYKENNVEKRTLIKVFGIRFDILVFGTGGKFDIIQLVVYIGSTLSYFGLAAVFIDFLIDTYSSNCCRSHIYPWCKCCQPCVVNEYYYRKKCESIVEPKPTLKYVSFVDESHIRMVNQQLLGRSLQDVKGQEVPRPAMDFTDLSRLPLALHDTPPIPGQPEEIQLLRKEATPRSRDSPVWCQCGSCLPSQLPESHRCLEELCCRKKPGACITTSELFRKLVLSRHVLQFLLLYQEPLLALDVDSTNSRLRHCAYRCYATWRFGSQDMADFANLPSCCRWRIRKEFPKSEGQYSGFKSPY

SEQ ID NO: 129765 - DNA, 1518 bp, Artificial Sequence
  derived and/or modified sequence
atgactcctggagatcactcgtggggtaattctttttttgtgatgaccaactttttgaagacagagggtcaggagcagcggctctgcccggaatacccgactcgccgcaccctgtgttcatctgacagaggttgtaagaagggctggatggatccacaaagcaaaggcatacagacaggcagatgcgtggtgtatgagggaaaccagaagacttgcgaggtaagcgcatggtgccctattgaagccgtggaggaagcaccccgccctgccctgttaaacagtgcagagaacttcaccgtgttgattaagaacaatattgactttcccggccacaattacaccacccgtaacatcttgcctggcctgaacatcacatgcacctttcataaaacacaaaaccctcagtgccccatctttaggctgggcgacatttttcgggagacgggggataatttctctgatgtggcaattcagggcggcattatgggcattgaaatctactgggattgcaatttggaccgatggttccatcactgccgtcccaaatattcttttcgccggctggatgataagaccactaatgtgtccctatacccagggtataacttcaggtacgccaaatactacaaagaaaacaatgtcgaaaagcggaccctgattaaagtgttcgggatacggtttgatattctggtttttggtactggcggcaagtttgatatcatccagctggtcgtttacatcgggtccaccttatcttatttcggtctagctgcggttttcatcgacttccttatcgacacatattctagtaattgctgccgctcccatatttatccctggtgtaaatgctgtcagccatgcgttgttaacgaatactattaccggaagaagtgtgaatcaatagtggagccaaaaccaaccctgaaatacgtcagttttgtggacgaaagccacatccggatggtgaaccagcagctcctcgggcgctcactacaggacgtgaaaggtcaagaagtaccccgcccagccatggattttacagacttgtcccgcctgccattagcactccacgatacccctccgatccccggccagcctgaggagatccagctcttgcgcaaggaggcgacgccccgctccagagattcgccagtatggtgtcaatgcggctcttgcttacctagtcagcttcccgaaagtcatcggtgtctggaagaactgtgctgtagaaaaaaaccaggtgcctgcatcaccacaagtgagctgttcagaaaattggttctttctcggcacgtgctgcagttcctgcttctttaccaggagccactgctagccctcgacgtcgactccactaattcccggctgaggcattgtgcctatagatgctatgctacctggagattcggaagccaagatatggctgattttgccaatctgcccagttgttgccggtggaggattcggaaagagttccccaaaagcgaagggcagtatagcggattcaagtcaccctactag

SEQ ID NO: 129766 - DNA, 1788 bp, Artificial Sequence
  derived and/or modified sequence
atgcctgcatgttgcagctgctccgacgtctttcagtatgagactaataaggtgaccaggatacagtcgatgaactacgggaccatcaaatggttttttcacgtcatcatattctcgtatgtgtgctttgccttggtgagcgacaaactctaccagcggaaggagccagtcatttctagtgtgcatactaaagtcaagggcatcgccgaggtaaaagaagagatcgtggagaatggggtaaaaaagttggtgcatagtgtctttgacactgccgactacacgttcccgctccagggcaacagcttcttcgtcatgacaaactttctgaagactgaggggcaggaacagcgtctttgccccgaataccctaccagacggactttgtgcagcagcgatagaggatgtaagaagggctggatggatccccagtcaaagggcattcaaacagggagatgtgttgtatacgaagggaaccagaagacttgcgaggtgagcgcatggtgcccaattgaggcggttgaggaggcaccacggcctgcgttgctgaatagtgccgaaaatttcacagtgcttatcaagaacaacatcgattttcccggccacaactacacgacgcgcaacattctccccggtctgaatatcacttgcacttttcacaagactcagaatcctcagtgtccaattttccgtctgggagacatatttcgggagacaggcgacaatttcagtgacgtagctattcagggagggatcatggggatcgagatctactgggattgtaacctggaccggtggttccaccactgcagacccaagtactccttccgtcgtctggacgacaagaccaccaacgtatccctgtaccccggctataactttcgatatgctaagtactacaaagagaataatgtggagaagcgcacccttatcaaagtctttggcatcagattcgatatccttgtattcgggaccgggggaaaatttgatatcatccaattggtggtttacattggctctaccctttcctattttgggctggcagctgtcttcatcgacttcctgattgatacgtacagcagcaattgctgtcgttcccacatttacccatggtgcaagtgttgccagccttgcgtggtgaatgagtattattaccggaaaaaatgcgagagcattgtcgaacccaagcccacactgaaatacgtgtcgtttgtggacgagtcacacattaggatggtgaaccagcaactcctggggcgctcactgcaggatgtgaagggacaagaagttccaaggccggccatggattttaccgacctaagtagactcccactcgccttgcacgatactcctccgattccaggccagcccgaggagatccaacttttacgaaaagaagctacaccaagatcgcgggacagcccggtgtggtgccagtgcgggtcctgtctgccttcccaattgcccgaatctcatagatgtcttgaggagctttgttgtcgcaaaaaacccggagcctgtatcacaacctctgaactcttccgtaagcttgtgctgtccaggcatgttctgcagttcctgctgctgtaccaggaacccctgctggccttggatgtcgactcaacaaacagtcggctacggcactgtgcctaccgctgctacgcaacatggagattcggatcccaggatatggccgactttgcaaatctgcccagctgctgccggtggagaatcagaaaagagttccccaaatcagaaggacagtactccggctttaaatcaccctattag

SEQ ID NO: 129767 - DNA, 1518 bp, Artificial Sequence
  derived and/or modified sequence
atgacccctggggaccacagctggggcaacagcttctttgtgatgaccaacttcctgaagacagagggccaggagcagaggctgtgcccagagtaccccaccaggaggaccctgtgcagcagtgaccggggctgcaagaagggctggatggacccccagagcaagggcatccagacaggccgctgtgtggtgtatgagggcaaccagaagacctgtgaggtgtctgcctggtgccccatcgaggccgtggaggaggcccccaggcctgccctgctgaacagcgctgagaacttcaccgtgctgatcaagaacaacatcgacttccctggccacaactacaccaccaggaacatcctgcccggcctgaacatcacctgcaccttccacaagacccagaacccccagtgccccatcttccggctgggggacatcttccgggagaccggggacaacttcagtgatgtggccatccagggcggcatcatgggcatcgagatctactgggactgcaacctggaccgctggttccaccactgccggcccaagtacagcttccggcggctggatgacaagaccaccaacgtgtccctgtacccaggctacaacttccgctatgccaagtactacaaggaaaataatgtggagaagaggaccctcatcaaggtgtttggcatccgctttgacatcctggtgtttggcaccggcggcaagtttgacatcatccagctggtggtgtacatcggcagcaccctgagctacttcggcctggccgctgtgttcatcgacttcctgattgacacctacagcagcaactgctgccgcagccacatctacccctggtgcaagtgctgccagccctgtgtggtgaatgagtactactacaggaagaagtgtgagagcatcgtggagcccaagcccaccctgaagtatgtgtcctttgtggatgagagccacatccgcatggtgaaccagcagctgctgggccgcagcctgcaggatgtgaagggccaggaggtgcccaggcctgccatggacttcacagacctgagccggctgcccctggccctgcatgacaccccacccatccctggccagcctgaggagatccagctgctgaggaaggaggccacccccaggagccgggacagccctgtgtggtgccagtgtggcagctgcctgcccagccagctgcctgagagccaccgctgcctggaggagctgtgctgcaggaagaagccaggggcctgcatcaccaccagcgagctgttcaggaagctggtgctgagcagacatgtgctgcagttcctgctgctgtaccaggagcccctgctggccctggatgtggacagcaccaacagccggctgcggcactgtgcctaccgctgctacgccacctggaggtttggcagccaggacatggctgactttgccaacctgcccagctgctgccgctggaggatcaggaaggagttccccaagtctgagggccagtacagcggcttcaagagcccctactag

SEQ ID NO: 129768 - DNA, 1788 bp, Artificial Sequence
  derived and/or modified sequence
atgcctgcctgctgcagctgcagtgatgtgttccagtatgagaccaacaaggtgacccgcatccagagcatgaactacggcaccatcaagtggttcttccacgtgatcatcttctcctatgtgtgctttgccctggtgtctgacaagctgtaccagaggaaggagcccgtcatcagctctgtgcacaccaaggtgaagggcattgctgaggtgaaggaggagatcgtggagaatggagtgaagaagctggtgcacagcgtgtttgacacagctgactacaccttccccctgcagggcaacagcttctttgtgatgaccaacttcctgaagacagagggccaggagcagaggctgtgcccagagtaccccaccaggaggaccctgtgcagcagtgaccggggctgcaagaagggctggatggacccccagagcaagggcatccagacaggccgctgtgtggtgtatgagggcaaccagaagacctgtgaggtgtctgcctggtgccccatcgaggccgtggaggaggcccccaggcctgccctgctgaacagcgctgagaacttcaccgtgctgatcaagaacaacatcgacttccctggccacaactacaccaccaggaacatcctgcccggcctgaacatcacctgcaccttccacaagacccagaacccccagtgccccatcttccggctgggggacatcttccgggagaccggggacaacttcagtgatgtggccatccagggcggcatcatgggcatcgagatctactgggactgcaacctggaccgctggttccaccactgccggcccaagtacagcttccggcggctggatgacaagaccaccaacgtgtccctgtacccaggctacaacttccgctatgccaagtactacaaggaaaataatgtggagaagaggaccctcatcaaggtgtttggcatccgctttgacatcctggtgtttggcaccggcggcaagtttgacatcatccagctggtggtgtacatcggcagcaccctgagctacttcggcctggccgctgtgttcatcgacttcctgattgacacctacagcagcaactgctgccgcagccacatctacccctggtgcaagtgctgccagccctgtgtggtgaatgagtactactacaggaagaagtgtgagagcatcgtggagcccaagcccaccctgaagtatgtgtcctttgtggatgagagccacatccgcatggtgaaccagcagctgctgggccgcagcctgcaggatgtgaagggccaggaggtgcccaggcctgccatggacttcacagacctgagccggctgcccctggccctgcatgacaccccacccatccctggccagcctgaggagatccagctgctgaggaaggaggccacccccaggagccgggacagccctgtgtggtgccagtgtggcagctgcctgcccagccagctgcctgagagccaccgctgcctggaggagctgtgctgcaggaagaagccaggggcctgcatcaccaccagcgagctgttcaggaagctggtgctgagcagacatgtgctgcagttcctgctgctgtaccaggagcccctgctggccctggatgtggacagcaccaacagccggctgcggcactgtgcctaccgctgctacgccacctggaggtttggcagccaggacatggctgactttgccaacctgcccagctgctgccgctggaggatcaggaaggagttccccaagtctgagggccagtacagcggcttcaagagcccctactag

SEQ ID NO: 129769 - DNA, 1518 bp, Artificial Sequence
  derived and/or modified sequence
atgacccccggcgaccacagctggggcaacagcttcttcgtgatgacaaactttctgaaaaccgaaggccaggagcaacgcttgtgtcccgagtacccaacaagaaggaccttatgctcatcggatcggggctgtaagaaaggttggatggacccacagtccaaaggaattcagacaggacgctgcgtcgtttatgagggcaatcagaaaacctgcgaagtgtctgcttggtgccctatcgaagccgtagaggaggccccccgacctgccctcctcaattctgctgaaaatttcacggtgcttattaagaacaacattgacttccccggccataactatacaactcgtaacatactccctggacttaatatcacatgtactttccacaagacacagaatccccagtgtcccatctttcgcctcggcgacatcttccgcgaaaccggcgacaacttctcagacgtcgcaatccaagggggaataatgggaatcgagatctattgggactgtaacctggacaggtggtttcatcattgccgacctaaatattcattccgtcggctggatgataagacgacgaatgtgtctttataccctggctacaacttcaggtatgctaagtactataaggaaaacaacgttgagaaacgaacacttatcaaggtcttcggaattcggtttgatatcttggtgtttggtaccgggggaaagttcgatatcatccagctggttgtctacattggaagcaccctatcttactttggccttgctgctgttttcatcgattttctcattgatacctattcctctaactgctgccgttctcacatttacccttggtgtaagtgctgccagccgtgcgtggtgaatgaatattactatagaaaaaagtgtgagtcaatagttgagcccaaaccgaccctgaagtacgtatcatttgtcgatgagtctcatatcagaatggtaaatcagcagctgctgggtcgctctctgcaagacgtcaaagggcaggaagtaccccgtcctgccatggatttcaccgacctgagccggttgccattagctctccacgacacaccacccatacccggtcagcctgaagagatccagttattgaggaaggaagcaacccctaggtcccgtgatagtccagtctggtgtcaatgcgggtcttgcctaccatctcagctccctgaaagtcacaggtgtctggaggaactctgttgccggaagaagcccggagcgtgcatcacgacctcagagctttttcgaaaactagtgctgtcacgacatgtcctgcagtttcttctactctatcaggagccgctcttggcactcgatgtggattcaaccaattcaaggctgcgtcactgcgcttatcggtgttacgcaacctggagattcggtagccaagacatggccgattttgctaatctacctagctgttgtcgatggcgtattcggaaagagttccctaaatcagagggacagtacagtggctttaagtccccatattag

SEQ ID NO: 129770 - DNA, 1788 bp, Artificial Sequence
  derived and/or modified sequence
atgcccgcctgctgcagctgcagcgacgtgttccagtacgagaccaacaaggtaacaagaatccagagtatgaattatggaaccataaagtggttttttcacgttatcatcttctcctacgtttgttttgccctggtgtcggacaagctgtatcaaaggaaggagcccgttatcagctccgtacatacaaaggtgaagggcattgcagaagtgaaagaggaaattgtcgagaatggcgtgaagaagttggtccatagtgtttttgacacagcggactataccttccctcttcagggaaattcctttttcgttatgacaaacttcctgaagaccgaaggacaggagcagagattgtgcccagaataccctactcgtcgtacattgtgtagctctgaccgcggatgcaaaaaaggctggatggacccacagagtaagggaattcagacagggagatgcgtagtgtatgagggaaatcagaagacctgcgaggtaagcgcctggtgccccatagaagccgtagaagaagctccaagacctgctcttctcaacagcgctgaaaattttacggtgctgataaaaaacaatattgactttcctggtcacaactacactactagaaacattcttccagggctcaacattacctgcacctttcacaaaacacaaaacccacagtgtcctatttttcggcttggggacatcttccgggagacgggggacaacttcagcgacgtggccattcaagggggcatcatgggtattgagatttactgggattgtaatctagaccggtggttccatcactgcagacccaagtatagcttccgaaggctggacgacaagaccaccaacgtgtccctgtatccaggttacaatttccggtacgccaaatactacaaggaaaacaatgtggagaagcggaccttgatcaaggtattcggtatcagatttgatatcctagtgttcggcaccggcggcaaatttgatataattcagctggtggtctacataggctccacattatcatattttgggctggcagctgttttcatcgatttcctgattgatacatatagctccaattgctgcagaagccacatatatccttggtgcaaatgttgtcagccctgtgtagtgaatgaatattactatcggaaaaaatgcgaatctattgtcgaacctaagcctacactgaagtatgtgtcttttgtggatgaatcacacatccgcatggtaaaccagcagctgctaggcaggagtcttcaagatgtgaagggccaggaggttcccagacccgcaatggatttcacggacctgtctaggctaccactggctctgcatgacaccccgcctataccgggccaaccagaggagatccagctactgaggaaggaggccacaccgcgcagtcgggatagcccagtctggtgtcaatgtgggtcatgcctcccctctcagctgcccgaatctcatcgatgcctagaagaactgtgttgcaggaaaaagcccggagcctgcataacgacctctgagctgttccgaaaacttgtgctgtcccgccatgtccttcagtttctgctcctgtaccaggagcctctgctggctctggatgtggattccaccaactctaggcttagacactgcgcatatcgctgttatgctacttggcggtttgggagtcaggacatggccgacttcgccaatctcccgtcttgctgccggtggcggatcagaaaagagttcccaaagtctgagggccagtattccggattcaaaagtccatattag

SEQ ID NO: 129771 - DNA, 1518 bp, Artificial Sequence
  derived and/or modified sequence
atgactcctggggaccattcgtggggaaacagcttctttgtgatgactaatttcctgaaaacggagggtcaagaacagcggctatgccctgagtacccgactagaagaactctgtgttcatccgatcggggatgtaaaaaaggatggatggacccccagagcaaggggatccagacaggtagatgtgtcgtgtacgaagggaatcagaagacttgcgaggtatctgcttggtgccccatcgaggctgtcgaagaggctccccgacctgcgctgttgaattcagccgagaattttaccgtcttgatcaagaacaacatcgacttccctgggcataactacacgacacggaatattctacctggcctcaatattacatgcaccttccacaaaacccagaacccacagtgccccatctttcgcctgggggacatctttagggagaccggagataacttttctgatgtggcgattcagggagggattatgggcatcgagatctactgggattgcaatctagaccggtggttccaccactgtcggcctaagtattcatttcgccgtctggacgacaaaaccaccaacgtgtccctgtaccccggatataatttcagatacgcgaagtattacaaggaaaataatgttgagaaacgaactttaattaaggtttttgggattcgcttcgatatcctggtattcggtaccggaggaaaattcgatatcattcagctggtggtgtatatcggtagcactctgagctactttggcctcgccgcagtttttatcgacttcctgatcgacacatacagtagcaactgctgcagatctcacatctacccctggtgtaagtgctgccagccttgtgtggtgaacgagtactactacaggaaaaagtgcgagagtatagttgagccaaagcccaccttgaagtacgtttcttttgtggatgaatctcacatccggatggtgaatcagcagcttttgggcaggagtctccaagacgtaaaaggccaggaagtgccccgacccgcaatggatttcactgatctgtcacgcttgccactggccctccacgatacaccccctattccgggacaaccagaggaaattcagcttctcaggaaggaggccaccccaagatcacgggatagccctgtatggtgccagtgtggctcatgtctacccagccagttgcccgaatctcatcgttgcctcgaagagctgtgttgccggaagaaacccggtgcttgcatcacgacgtccgagctgttccgtaagctcgtactgagtaggcacgtgctgcagtttctcttgctctatcaggagcccctgctggctcttgacgtggactccaccaatagtcgcctgaggcactgcgcctaccggtgttatgccacttggagatttggatctcaagacatggctgattttgctaatctgcctagttgctgccgatggcgcatccgcaaagaattccccaaaagcgaaggtcagtactccggctttaagtcgccgtattag

SEQ ID NO: 129772 - DNA, 1788 bp, Artificial Sequence
  derived and/or modified sequence
atgcctgcttgttgcagctgcagcgatgtgtttcagtacgagaccaacaaagttacccgtatacagtccatgaactatggcacgatcaaatggttcttccacgtgatcatcttttcctacgtctgctttgccctggtgagtgataagctgtatcagaggaaggagccagttatctcaagcgtccacactaaagtcaaggggattgctgaagtcaaagaagaaatcgtggagaacggggtgaagaagctggttcacagcgtcttcgataccgcggactacacattccccctacagggcaattcgttctttgtaatgaccaatttcctgaagaccgagggccaggaacagaggttgtgtcctgagtaccccaccaggcgcaccctgtgttccagcgatcgcggatgcaaaaagggctggatggatccccaaagcaaagggattcaaacaggacgctgcgtcgtttacgagggtaaccaaaagacgtgtgaagtgtccgcttggtgccctatcgaagctgtcgaggaggcccctcgacctgccttgcttaactcggcagagaactttaccgtgctgatcaaaaacaatatcgattttccaggccacaattatactactagaaatatccttcctgggctcaatataacttgtacatttcacaaaacacagaaccctcagtgtcctatcttccgcttgggtgacattttccgagagactggggataatttttcagatgtggccatccagggcggtataatgggcattgagatttattgggattgtaacctggaccggtggttccaccattgtcgaccaaagtactcattccgcaggctcgatgacaaaaccaccaacgtatccctgtaccctggctataactttaggtatgccaagtattataaggagaataacgtggagaagcggaccctcattaaagtcttcggtataaggtttgatattctcgtattcgggacaggtgggaaatttgatatcatccagctggtagtctatattggaagcactctgagctactttggcctggccgcagtattcattgactttctgatcgacacttatagctctaattgttgccgctcccatatatatccctggtgtaagtgctgccagccctgcgtcgtgaatgaatactattataggaagaagtgtgaaagcatcgtcgaacccaagccgactctgaaatacgtcagcttcgttgacgagtctcacatcaggatggtgaaccaacagttattgggaagatcactgcaggacgtgaaaggtcaggaagtgcctcgccctgccatggattttacagacctgtcacgcttgccactagctttgcatgatactccacccataccagggcagccggaggagatccaacttctgcggaaggaagctactccacggagccgagattcaccagtgtggtgccagtgtggttcttgtctgccaagccagctacctgagagccaccggtgtctggaggagctatgctgcaggaaaaagcctggggcatgcatcaccacgtctgagctttttcgcaaactagtcctcagtcgccatgtgttacagtttttgctgctgtatcaggagcctttgttggcattggacgttgactccaccaactcacgcctaagacattgtgcttaccgctgctacgcgacttggaggttcggctctcaggacatggcagacttcgcaaatctgccgtcctgttgtagatggcgcataagaaaggagttccctaaatctgagggacagtattctgggtttaaatccccttactag

SEQ ID NO: 129773 - DNA, 2983 bp, Artificial Sequence
  derived and/or modified sequence
gagctctggtccagctccgcgcagggagggaggctgtcaccatgccggcctgctgcagctgcagtgatgttttccagtatgagacgaacaaagtcactcggatccagagcatgaattatggcaccattaagtggttcttccacgtgatcatcttttcctacgtttgctttgctctggtgagtgacaagctgtaccagcggaaagagcctgtcatcagttctgtgcacaccaaggtgaaggggatagcagaggtgaaagaggagatcgtggagaatggagtgaagaagttggtgcacagtgtctttgacaccgcagactacaccttccctttgcaggggaactctttcttcgtgatgacaaactttctcaaaacagaaggccaagagcagcggttgtgtcccgagtatcccacccgcaggacgctctgttcctctgaccgaggttgtaaaaagggatggatggacccgcagagcaaaggcctgctctcttgaacagtgccgaaaacttcactgtgctcatcaagaacaatatcgacttccccggccacaactacaccacgagaaacatcctgccaggtttaaacatcacttgtaccttccacaagactcagaatccacagtgtcccattttccgactaggagacatcttccgagaaacaggcgataatttttcagatgtggcaattcagggcggaataatgggcattgagatctactgggactgcaacctagaccgttggttccatcactgccgtcccaaatacagtttccgtcgccttgacgacaagaccaccaacgtgtccttgtaccctggctacaacttcagatacgccaagtactacaaggaaaacaatgttgagaaacggactctgataaaagtcttcgggatccgttttgacatcctggtttttggcaccggaggaaaatttgacattatccagctggttgtgtacatcggctcaaccctctcctacttcggtctggccgctgtgttcatcgacttcctcatcgacacttactccagtaactgctgtcgctcccatatttatccctggtgcaagtgctgtcagccctgtgtggtcaacgaatactactacaggaagaagtgcgagtccattgtggagccaaagccgacattaaagtatgtgtcctttgtggatgaatcccacattaggatggtgaaccagcagctactagggagaagtctgcaagatgtcaagggccaagaagtcccaagacctgcgatggacttcacagatttgtccaggctgcccctggccctccatgacacacccccgattcctggacaaccagaggagatacagctgcttagaaaggaggcgactcctagatccagggatagccccgtctggtgccagtgtggaagctgcctcccatctcaactccctgagagccacaggtgcctggaggagctgtgctgccggaaaaagccgggggcctgcatcaccacctcagagctgttcaggaagctggtcctgtccagacacgtcctgcagttcctcctgctctaccaggagcccttgctggcgctggatgtggattccaccaacagccggctgcggcactgtgcctacaggtgctacgccacctggcgcttcggctcccaggacatggctgactttgccaacctgcccagctgctgccgctggaggatccggaaagagtttccgaagagtgaagggcagtacagtggcttcaagagtccttactgaagccaggcaccgtggctcacgtctgtaatcccagcgctttgggaggccgaggcaggcagatcacctgaggtcgggagttggagacccgcctggctaacaaggcgaaatcctgtctgtactaaaaatacaaaaatcagccagacatggtggcatgcacctgcaatcccagctactcgggaggctgaggcacaagaatcacttgaacccgggaggcagaggttgtagtgagcccagattgtgccactgctctccagcctgggaggcacagcaaactgtcccccaaaaaaaaaaaagagtccttaccaatagcaggggctgcagtagccatgttaacatgacatttaccagcaacttgaacttcacctgcaaagctctgtggccacattttcagccaaagggaaatatgctttcatcttctgttgctctctgtgtctgagagcaaagtgacctggttaaacaaaccagaatccctctacatggactcagagaaaagagattgagatgtaagtctcaactctgtccccaggaagttgtgtgaccctaggcctctcacctctgtgcctctgtctccttgttgcccaactactatctcagagatattgtgaggacaaattgagacagtgcacatgaactgtcttttaatgtgtaaagatctacatgaatgcaaaacatttcattatgaggtcagactaggataatgtccaactaaaaacaaacccttttcatcctggctggagaatgtggagaactaaaggtggccacaaattctttgacactcaagtcccccaagacctaagggttttatctcctccccttgaatatgggtggctctgattgctttatccaaaagtggaagtgacattgtgtcagtttcagatcctgatcttaagaggctgacagcttctacttgctgtcccttggaactcttgctatcggggaagccagacgccatttaaaagtctgcctatcctggccaggtgtggtggctcacacctgtaatcccagcactttgggagaccaaggcgggcggatcacttaaagtcaggagtccaagaccagactcgccaacatggtgaaaccgtatctctaataaaaatacaaaaattagctgggcatggtgcgggcacctgtagtcctagctatcaagaggctgagacaggagaaacacttgaacctgggaggtggaggttgcattgagctgagatcgtgccactgcactccaggctgggtgacagagcgagactccatctc

SEQ ID NO: 129774 - DNA, 1927 bp, Artificial Sequence
  derived and/or modified sequence
atgccggcctgctgcagctgcagtgatgttttccagtatgagacgaacaaagtcactcggatccagagcatgaattatggcaccattaagtggttcttccacgtgatcatcttttcctacgtttgctttgctctggtgagtgacaagctgtaccagcggaaagagcctgtcatcagttctgtgcacaccaaggtgaaggggatagcagaggtgaaagaggagatcgtggagaatggagtgaagaagttggtgcacagtgtctttgacaccgcagactacaccttccctttgcagctttttagacgcacagccaccaagccagcaaggtctgccgagattcagaaggacagagaactttctaccaaagagcaccagcccttctagattgtgtagcatttcatcaacaaaaatgactccaggagaccattcttgggggaactctttcttcgtgatgacaaactttctcaaaacagaaggccaagagcagcggttgtgtcccgagtatcccacccgcaggacgctctgttcctctgaccgaggttgtaaaaagggatggatggacccgcagagcaaaggaattcagaccggaaggtgtgtagtgtatgaagggaaccagaagacctgtgaagtctctgcctggtgccccatcgaggcagtggaagaggccccccggcctgctctcttgaacagtgccgaaaacttcactgtgctcatcaagaacaatatcgacttccccggccacaactacaccacgagaaacatcctgccaggtttaaacatcacttgtaccttccacaagactcagaatccacagtgtcccattttccgactaggagacatcttccgagaaacaggcgataatttttcagatgtggcaattcagggcggaataatgggcattgagatctactgggactgcaacctagaccgttggttccatcactgccgtcccaaatacagtttccgtcgccttgacgacaagaccaccaacgtgtccttgtaccctggctacaacttcagatacgccaagtactacaaggaaaacaatgttgagaaacggactctgataaaagtcttcgggatccgttttgacatcctggtttttggcaccggaggaaaatttgacattatccagctggttgtgtacatcggctcaaccctctcctacttcggtctggccgctgtgttcatcgacttcctcatcgacacttactccagtaactgctgtcgctcccatatttatccctggtgcaagtgctgtcagccctgtgtggtcaacgaatactactacaggaagaagtgcgagtccattgtggagccaaagccgacattaaagtatgtgtcctttgtggatgaatcccacattaggatggtgaaccagcagctactagggagaagtctgcaagatgtcaagggccaagaagtcccaagacctgcgatggacttcacagatttgtccaggctgcccctggccctccatgacacacccccgattcctggacaaccagaggagatacagctgcttagaaaggaggcgactcctagatccagggatagccccgtctggtgccagtgtggaagctgcctcccatctcaactccctgagagccacaggtgcctggaggagctgtgctgccggaaaaagccgggggcctgcatcaccacctcagagctgttcaggaagctggtcctgtccagacacgtcctgcagttcctcctgctctaccaggagcccttgctggcgctggatgtggattccaccaacagccggctgcggcactgtgcctacaggtgctacgccacctggcgcttcggctcccaggacatggctgactttgccaacctgcccagctgctgccgctggaggatccggaaagagtttccgaagagtgaagggcagtacagtggcttcaagagtccttactga

SEQ ID NO: 129775 - DNA, 2664 bp, Artificial Sequence
  derived and/or modified sequence
gtcattggaggagcttgaagttaaagactcctgctaaaaaccagtacgtttcattttgcagttactgggagggggcttgctgtggccctgtcaggaagagtagagctctggtccagctccgcgcagggagggaggctgtcaccatgccggcctgctgcagctgcagtgatgttttccagtatgagacgaacaaagtcactcggatccagagcatgaattatggcaccattaagtggttcttccacgtgatcatcttttcctacgtttgctttgctctggtgagtgacaagctgtaccagcggaaagagcctgtcatcagttctgtgcacaccaaggtgaaggggatagcagaggtgaaagaggagatcgtggagaatggagtgaagaagttggtgcacagtgtctttgacaccgcagactacaccttccctttgcaggggaactctttcttcgtgatgacaaactttctcaaaacagaaggccaagagcagcggttgtgtcccgagtatcccacccgcaggacgctctgttcctctgaccgaggttgtaaaaagggatggatggacccgcagagcaaaggaattcagaccggaaggtgtgtagtgtatgaagggaaccagaagacctgtgaagtctctgcctggtgccccatcgaggcagtggaagaggccccccggcctgctctcttgaacagtgccgaaaacttcactgtgctcatcaagaacaatatcgacttccccggccacaactacaccacgagaaacatcctgccaggtttaaacatcacttgtaccttccacaagactcagaatccacagtgtcccattttccgactaggagacatcttccgagaaacaggcgataatttttcagatgtggcaattcagggcggaataatgggcattgagatctactgggactgcaacctagaccgttggttccatcactgccgtcccaaatacagtttccgtcgccttgacgacaagaccaccaacgtgtccttgtaccctggctacaacttcagatacgccaagtactacaaggaaaacaatgttgagaaacggactctgataaaagtcttcgggatccgttttgacatcctggtttttggcaccggaggaaaatttgacattatccagctggttgtgtacatcggctcaaccctctcctacttcggtctggccgctgtgttcatcgacttcctcatcgacacttactccagtaactgctgtcgctcccatatttatccctggtgcaagtgctgtcagccctgtgtggtcaacgaatactactacaggaagaagtgcgagtccattgtggagccaaagccgacattaaagtatgtgtcctttgtggatgaatcccacattaggatggtgaaccagcagctactagggagaagtctgcaagatgtcaagggccaagaagtcccaagacctgcgatggacttcacagatttgtccaggctgcccctggccctccatgacacacccccgattcctggacaaccagaggagatacagctgcttagaaaggaggcgactcctagatccagggatagccccgtctggtgccagtgtggaagctgcctcccatctcaactccctgagagccacaggtgcctggaggagctgtgctgccggaaaaagccgggggcctgcatcaccacctcagagctgttcaggaagctggtcctgtccagacacgtcctgcagttcctcctgctctaccaggagcccttgctggcgctggatgtggattccaccaacagccggctgcggcactgtgcctacaggtgctacgccacctggcgcttcggctcccaggacatggctgactttgccaacctgcccagctgctgccgctggaggatccggaaagagtttccgaagagtgaagggcagtacagtggcttcaagagtccttactgaagccaggcaccgtggctcacgtctgtaatcccagcgctttgggaggccgaggcaggcagatcacctgaggtcgggagttggagacccgcctggctaacaaggcgaaatcctgtctgtactaaaaatacaaaaatcagccagacatggtggcatgcacctgcaatcccagctactcgggaggctgaggcacaagaatcacttgaacccgggaggcagaggttgtagtgagcccagattgtgccactgctctccagcctgggaggcacagcaaactgtcccccaaaaaaaaaaaagagtccttaccaatagcaggggctgcagtagccatgttaacatgacatttaccagcaacttgaacttcacctgcaaagctctgtggccacattttcagccaaagggaaatatgctttcatcttctgttgctctctgtgtctgagagcaaagtgacctggttaaacaaaccagaatccctctacatggactcagagaaaagagattgagatgtaagtctcaactctgtccccaggaagttgtgtgaccctaggcctctcacctctgtgcctctgtctccttgttgcccaactactatctcagagatattgtgaggacaaattgagacagtgcacatgaactgtcttttaatgtgtaaagatctacatgaatgcaaaacatttcattatgaggtcagactaggataatgtccaactaaaaacaaacccttttcatcctggct

SEQ ID NO: 129776 - DNA, 1518 bp, Artificial Sequence
  derived and/or modified sequence
atgacccccggcgaccacagctggggcaacagcttcttcgtgatgaccaacttcctgaagaccgagggccaggagcagagactgtgccccgagtaccccaccagaagaaccctgtgcagcagcgacagaggctgcaagaagggctggatggacccccagagcaagggcatccagaccggcagatgcgtggtgtacgagggcaaccagaagacctgcgaggtgagcgcctggtgccccatcgaggccgtggaggaggcccccagacccgccctgctgaacagcgccgagaacttcaccgtgctgatcaagaacaacatcgacttccccggccacaactacaccaccagaaacatcctgcccggcctgaacatcacctgcaccttccacaagacccagaacccccagtgccccatcttcagactgggcgacatcttcagagagaccggcgacaacttcagcgacgtggccatccagggcggcatcatgggcatcgagatctactgggactgcaacctggacagatggttccaccactgcagacccaagtacagcttcagaagactggacgacaagaccaccaacgtgagcctgtaccccggctacaacttcagatacgccaagtactacaaggagaacaacgtggagaagagaaccctgatcaaggtgttcggcatcagattcgacatcctggtgttcggcaccggcggcaagttcgacatcatccagctggtggtgtacatcggcagcaccctgagctacttcggcctggccgccgtgttcatcgacttcctgatcgacacctacagcagcaactgctgcagaagccacatctacccctggtgcaagtgctgccagccctgcgtggtgaacgagtactactacagaaagaagtgcgagagcatcgtggagcccaagcccaccctgaagtacgtgagcttcgtggacgagagccacatcagaatggtgaaccagcagctgctgggcagaagcctgcaggacgtgaagggccaggaggtgcccagacccgccatggacttcaccgacctgagcagactgcccctggccctgcacgacaccccccccatccccggccagcccgaggagatccagctgctgagaaaggaggccacccccagaagcagagacagccccgtgtggtgccagtgcggcagctgcctgcccagccagctgcccgagagccacagatgcctggaggagctgtgctgcagaaagaagcccggcgcctgcatcaccaccagcgagctgttcagaaagctggtgctgagcagacacgtgctgcagttcctgctgctgtaccaggagcccctgctggccctggacgtggacagcaccaacagcagactgagacactgcgcctacagatgctacgccacctggagattcggcagccaggacatggccgacttcgccaacctgcccagctgctgcagatggagaatcagaaaggagttccccaagagcgagggccagtacagcggcttcaagagcccctactag

SEQ ID NO: 129777 - DNA, 1788 bp, Artificial Sequence
  derived and/or modified sequence
atgcccgcctgctgcagctgcagcgacgtgttccagtacgagaccaacaaggtgaccagaatccagagcatgaactacggcaccatcaagtggttcttccacgtgatcatcttcagctacgtgtgcttcgccctggtgagcgacaagctgtaccagagaaaggagcccgtgatcagcagcgtgcacaccaaggtgaagggcatcgccgaggtgaaggaggagatcgtggagaacggcgtgaagaagctggtgcacagcgtgttcgacaccgccgactacaccttccccctgcagggcaacagcttcttcgtgatgaccaacttcctgaagaccgagggccaggagcagagactgtgccccgagtaccccaccagaagaaccctgtgcagcagcgacagaggctgcaagaagggctggatggacccccagagcaagggcatccagaccggcagatgcgtggtgtacgagggcaaccagaagacctgcgaggtgagcgcctggtgccccatcgaggccgtggaggaggcccccagacccgccctgctgaacagcgccgagaacttcaccgtgctgatcaagaacaacatcgacttccccggccacaactacaccaccagaaacatcctgcccggcctgaacatcacctgcaccttccacaagacccagaacccccagtgccccatcttcagactgggcgacatcttcagagagaccggcgacaacttcagcgacgtggccatccagggcggcatcatgggcatcgagatctactgggactgcaacctggacagatggttccaccactgcagacccaagtacagcttcagaagactggacgacaagaccaccaacgtgagcctgtaccccggctacaacttcagatacgccaagtactacaaggagaacaacgtggagaagagaaccctgatcaaggtgttcggcatcagattcgacatcctggtgttcggcaccggcggcaagttcgacatcatccagctggtggtgtacatcggcagcaccctgagctacttcggcctggccgccgtgttcatcgacttcctgatcgacacctacagcagcaactgctgcagaagccacatctacccctggtgcaagtgctgccagccctgcgtggtgaacgagtactactacagaaagaagtgcgagagcatcgtggagcccaagcccaccctgaagtacgtgagcttcgtggacgagagccacatcagaatggtgaaccagcagctgctgggcagaagcctgcaggacgtgaagggccaggaggtgcccagacccgccatggacttcaccgacctgagcagactgcccctggccctgcacgacaccccccccatccccggccagcccgaggagatccagctgctgagaaaggaggccacccccagaagcagagacagccccgtgtggtgccagtgcggcagctgcctgcccagccagctgcccgagagccacagatgcctggaggagctgtgctgcagaaagaagcccggcgcctgcatcaccaccagcgagctgttcagaaagctggtgctgagcagacacgtgctgcagttcctgctgctgtaccaggagcccctgctggccctggacgtggacagcaccaacagcagactgagacactgcgcctacagatgctacgccacctggagattcggcagccaggacatggccgacttcgccaacctgcccagctgctgcagatggagaatcagaaaggagttccccaagagcgagggccagtacagcggcttcaagagcccctactag

SEQ ID NO: 129778 - protein, 373 aa, Artificial Sequence
  derived and/or modified sequence
MTEVLWPAVPNGTDAAFLAGPGSSWGNSTVASTAAVSSSFKCALTKTGFQFYYLPAVYILVFIIGFLGNSVAIWMFVFHMKPWSGISVYMFNLALADFLYVLTLPALIFYYFNKTDWIFGDAMCKLQRFIFHVNLYGSILFLTCISAHRYSGVVYPLKSLGRLKKKNAICISVLVWLIVVVAISPILFYSGTGVRKNKTITCYDTTSDEYLRSYFIYSMCTTVAMFCVPLVLILGCYGLIVRALIYKDLDNSPLRRKSIYLVIIVLTVFAVSYIPFHVMKTMNLRARLDFQTPAMCAFNDRVYATYQVTRGLASLNSCVDPILYFLAGDTFRRRLSRATRKASRRSEANLQSKSEDMTLNILPEFKQNGDTSL

SEQ ID NO: 129779 - DNA, 1122 bp, Artificial Sequence
  derived and/or modified sequence
atgactgaggttttatggccggctgttcccaacgggacagatgctgccttcctggccggacccgggtcgtcctgggggaactcaaccgtagcgtctactgctgccgtcagttcaagcttcaagtgtgccctgactaagacggggtttcagttttattacctgccagctgtgtacatcctggtgttcattattggtttcttgggtaacagcgttgctatttggatgtttgttttccatatgaagccctggagcggaatcagcgtctatatgttcaacctggctctggccgattttctctacgtgctgacactgcctgctctcattttttactactttaacaagacggattggatttttggtgacgccatgtgcaagctgcagagatttattttccacgtgaatctctacggttcgatcctattcttaacatgtatttctgcacacagatatagcggcgtggtgtatcccctcaaatcactgggtcgacttaagaaaaagaacgctatttgcatcagcgtgcttgtatggctgattgttgtcgtggcgattagccctattctgttttactctggcaccggagttcgtaagaacaaaactataacctgctatgacactacttcagacgaatatctccgcagttatttcatttactcaatgtgcaccactgtcgctatgttctgtgtgcctctggttctgattctgggctgttacggactaattgtcagagcactcatatacaaggacctggataatagtcccctgagaaggaagtctatatatctggtaattatcgtcttaaccgtctttgctgtgtcatatattccgtttcatgtcatgaaaaccatgaacctaagagcacggctggatttccagacccccgcaatgtgcgccttcaacgaccgtgtctacgccacgtatcaagtcacaaggggtttagcatccctaaactcatgcgtggatcctatactttattttctggccggcgataccttccgcaggcgactctctcgagctacaagaaaagcctctagacgcagcgaagcgaacctccagtcaaaatccgaggacatgaccctgaatatattacccgaatttaaacagaacggagatacatctctgtag

SEQ ID NO: 129780 - DNA, 1122 bp, Artificial Sequence
  derived and/or modified sequence
atgacagaggtgctgtggccagctgtgcccaatggaacagatgctgccttcctggccggccctggcagctcctggggcaacagcacagtggccagcacagctgctgtgagcagcagcttcaagtgtgccctgaccaagacaggcttccagttctactacctgcctgctgtgtacatcctggtgttcatcatcggcttcctgggcaacagcgtggccatctggatgtttgtgttccacatgaagccctggagcggcatctctgtgtacatgttcaacctggccctggccgacttcctgtatgtgctgaccctgcctgccctgatcttctactacttcaacaagacagactggatctttggagatgccatgtgcaagctgcagcgcttcatcttccacgtgaacctgtatggcagcatcctcttcctgacctgcatcagcgcccaccgctacagcggcgtggtgtaccccctgaagagcctgggccgcctgaagaagaagaatgccatctgcatctctgtgctggtgtggctgattgtggtggtggccatcagccccatcctcttctacagcggcaccggggtgaggaagaacaagaccatcacctgctatgacaccaccagtgatgagtacctgcggagctacttcatctacagcatgtgcaccaccgtggccatgttctgtgtgcccctggtgctgatcctgggctgctacggcctcatcgtgcgggccctgatctacaaggacctggacaacagccccctgcggaggaagagcatctacctggtgatcatcgtgctgactgtgtttgctgtgtcctacatccccttccacgtgatgaagaccatgaacctgcgggcccggctggacttccagaccccagccatgtgtgccttcaatgacagagtgtatgccacctaccaggtgacccggggcctggccagcctgaacagctgtgtggaccccatcctgtacttcctggccggggacaccttcagaagaaggctgagccgggccaccaggaaggccagccgccgctctgaggccaacctgcagagcaagtctgaggacatgaccctgaacatcctgcctgagttcaagcagaatggagacaccagcctgtag

SEQ ID NO: 129781 - DNA, 1122 bp, Artificial Sequence
  derived and/or modified sequence
atgaccgaggtgctgtggcccgccgtgcccaacggcaccgacgccgcattcctggctggcccaggcagctcttggggaaactccacggttgcttccactgctgctgtgtcttcgtcctttaaatgtgcgctgacaaaaacggggtttcagttttactacctgcccgctgtatatattctcgtattcataatcggctttctggggaactccgtggctatctggatgttcgtgtttcacatgaaaccttggagtggcattagcgtgtacatgtttaacctggcacttgccgacttcctgtacgtactcactctccccgcgttaatcttctattacttcaataagaccgactggattttcggcgatgctatgtgcaagcttcagcgcttcattttccatgtgaatctgtacggcagcatcttgttccttacctgcatatcagctcaccgctacagcggcgttgtgtatccactcaagtcactgggaaggctcaagaaaaaaaacgcgatttgcatttccgtcctcgtgtggctgatagtggtggtggcaatctcacctattctcttttactctggtactggtgtccgcaaaaataaaacaatcacgtgttatgacacaacgtcagacgaatacttgcggtcttattttatttattccatgtgcaccactgttgctatgttttgcgtgcctcttgttttaatcctaggatgctatggcttaattgtgcgcgccttaatatataaagacctcgacaactcaccattgcgtcgcaaaagtatctacttagtcatcattgttttgacagtgtttgcggtgagctacattcctttccacgtcatgaaaacaatgaaccttagagctcgactcgactttcaaacacccgctatgtgcgcgtttaatgatagggtatacgctacctaccaggtcacacgcgggctggcatctcttaatagctgcgtggatccaatactttatttcctcgctggcgatacattccggcgacggctgtcccgcgccacaaggaaggcaagcaggagatccgaagcaaacttacagagtaaaagtgaagacatgacccttaatatcctgcctgagtttaaacaaaacggggatacctctttgtag

SEQ ID NO: 129782 - DNA, 1122 bp, Artificial Sequence
  derived and/or modified sequence
atgacagaggttttatggcctgcagtgcctaacggtaccgacgcagctttcctggctggcccaggcagctcgtggggcaactccaccgtggccagcacagccgcagtgtcatcctcctttaagtgcgctctgaccaagacaggcttccagttctactatctgcctgctgtatatatccttgtttttatcattggtttcctgggaaactccgtagcaatctggatgttcgtcttccatatgaagccctggagcgggatatcagtgtacatgtttaacctcgccctcgctgatttcctttacgtgctgacattgcccgctctgatcttctactacttcaacaaaaccgactggatctttggggatgccatgtgtaaactgcaaaggttcatcttccacgtgaatctttatggcagtatcttgtttctgacgtgcatttcagcccacagatatagtggggtggtgtaccctctgaaaagtttgggaaggttgaaaaagaagaacgccatatgcatttctgtcttagtgtggctgattgtggtggtcgccatctctcccatactcttctatagtgggacgggtgtgcgcaagaataaaacgattacgtgctacgacactactagcgatgagtacctcaggagttacttcatctattctatgtgtaccaccgttgccatgttttgcgtgcctctcgtcctaattttgggctgctacggactgatagtcagagccctgatttacaaggatctggacaattcccctcttcgaagaaaaagcatctatttagtcatcatcgttctgactgtcttcgcagtgagctacatcccgttccatgtgatgaagaccatgaacctcagagctaggctggacttccagaccccagcgatgtgcgccttcaacgatcgcgtgtacgctacctaccaggtgacacgcggattggcctccttgaattcatgtgtagacccaatactgtatttcctggcaggggataccttcaggcgcagactaagtagggccaccagaaaggcttcgcggaggtctgaggcgaatttgcagagcaaatcggaggacatgacattgaacattcttcccgagttcaaacagaatggcgatacaagtctatag

SEQ ID NO: 129783 - DNA, 3106 bp, Artificial Sequence
  derived and/or modified sequence
tcggcggagacctgctccccagaagacgcctcctgcttcccactgcgccctggaggacgcgggctggctgctgggcgagctcggcggaggcacgcccctcgcctccccgcggagtgcggactcgccccggtgcccaaactccgcccaccctctagggagctccgctctcccgcctaaccccggcactccggacagagctgggcctggggaaggggttcctgaactacgcggacgccgaacgggacgcgctgcagaagcgcacgagtctgcggccacgcgcgctccgatggctgccaggagctgagctcagggtgggcggaggaagcggttagacgccccgaaactgagctgcacgtttctaaggtagggaggaggaagatgcccccaattaagttgatctttgagccaaggaggctggggagcagcctccccaagctagagccctgcagagcgagtttcccttgacctcgctgcgcctctggcgcgctctgcagcgcggacccgcggcccctcgggaaagcgcagtcggaaagttatccgcggcggttccctgcgcgccctgttgtgtaagctcggcgttgccagcggacggagaagttgctggcttgcccgatagcccagttcggtggcggcccggggcggatttcatggcccgcggcgaacgcggggccagagctggcgtgggcgagcccctgcgcgccccctcccgcggggatccagttcgcctgctcccttccgctcgctggcttttccgatgcttgctgcgcccctggccgccgctgccctctcgccgcctcctacccctcggagccgccgcctaagtcgaggaggagagaatgaccgaggtgctgtggccggctgtccccaacgggacggacgctgccttcctggccggtccgggttcgtcctgggggaacagcacggtcgcctccactgccgccgtctcctcgtcgttcaaatgcgccttgaccaagacgggcttccagttttactacctgccggctgtctacatcttggtattcatcatcggcttcctgggcaacagcgtggccatctggatgttcgtcttccacatgaagccctggagcggcatctccgtgtacatgttcaatttggctctggccgacttcttgtacgtgctgactctgccagccctgatcttctactacttcaataaaacagactggatcttcggggatgccatgtgtaaactgcagaggttcatctttcatgtgaacctctatggcagcatcttgtttctgacatgcatcagtgcccaccggtacagcggtgtggtgtaccccctcaagtccctgggccggctcaaaaagaagaatgcgatctgtatcagcgtgctggtgtggctcattgtggtggtggcgatctcccccatcctcttctactcaggtaccggggtccgcaaaaacaaaaccatcacctgttacgacaccacctcagacgagtacctgcgaagttatttcatctacagcatgtgcacgaccgtggccatgttctgtgtccccttggtgctgattctgggctgttacggattaattgtgagagctttgatttacaaagatctggacaactctcctctgaggagaaaatcgatttacctggtaatcattgtactgactgtttttgctgtgtcttacatccctttccatgtgatgaaaacgatgaacttgagggcccggcttgattttcagaccccagcaatgtgtgctttcaatgacagggtttatgccacgtatcaggtgacaagaggtctagcaagtctcaacagttgtgtggaccccattctctatttcttggcgggagatactttcagaaggagactctcccgagccacaaggaaagcttctagaagaagtgaggcaaatttgcaatccaagagtgaagacatgaccctcaatattttacctgagttcaagcagaatggagatacaagcctgtgaaggcacaagaatctccaaacacctctctgttgtaatatggtaggatgcttaacagaatcaagtacttttcccctctttaactttctagtttagaaaaaaatcaaaccaagaaaatagtgagttaaaaaaataatagaagtagaaatgcccacatccacacttagcttgtttgggtttgctttcacagtctctcttccttctgactagaagtatgtataataaaacaatactacctagttaaacatttactttctcttttgcctttaaaatgtgcaggcttttctgtttaaagtgtgtgtgcacatgagtactggggctgtttttgatattagtaatttctctaagaaaactagccccctgcaacttgagtttgtggtttatctagcctttattgtttttttaaaatccacagtaggaataaaaaatctatattctcagaaatatctagcatggtatataacaaaacactaaactcatcagttcatccggcatcagatcaatggatctctgagcggggtgtttttttcagtgtcttataagcatagatgatagttgactgagtttctttagggcattgaatagacaagtaaagctaatgaatttaaaagcctgaaaagtgattgttttccagttatttctggaaaaggtctcattatatattgggtgctaaatgtttgatggggaaagcctgcatatattatcgtactggtaaaatgcattcaaaataattaaagtgcatgtattttccttgtaaacaccatgagctctcttagacatcttgtgataaagagcatttacttgccccactgctgtgcaatgccttaggactttgtttgtgttccaggacaagtgttcactcacatctgtaaaaacaattttaagaattgcaaataaattacagaccaaagattgagtaaagtcaaataactgttagtaagttgaaggatattggacaggaggacagtatttcagaaaaggagaggttgacagtcatccacaaggcatagcctccaagtatactctcaaatgtatgaagcaactggggtgggcagaagacattttagaatgagggctttagtttaaattaaagtcatggtggagaagactcttgcttcctccaagtgtttgaaaacacaaaatgcgatatg

SEQ ID NO: 129784 - DNA, 1122 bp, Artificial Sequence
  derived and/or modified sequence
atgaccgaggtgctgtggcccgccgtgcccaacggcaccgacgccgccttcctggccggccccggcagcagctggggcaacagcaccgtggccagcaccgccgccgtgagcagcagcttcaagtgcgccctgaccaagaccggcttccagttctactacctgcccgccgtgtacatcctggtgttcatcatcggcttcctgggcaacagcgtggccatctggatgttcgtgttccacatgaagccctggagcggcatcagcgtgtacatgttcaacctggccctggccgacttcctgtacgtgctgaccctgcccgccctgatcttctactacttcaacaagaccgactggatcttcggcgacgccatgtgcaagctgcagagattcatcttccacgtgaacctgtacggcagcatcctgttcctgacctgcatcagcgcccacagatacagcggcgtggtgtaccccctgaagagcctgggcagactgaagaagaagaacgccatctgcatcagcgtgctggtgtggctgatcgtggtggtggccatcagccccatcctgttctacagcggcaccggcgtgagaaagaacaagaccatcacctgctacgacaccaccagcgacgagtacctgagaagctacttcatctacagcatgtgcaccaccgtggccatgttctgcgtgcccctggtgctgatcctgggctgctacggcctgatcgtgagagccctgatctacaaggacctggacaacagccccctgagaagaaagagcatctacctggtgatcatcgtgctgaccgtgttcgccgtgagctacatccccttccacgtgatgaagaccatgaacctgagagccagactggacttccagacccccgccatgtgcgccttcaacgacagagtgtacgccacctaccaggtgaccagaggcctggccagcctgaacagctgcgtggaccccatcctgtacttcctggccggcgacaccttcagaagaagactgagcagagccaccagaaaggccagcagaagaagcgaggccaacctgcagagcaagagcgaggacatgaccctgaacatcctgcccgagttcaagcagaacggcgacaccagcctgtag

SEQ ID NO: 129785 - protein, 365 aa, Artificial Sequence
  derived and/or modified sequence
MASTESSLLRSLGLSPGPGSSEVELDCWFDEDFKFILLPVSYAVVFVLGLGLNAPTLWLFIFRLRPWDATATYMFHLALSDTLYVLSLPTLIYYYAAHNHWPFGTEICKFVRFLFYWNLYCSVLFLTCISVHRYLGICHPLRALRWGRPRLAGLLCLAVWLVVAGCLVPNLFFVTTSNKGTTVLCHDTTRPEEFDHYVHFSSAVMGLLFGVPCLVTLVCYGLMARRLYQPLPGSAQSSSRLRSLRTIAVVLTVFAVCFVPFHITRTIYYLARLLEADCRVLNIVNVVYKVTRPLASANSCLDPVLYLLTGDKYRRQLRQLCGGGKPQPRTAASSLALVSLPEDSSCRWAATPQDSSCSTPRADRL

SEQ ID NO: 129786 - DNA, 1098 bp, Artificial Sequence
  derived and/or modified sequence
atggcatctaccgaaagcagtcttctcaggtctctcggcctgagccccggcccgggcagttccgaggtagagcttgattgttggtttgatgaggacttcaaattcatactgttgcctgtgtcatatgcagtggtcttcgtgttgggcctgggcctcaacgcaccaactttatggttattcattttccgactgcggccctgggacgccaccgccacttatatgttccacctggccctgagtgacaccctctatgttttgtcccttcccaccctaatatactattatgccgcacataaccactggcccttcggaactgagatctgtaagtttgtgcgcttcctgttctattggaacctgtactgctcagtgctttttctcacgtgcataagcgtacaccggtaccttggcatttgtcacccattgagggccctgcggtggggaagaccccgcctagctggcctgctgtgcttagccgtctggctcgttgttgcagggtgcttggtgccaaacttatttttcgtgaccactagtaataagggcacaacagtgctgtgccatgatactaccaggcccgaagagttcgaccattatgttcatttcagcagcgcagtgatggggttgttattcggagtgccgtgcctcgtgaccttagtttgttacggcttaatggctagacggttgtaccagcctctgcccgggagcgctcagtcatcctctaggcttcgctccctgcggaccattgctgtggttctcacggttttcgctgtgtgtttcgtgccatttcatattacacgcactatatattacctcgcgaggctactggaagctgattgtcgcgtcctcaacatcgtcaacgtggtatacaaggtgacacggccactcgcttcggccaatagttgcctagacccagttctctatctgttaaccggggacaaatataggaggcaactccgccagctgtgtggtggcggaaagcctcaacctagaacagctgccagctccctcgccctcgtcagcttacccgaggacagctcatgtcgctgggcagccacgccacaggatagcagctgcagcacacccagagcagataggctgtag

SEQ ID NO: 129787 - DNA, 1098 bp, Artificial Sequence
  derived and/or modified sequence
atggccagcacagagagcagcctgctgcggagcctgggcctgagccctggccctggcagcagcgaggtggagctggactgctggtttgatgaggacttcaagttcatcctgctgcctgtgtcctatgctgtggtgtttgtgctgggcctgggcctgaatgcccccaccctgtggctgttcatcttccggctgcggccctgggatgccacagccacctacatgttccacctggccctgagtgacaccctgtatgtgctgagcctgcccaccctcatctactactatgctgcccacaaccactggccctttggaacagagatctgcaagtttgtgcgcttcctgttctactggaacctgtactgcagcgtgctcttcctgacctgcatctctgtgcaccgctacctgggcatctgccaccccctgcgggccctgcgctggggccggccccggctggccggcctgctgtgcctggccgtgtggctggtggtggccggctgcctggtgcccaacctcttctttgtgaccaccagcaacaagggcaccaccgtgctgtgccacgacaccaccaggcctgaggagtttgaccactacgtgcacttcagcagcgctgtgatgggcctgctgtttggagtgccctgcctggtgaccctggtgtgctacggcctgatggcccggcggctgtaccagcccctgcccggcagcgcccagagcagcagccggctgcggagcctgcggaccatcgctgtggtgctgactgtgtttgctgtgtgctttgtgcccttccacatcaccaggaccatctactacctggcccggctgctggaggccgactgccgggtgctgaacatcgtgaatgtggtgtacaaggtgacccggcccctggccagcgccaacagctgcctggaccctgtgctgtacctgctgactggagacaagtaccgccggcagctgcggcagctgtgtggcggcggcaagccccagcccaggacagctgccagcagcctggccctggtgtccctgcctgaggacagcagctgccgctgggccgccaccccccaggacagcagctgcagcacccccagggctgaccggctgtag

SEQ ID NO: 129788 - DNA, 1098 bp, Artificial Sequence
  derived and/or modified sequence
atggccagcaccgagagcagcctgctgcggagcctgggcctgagccccggccctggaagttctgaggtcgaactggattgttggttcgacgaagacttcaagtttattctgctccccgtatcatacgccgtggtgtttgtcctcgggctgggtctgaacgccccaacattgtggctgtttatctttagacttagaccctgggatgcaaccgccacgtatatgttccatttggctctttctgatacattgtacgtgttatcattaccaactttaatctactattatgccgcccacaatcattggccttttggaactgagatttgcaagtttgtacggttcttgttctactggaacctgtactgtagtgtgctgttcctcacatgcatatcagtgcatcgctacctggggatttgtcaccctcttagagcactgaggtggggaaggcctcgacttgccggcttgctgtgcttggccgtctggctagttgtcgctggctgcctggtcccaaacctttttttcgtcacgacttctaataagggcacaactgtgctgtgccatgacaccactagacccgaggagttcgaccactatgtgcacttttcctctgcggtgatgggcctcttgttcggagttccatgtcttgtaaccctagtgtgttacggtctgatggcccgcaggctgtatcaacccctcccaggctcagctcagtcatcatcgagactgcggagccttcggactatcgccgtggtgttgaccgtgtttgctgtgtgtttcgtgcccttccacatcaccaggaccatatactacttggctaggctcctggaagcagactgcagagtcctcaatattgtgaatgttgtttataaggtgactcggcctttggcctccgccaactcttgcctggatcctgtactgtatctcctgactggtgacaaatatcgcaggcaacttcggcagctttgcggagggggaaagccacagcctcggaccgctgctagttccctggccctagtttctctccctgaggacagctcctgtcgttgggctgcgacacctcaggactcatcttgcagcacgccaagggcagataggctgtag

SEQ ID NO: 129789 - DNA, 1098 bp, Artificial Sequence
  derived and/or modified sequence
atggccagtactgaaagcagcctgttgaggtcccttggcctcagccccggacccggttcatctgaagtggaactggattgctggtttgacgaagatttcaagttcatcctgcttcctgtgagttacgcagtagttttcgtgttgggactgggcttgaacgccccaactctctggctgtttatttttagactgcgaccgtgggacgcaacagccacctatatgttccaccttgctctgtcggacaccctgtatgtcctgagcttgccaaccctgatctactattacgctgcccataatcactggccattcgggacggagatctgcaagttcgtgcggttcctgttctactggaacctctattgttcagtgctcttcctcacatgtatcagtgtccacaggtatcttggcatctgccaccccctacgggcactgagatggggcagacctcgtctggccggactcctctgcttagctgtttggctggtggtggctgggtgccttgtgcctaacctgttcttcgtgaccacatcgaataagggaacgactgtgctgtgtcatgataccaccagaccagaggagtttgatcactatgtgcatttttcgtctgccgtgatggggctgctcttcggagtgccctgcttagtgacactggtctgttacggtctgatggcgcgtcggttataccagcctctgcctggatccgctcaaagtagcagccgccttaggtccctccgaactattgctgtcgtgctcacagtttttgccgtctgcttcgtcccattccacataaccagaactatatactatctggccagactgcttgaagctgattgcagagtcctgaacattgtaaatgtggtgtataaggttactcggcctctcgcttctgccaacagctgcctggatcctgtcttatatcttttgaccggtgataagtaccgccgacaattgagacaactgtgtggcggtggtaagccgcagccaaggacggcagccagctccttggccctcgtcagtctgcctgaagacagcagctgtcgctgggctgcaacgccccaggacagctcgtgcagcacgccgcgagcagatcgcctgtag

SEQ ID NO: 129790 - DNA, 1639 bp, Artificial Sequence
  derived and/or modified sequence
aagggagcttgggtaggggccaggctagcctgagtgcacccagatgcgcttctgtcagctctccctagtgcttcaaccactgctctccctgctctactttttttgctccagctcagggatgggggtgggcagggaaatcctgccaccctcacttctccccttcccatctccaggggggccatggccagtacagagtcctccctgttgagatccctaggcctcagcccaggtcctggcagcagtgaggtggagctggactgttggtttgatgaggatttcaagttcatcctgctgcctgtgagctatgcagttgtctttgtgctgggcttgggccttaacgccccaaccctatggctcttcatcttccgcctccgaccctgggatgcaacggccacctacatgttccacctggcattgtcagacaccttgtatgtgctgtcgctgcccaccctcatctactattatgcagcccacaaccactggccctttggcactgagatctgcaagttcgtccgctttcttttctattggaacctctactgcagtgtccttttcctcacctgcatcagcgtgcaccgctacctgggcatctgccacccacttcgggcactacgctggggccgccctcgcctcgcaggccttctctgcctggcagtttggttggtcgtagccggctgcctcgtgcccaacctgttctttgtcacaaccagcaacaaagggaccaccgtcctgtgccatgacaccactcggcctgaagagtttgaccactatgtgcacttcagctcggcggtcatggggctgctctttggcgtgccctgcctggtcactcttgtttgctatggactcatggctcgtcgcctgtatcagcccttgccaggctctgcacagtcgtcttctcgcctccgctctctccgcaccatagctgtggtgctgactgtctttgctgtctgcttcgtgcctttccacatcacccgcaccatttactacctggccaggctgttggaagctgactgccgagtactgaacattgtcaacgtggtctataaagtgactcggcccctggccagtgccaacagctgcctggatcctgtgctctacttgctcactggggacaaatatcgacgtcagctccgtcagctctgtggtggtggcaagccccagccccgcacggctgcctcttccctggcactagtgtccctgcctgaggatagcagctgcaggtgggcggccaccccccaggacagtagctgctctactcctagggcagatagattgtaacacgggaagccgggaagtgagagaaaaggggatgagtgcagggcagaggtgagggaacccaatagtgatacctggtaaggtgcttcttcctcttttccaggctctggagagaagccctcaccctgagggttgcagggaggcagggatatcatgggtgacctcatctctcataaccccttcagttgccgactctttttagccaatgccaatcttctactcctttctcgttgtttctgttccttcctggggccattggtcctacaatcttcctgaaaatcttccccagtcctctttccctgtcccatttcccccacagcctcctatagcatgtgtttctctacccagaccagagcattcagct

SEQ ID NO: 129791 - DNA, 1098 bp, Artificial Sequence
  derived and/or modified sequence
atggccagcaccgagagcagcctgctgagaagcctgggcctgagccccggccccggcagcagcgaggtggagctggactgctggttcgacgaggacttcaagttcatcctgctgcccgtgagctacgccgtggtgttcgtgctgggcctgggcctgaacgcccccaccctgtggctgttcatcttcagactgagaccctgggacgccaccgccacctacatgttccacctggccctgagcgacaccctgtacgtgctgagcctgcccaccctgatctactactacgccgcccacaaccactggcccttcggcaccgagatctgcaagttcgtgagattcctgttctactggaacctgtactgcagcgtgctgttcctgacctgcatcagcgtgcacagatacctgggcatctgccaccccctgagagccctgagatggggcagacccagactggccggcctgctgtgcctggccgtgtggctggtggtggccggctgcctggtgcccaacctgttcttcgtgaccaccagcaacaagggcaccaccgtgctgtgccacgacaccaccagacccgaggagttcgaccactacgtgcacttcagcagcgccgtgatgggcctgctgttcggcgtgccctgcctggtgaccctggtgtgctacggcctgatggccagaagactgtaccagcccctgcccggcagcgcccagagcagcagcagactgagaagcctgagaaccatcgccgtggtgctgaccgtgttcgccgtgtgcttcgtgcccttccacatcaccagaaccatctactacctggccagactgctggaggccgactgcagagtgctgaacatcgtgaacgtggtgtacaaggtgaccagacccctggccagcgccaacagctgcctggaccccgtgctgtacctgctgaccggcgacaagtacagaagacagctgagacagctgtgcggcggcggcaagccccagcccagaaccgccgccagcagcctggccctggtgagcctgcccgaggacagcagctgcagatgggccgccaccccccaggacagcagctgcagcacccccagagccgacagactgtag

SEQ ID NO: 129792 - DNA, 1125 bp, Artificial Sequence
  derived and/or modified sequence
atggctgcaaacgtgagcggggcaaaatcttgccccgccaactttctagctgctgctgacgacaagctcagtggattccagggagactttctctggcccatactagtggtagaatttctagttgccgtagcctccaatggactcgccctctatcgcttttctatccgtaaacagagaccatggcaccctgccgtggtttttagcgtccagctcgctgtctccgacttactatgcgccttaacactaccccctcttgcagcatacttgtaccctccaaaacattggcgctatggagaagctgcctgcaggctggaacgcttcctgttcacctgtaatctcctgggatcagtgatctttattacctgtatttctctgaaccgctatcttggtattgtgcatcccttctttgcaaggtctcatctccggcctaagcacgcctgggctgtgtccgccgctggatgggttttagccgctctactcgctatgccaactttgagtttctcacatctgaagcgcccacaacaaggggcaggcaattgctcagttgcccgtcccgaggcctgtatcaagtgcctcgggacagcagatcacggtctggctgcttaccgggcatacagcctggttctagcaggcctcgggtgcgggttaccgctgctccttaccctggctgcctatggcgccctgggcagggctgtcctgcgctccccaggtatgaccgttgctgagaaactgagggtggcagcactagtggctagtggggtggccctgtacgcatcatcctacgtgccttaccatattatgcgcgtgctcaacgtggacgcccggaggcgctggagcacccgatgtccgtcgttcgcagacatcgcacaggctacagccgcgctggaacttggaccctacgttgggtatcaggttatgaggggactgatgcccctcgctttctgtgtccatccattactgtacatggccgctgttccatccctaggctgctgctgccgccattgtccgggctacagggattcctggaaccctgaagatgcaaagagcacgggccaggcccttccactgaacgccacggctgctccaaaaccgtccgagccacagtctcgagagctgtcccagtag

SEQ ID NO: 129793 - DNA, 1125 bp, Artificial Sequence
  derived and/or modified sequence
atggccgccaacgtgtctggggccaagagctgcccagccaacttcctggccgctgctgatgacaagctgagcggcttccagggcgacttcctgtggcccatcctggtggtggagttcctggtggccgtggccagcaatggcctggccctgtaccgcttcagcatcaggaagcagaggccctggcaccctgctgtggtgttttctgtgcagctggccgtgtctgacctgctgtgtgccctgaccctgccccccctggccgcctacctgtacccacccaagcactggaggtatggagaggccgcctgccgcctggagcgcttcctgttcacctgcaacctgctgggcagcgtcatcttcatcacctgcatcagcctgaaccgctacctgggcatcgtgcaccccttctttgcccggagccacctgcggcccaagcacgcctgggccgtgtctgctgctggctgggtgctggccgccctgctggccatgcccaccctgtccttcagccacctgaagaggccccagcagggcgccggcaactgcagcgtggcccggcctgaggcctgcatcaagtgcctgggcacagctgaccacggcctggccgcctaccgggcctacagcctggtgctggccggcctgggctgcggcctgcccctgctgctgaccctggccgcctatggagccctgggccgggctgtgctgcggagccctggcatgacagtggccgagaagctgcgggtggccgccctggtggccagcggcgtggccctgtatgccagcagctatgtgccctaccacatcatgagggtgctgaatgtggatgcccggcggcgctggagcacccgctgccccagctttgctgacatcgcccaggccacagctgccctggagctgggcccctacgtgggctaccaggtgatgaggggcctgatgcccctggccttctgtgtgcaccccctgctgtacatggctgctgtgcccagcctgggctgctgctgccgccactgccccggctacagagacagctggaacccagaagatgccaagagcacaggccaggccctgcccctgaatgccacagctgcccccaagcccagcgagccccagagccgggagctgagccagtag

SEQ ID NO: 129794 - DNA, 1125 bp, Artificial Sequence
  derived and/or modified sequence
atggccgccaacgtgagcggcgccaagagctgccccgccaacttcctggcggccgctgacgataagttgtccgggttccaaggagacttcctgtggccgattctcgtggtggagtttctagtagctgtggcaagtaacgggctggccctatatagattttcaatacgcaaacaacggccttggcatccagctgtcgtcttctctgtgcagttagccgtgagcgacctgctctgtgccttgacactcccgcccctcgccgcgtacctctatccccctaagcattggagatacggagaggctgcctgcaggctagagcgttttttgttcacctgcaaccttcttggaagcgtcatcttcataacctgtattagccttaacagatacctgggtatcgtgcacccattctttgctagatcacatctcaggccaaaacacgcctgggccgtgtcagctgccgggtgggtgctggccgctcttctggccatgcctaccctatctttctctcatctgaagcgaccccagcagggcgcaggcaactgctccgtggcacggccggaggcttgcattaaatgtctcggcaccgctgaccatggactagcagcctatcgggcatattctctggttctcgcggggttaggctgtgggctgccgttgctactcactttggccgcttacggcgccttgggccgggctgtgctcaggtctccaggcatgactgtggcggagaagctgcgcgtggcagcactcgtggcatccggcgtggcattatacgctagttcctacgtcccctatcacatcatgcgcgtgctgaatgtggatgcaagacgccgctggtccacacgatgcccatctttcgccgatatcgcccaggccacagccgccctggagttaggaccttatgttggctaccaagttatgcgtgggttaatgccgctagccttctgcgtgcaccccctcctctacatggccgccgttccgagcctcggatgctgctgccggcattgccctgggtacagggattcttggaatcccgaagatgccaaatcaaccgggcaggcccttcccctcaatgccaccgccgctccaaagccatcggagccacagtccagagaattgagccagtag

SEQ ID NO: 129795 - DNA, 1125 bp, Artificial Sequence
  derived and/or modified sequence
atggctgccaacgtgtccggagccaaaagctgtccggcaaacttccttgcagctgctgatgacaaattgtccgggtttcaaggggacttcctatggcctatccttgttgtggagttcctcgtagccgttgcatccaacggtcttgctctctatcggttttccattcggaagcagcgaccctggcacccggctgtcgtgttttcggtgcaattggcagtcagcgatttgctgtgtgcactgactctccctcccctggcagcatacctgtaccccccaaagcactggaggtacggagaagccgcatgccgcctggagcgatttctgtttacatgcaatctgctggggtccgtcatattcatcacatgtatttcactaaaccgctatctcgggatcgtgcatcccttctttgcgaggtctcatttgagacctaaacatgcctgggcggtatcagcggctggctgggtgttggccgctttgctagctatgccgaccttgagcttctcccacttgaaacggccacaacagggagccggaaattgcagcgtggcaagacccgaggcctgcatcaagtgtctgggaactgcggatcacggactcgctgcatatcgggcttatagcctggtgctggcgggactagggtgcggcctgcccctgttactgaccttggccgcatatggagcccttggtagagccgtgttgagaagccctgggatgaccgtcgcagaaaagctgcgagtggctgctcttgtcgcctcaggcgttgctctctacgccagttcttatgtgccctatcacatcatgagagttctgaatgtggatgcgcgtagaaggtggtcgactcgatgcccgtcattcgccgacatcgcacaggcaaccgcagccctggaactcggaccatacgttggttaccaggtgatgcgcggtctcatgccgttagctttttgtgttcaccccctgctgtatatggcagcggtcccttccctgggatgttgctgtcggcattgtccaggctatagagatagttggaatccagaggatgcaaagagtactggacaggcattgcctctcaatgccacggcagctcccaaacctagcgaacctcagtcgcgggagctgtcccagtag

SEQ ID NO: 129796 - DNA, 1943 bp, Artificial Sequence
  derived and/or modified sequence
gaacctcaggagggttgtggcacaatgaggaaggaaacgtgggtggaaaggcacgctggcctgctctgctggctgggccagtaactggggatggggctggggcagggcccactaagccactggtgactgggggaggggctggggaactgggtagcagacacaggctgaggatcggcacgggagcatggcagccaacgtctcgggtgccaagtcctgccctgccaacttcttggcagctgccgacgacaaactcagtgggttccagggggacttcctgtggcccatactggtggttgagttcctggtggccgtggccagcaatggcctggccctgtaccgcttcagcatccggaagcagcgcccatggcaccccgccgtggtcttctctgtccagctggcagtcagcgacctgctctgcgccctgacgctgcccccgctggccgcctacctctatccccccaagcactggcgctatggggaggccgcgtgccgcctggagcgcttcctcttcacctgcaacctgctgggcagcgtcatcttcatcacctgcatcagcctcaaccgctacctgggcatcgtgcaccccttcttcgcccgaagccacctgcgacccaagcacgcctgggccgtgagcgctgccggctgggtcctggccgccctgctggccatgcccacactcagcttctcccacctgaagaggccgcagcagggggcgggcaactgcagcgtggccaggcccgaggcctgcatcaagtgtctggggacagcagaccacgggctggcggcctacagagcgtatagcctggtgctggcggggttgggctgcggcctgccgctgctgctcacgctggcagcctacggcgccctcgggcgggccgtgctacgcagcccaggcatgactgtggccgagaagctgcgtgtggcagcgttggtggccagtggtgtggccctctacgccagctcctatgtgccctaccacatcatgcgggtgctcaacgtggatgctcggcggcgctggagcacccgctgcccgagctttgcagacatagcccaggccacagcagccctggagctggggccctacgtgggctaccaggtgatgcggggcctcatgcccctggccttctgtgtccaccctctactctacatggccgcagtgcccagcctgggctgctgctgccgacactgccccggctacagggacagctggaacccagaggacgccaagagcactggccaagccctgcccctcaatgccacagccgcccctaaaccgtcagagccccagtcccgtgagctgagccaatgatgtggcctagcggaagctgcctcctcaccctaggtgttgctggagaaccctgagggcagggcccgagccccgacacatcccttcccccaaaaagcaacacctgtgcttgcagccaggtcaggcccagctgcagcccaggcaggagcagtcgcctttcccacccacagcgctggccacagggctccctgcagggtcagggaccagaccacgcccagaggaggggaggcactggcccccgccacaggactggagacgcaagaacaaaaagaaccaagtagagagagtggagctgctttattgcccttggagcccgcgctctcggaggctgtcttctgtcgccaagggtcccggaccgagtacacagtggcagctggcttagttggtggacggcctggggtaggggagggtggcaggtataagacttctgggggcaccccaagaccccagacacccaagtggcatcttgggggtgggtgggcagaggacggggtaatgtgaggacgaagcgggcacggagccagatggccagtctccaggcctggtccacggactggcagggaccccaggcacaagagctgccacccctctgcccggttttggaaaaaaacaataaaggactgtcccctcaaaacca

SEQ ID NO: 129797 - DNA, 1125 bp, Artificial Sequence
  derived and/or modified sequence
atggccgccaacgtgagcggcgccaagagctgccccgccaacttcctggccgccgccgacgacaagctgagcggcttccagggcgacttcctgtggcccatcctggtggtggagttcctggtggccgtggccagcaacggcctggccctgtacagattcagcatcagaaagcagagaccctggcaccccgccgtggtgttcagcgtgcagctggccgtgagcgacctgctgtgcgccctgaccctgccccccctggccgcctacctgtacccccccaagcactggagatacggcgaggccgcctgcagactggagagattcctgttcacctgcaacctgctgggcagcgtgatcttcatcacctgcatcagcctgaacagatacctgggcatcgtgcaccccttcttcgccagaagccacctgagacccaagcacgcctgggccgtgagcgccgccggctgggtgctggccgccctgctggccatgcccaccctgagcttcagccacctgaagagaccccagcagggcgccggcaactgcagcgtggccagacccgaggcctgcatcaagtgcctgggcaccgccgaccacggcctggccgcctacagagcctacagcctggtgctggccggcctgggctgcggcctgcccctgctgctgaccctggccgcctacggcgccctgggcagagccgtgctgagaagccccggcatgaccgtggccgagaagctgagagtggccgccctggtggccagcggcgtggccctgtacgccagcagctacgtgccctaccacatcatgagagtgctgaacgtggacgccagaagaagatggagcaccagatgccccagcttcgccgacatcgcccaggccaccgccgccctggagctgggcccctacgtgggctaccaggtgatgagaggcctgatgcccctggccttctgcgtgcaccccctgctgtacatggccgccgtgcccagcctgggctgctgctgcagacactgccccggctacagagacagctggaaccccgaggacgccaagagcaccggccaggccctgcccctgaacgccaccgccgcccccaagcccagcgagccccagagcagagagctgagccagtag

SEQ ID NO: 129798 - protein, 187 aa, Artificial Sequence
  derived and/or modified sequence
MPVDLSKWSGPLSLQEVDEQPQHPLHVTYAGAAVDELGKVLTPTQVKNRPTSISWDGLDSGKLYTLVLTDPDAPSRKDPKYREWHHFLVVNMKGNDISSGTVLSDYVGSGPPKGTGLHRYVWLVYEQDRPLKCDEPILSNRSGDHRGKFKVASFRKKYELRAPVAGTCYQAEWDDYVPKLYEQLSGK

SEQ ID NO: 129799 - protein, 155 aa, Artificial Sequence
  derived and/or modified sequence
MPVDLSKWSGPLSLQEVDEQPQHPLHVTYAGAAVDELGKVLTPTQVKNRPTSISWDGLDSGKLYTLVLTDPDAPSRKDPKYREWHHFLVVNMKGNDISSGTVLSDYVGSGPPKGTGLHRYVWLVYEQDRPLKCDFSCCLAFIILLTHSDLCFDQI

SEQ ID NO: 129800 - DNA, 564 bp, Artificial Sequence
  derived and/or modified sequence
atgcctgtggatctttcaaaatggtctggccctctgtcactccaggaggtcgatgagcagccgcaacaccctctgcacgtgacctatgctggcgctgcagtcgacgagttagggaaggtcctgacgcccacccaggtgaagaatcgccccacatccataagttgggacggtctcgacagcggtaagctctacactttggtcctgaccgaccccgatgctccctctcgaaaggatccaaagtatcgagagtggcaccacttcctcgtcgtaaatatgaaaggcaacgacatcagctctggcaccgtgttatcagactacgtcgggtcagggccaccaaagggcaccggcttacacagatacgtatggcttgtttatgagcaggacaggccgctcaaatgtgacgaaccaatcctgagcaacaggtccggggaccaccgagggaagtttaaggtggcctccttccggaaaaagtacgaacttagagctcctgtggctggtacctgttaccaagccgaatgggatgactatgtgcccaaactgtacgagcagctatctggcaagtag

SEQ ID NO: 129801 - DNA, 468 bp, Artificial Sequence
  derived and/or modified sequence
atgccagtggacctgagtaaatggtctgggcccttgagtcttcaggaggtcgacgagcaacctcagcaccctcttcacgttacttatgctggtgctgccgttgacgagctggggaaggttcttacccctacccaggttaagaatcgcccaaccagcattagttgggatggacttgactcaggcaagctgtatacactggtcctgacggatccagatgcaccaagccggaaggatcctaagtatcgggagtggcaccattttctcgtggtgaatatgaagggaaatgatatttcgagcggaaccgtgttgagtgattacgtcgggtcaggaccccctaaaggcaccgggctgcatcggtacgtatggttggtgtatgaacaagatagacccctaaagtgcgatttctcgtgttgtctcgcctttatcattttactaacccactccgatctatgtttcgatcagatctag

SEQ ID NO: 129802 - DNA, 564 bp, Artificial Sequence
  derived and/or modified sequence
atgcctgtggacctgagcaagtggagcggccccctgagcctgcaggaggtggatgagcagccccagcaccccctgcacgtgacctacgccggggctgctgtggatgagctgggcaaggtgctgacccccacccaggtgaagaaccggcccaccagcatctcctgggatggcctggacagcggcaagctgtacaccctggtgctgacagatcctgatgcccccagcaggaaggaccccaagtaccgggagtggcaccacttcctggtggtgaacatgaagggaaatgacatcagcagcggcaccgtgctgagtgactatgtgggcagcggcccccccaagggcaccggcctgcaccgctacgtgtggctggtgtatgagcaggaccggcccctgaagtgtgatgagcccatcctgagcaacagaagtggggaccaccggggcaagttcaaggtggccagcttcaggaagaagtatgagctgcgggcccctgtggccggcacctgctaccaggccgagtgggatgattatgtgcccaagctgtatgagcagctgagcggcaagtag

SEQ ID NO: 129803 - DNA, 468 bp, Artificial Sequence
  derived and/or modified sequence
atgcctgtggacctgagcaagtggagcggccccctgagcctgcaggaggtggatgagcagccccagcaccccctgcacgtgacctacgccggggctgctgtggatgagctgggcaaggtgctgacccccacccaggtgaagaaccggcccaccagcatctcctgggatggcctggacagcggcaagctgtacaccctggtgctgacagatcctgatgcccccagcaggaaggaccccaagtaccgggagtggcaccacttcctggtggtgaacatgaagggaaatgacatcagcagcggcaccgtgctgagtgactatgtgggcagcggcccccccaagggcaccggcctgcaccgctacgtgtggctggtgtatgagcaggaccggcccctgaagtgtgacttcagctgctgcctggccttcatcatcctgctgacccacagcgacctgtgctttgaccagatctag

SEQ ID NO: 129804 - DNA, 564 bp, Artificial Sequence
  derived and/or modified sequence
atgcccgtggacctgagcaagtggagcggccccctgagcctgcaggaggtcgatgagcagccacagcaccctctgcacgtgacgtacgctggtgcagcagttgacgagctcggcaaggttttgacaccaacacaagttaagaatcgaccaacgtcaatcagctgggacggcctcgatagcggcaagttatacaccctcgttcttacagatcccgatgcccctagccgtaaggaccctaaatatagggagtggcaccacttccttgtggtcaatatgaagggaaatgatatctcatcaggcacggtcctgtccgattatgtcggctcggggcccccaaaaggaactgggcttcatcgatacgtgtggctggtgtacgaacaagatcgacccctcaagtgtgatgagcctatcctcagtaaccgaagtggcgatcatcgaggaaaattcaaagttgcaagcttccgcaaaaagtacgaactacgagcacccgtggcaggcacgtgctatcaagccgaatgggatgactacgtccccaagttgtacgagcaattgtctgggaaatag

SEQ ID NO: 129805 - DNA, 468 bp, Artificial Sequence
  derived and/or modified sequence
atgcccgtggacctgagcaagtggagcggccccctgagcctgcaggaggtggacgagcagccacaacatccccttcatgtgacctacgcgggcgctgccgtagatgaactggggaaagttctgaccccaacacaagtgaagaacaggcctactagtatctcctgggatgggctggatagcggcaaattatatacgttggttctgaccgatcccgatgccccttcaaggaaggatcctaaataccgggagtggcatcactttcttgtcgtgaatatgaaagggaatgatatcagttccggcaccgtactgagcgattatgtcgggtctggcccccctaagggcactggtctgcatagatacgtgtggctggtatacgaacaggatcgtccactcaaatgcgacttttcctgctgtctagcgtttattattctgttaactcacagcgacctgtgtttcgaccagatctag

SEQ ID NO: 129806 - DNA, 1697 bp, Artificial Sequence
  derived and/or modified sequence
tctctcttcggcgaacctattccagggcgcccttcattttcatttcttgaaacaacagccttgcaggccgagccgctgttcccgagaactcggcagccacagggagcaggttgcatggacccaggagcgcgagaggccctgctctgccagcttcggccaatcagaggccagggagcggtgggcgtgacgtggggcggtgcgcggggctgggcggcggctgaggcgcgtgctctcgcgtggtcgctgggtctgcgtcttcccgagccagtgtgctgagctctccgcgtcgcctctgtcgcccgcgcctggcctaccgcggcactcccggctgcacgctctgcttggcctcgccatgccggtggacctcagcaagtggtccgggcccttgagcctgcaagaagtggacgagcagccgcagcacccgctgcatgtcacctacgccggggcggcggtggacgagctgggcaaagtgctgacgcccacccaggttaagaatagacccaccagcatttcgtgggatggtcttgattcagggaagctctacaccttggtcctgacagacccggatgctcccagcaggaaggatcccaaatacagagaatggcatcatttcctggtggtcaacatgaagggcaatgacatcagcagtggcacagtcctctccgattatgtgggctcggggcctcccaagggcacaggcctccaccgctatgtctggctggtttacgagcaggacaggccgctaaagtgtgacgagcccatcctcagcaaccgatctggagaccaccgtggcaaattcaaggtggcgtccttccgtaaaaagtatgagctcagggccccggtggctggcacgtgttaccaggccgagtgggatgactatgtgcccaaactgtacgagcagctgtctgggaagtagggggttagcttggggacctgaactgtcctggaggccccaagccatgttccccagttcagtgttgcatgtataatagatttctcctcttcctgccccccttggcatgggtgagacctgaccagtcagatggtagttgagggtgacttttcctgctgcctggcctttataattttactcactcactctgatttatgttttgatcaaatttgaacttcattttggggggtattttggtactgtgatggggtcatcaaattattaatctgaaaatagcaacccagaatgtaaaaaagaaaaaactggggggaaaaagaccaggtctacagtgatagagcaaagcatcaaagaatctttaagggaggtttaaaaaaaaaaaaaaaaaaaaagattggttgcctctgcctttgtgatcctgagtccagaatggtacacaatgtgattttatggtgatgtcactcacctagacaaccagaggctggcattgaggctaacctccaacacagtgcatctcagatgcctcagtaggcatcagtatgtcactctggtccctttaaagagcaatcctggaagaagcaggagggagggtggctttgctgttgttgggacatggcaatctagaccggtagcagcgctcgctgacagcttgggaggaaacctgagatctgtgttttttaaattgatcgttcttcatgggggtaagaaaagctggtctggagttgctgaatgttgcattaattgtgctgtttgcttgtagttgaataaaaatagaaacctgaatgaa

SEQ ID NO: 129807 - DNA, 1122 bp, Artificial Sequence
  derived and/or modified sequence
gtgtgctgagctctccgcgtcgcctctgtcgcccgcgcctggcctaccgcggcactcccggctgcacgctctgcttggcctcgccatgccggtggacctcagcaagtggtccgggcccttgagcctgcaagaagtggacgagcagccgcagcacccgctgcatgtcacctacgccggggcggcggtggacgagctgggcaaagtgctgacgcccacccaggttaagaatagacccaccagcatttcgtgggatggtcttgattcagggaagctctacaccttggtcctgacagacccggatgctcccagcaggaaggatcccaaatacagagaatggcatcatttcctggtggtcaacatgaagggcaatgacatcagcagtggcacagtcctctccgattatgtgggctcggggcctcccaagggcacaggcctccaccgctatgtctggctggtttacgagcaggacaggccgctaaagtgtgacttttcctgctgcctggcctttataattttactcactcactctgatttatgttttgatcaaatttgaacttcattttggggggtattttggtactgtgatggggtcatcaaattattaatctgaaaatagcaacccagaatgtaaaaaagaaaaaactggggggaaaaagaccaggtctacagtgatagagcaaagcatcaaagaatctttaagggaggtttaaaaaaaaaaaaaaaaaaaaagattggttgcctctgcctttgtgatcctgagtccagaatggtacacaatgtgattttatggtgatgtcactcacctagacaaccagaggctggcattgaggctaacctccaacacagtgcatctcagatgcctcagtaggcatcagtatgtcactctggtccctttaaagagcaatcctggaagaagcaggagggagggtggctttgctgttgttgggacatggcaatctagaccggtagcagcgctcgctgacagcttgggaggaaacctgagatctgtgttttttaaattgatcgttcttcatgggggtaagaaaagctggtctggagttgctgaatgttgcattaattgtgctgtttgcttgtagttgaataaaaatagaaacctgaatg

SEQ ID NO: 129808 - DNA, 564 bp, Artificial Sequence
  derived and/or modified sequence
atgccggtcgatctctcaaaatggagtggccctttgtcactccaggaggtcgacgagcagccccagcatccactgcacgtgacttatgccggagctgccgtggatgaattaggcaaagtgctcacacctactcaggtcaagaacagaccaacttccatctcatgggacgggctggattccggaaagttatacaccctggtgctgactgaccccgacgccccttcccgcaaagatccaaagtaccgggaatggcatcattttctggtggtgaacatgaagggaaatgacattagttcaggcactgtgctgtccgattatgtgggcagtggaccccctaaaggcaccggtttacacaggtatgtctggctcgtgtatgagcaggacagacccctcaaatgcgatgagcccatcctatctaaccgatctggcgaccaccggggtaagttcaaagttgcttcctttcgtaagaaatacgaattgcgagctccagttgccggaacttgttatcaggcagagtgggacgattacgtgccgaaactttacgagcagctctccggaaaatag

SEQ ID NO: 129809 - DNA, 468 bp, Artificial Sequence
  derived and/or modified sequence
atgcctgtggatctgagcaagtggtctgggccactgtctcttcaggaggtagacgaacaaccccagcaccctctgcatgttacatatgccggagcagccgtggacgaattaggaaaggttctgacacctacccaggtgaaaaatcgccctactagtatcagttgggacggcctggattctggcaagctgtacactctggtgctgaccgaccctgacgcgccatcacgcaaagaccctaagtatcgcgagtggcaccactttctggtcgtgaatatgaaaggaaacgacatttcctccggtaccgtcttatctgattacgtgggatccggacccccaaagggaaccggcctccatcgctatgtttggctggtatatgagcaggataggcccctcaagtgcgattttagttgttgtcttgcattcatcattcttctgacccactcagatctgtgttttgaccagatctag

SEQ ID NO: 129810 - DNA, 564 bp, Artificial Sequence
  derived and/or modified sequence
atgcccgtggacctgagcaagtggagcggccccctgagcctgcaggaggtggacgagcagccccagcaccccctgcacgtgacctacgccggcgccgccgtggacgagctgggcaaggtgctgacccccacccaggtgaagaacagacccaccagcatcagctgggacggcctggacagcggcaagctgtacaccctggtgctgaccgaccccgacgcccccagcagaaaggaccccaagtacagagagtggcaccacttcctggtggtgaacatgaagggcaacgacatcagcagcggcaccgtgctgagcgactacgtgggcagcggcccccccaagggcaccggcctgcacagatacgtgtggctggtgtacgagcaggacagacccctgaagtgcgacgagcccatcctgagcaacagaagcggcgaccacagaggcaagttcaaggtggccagcttcagaaagaagtacgagctgagagcccccgtggccggcacctgctaccaggccgagtgggacgactacgtgcccaagctgtacgagcagctgagcggcaagtag

SEQ ID NO: 129811 - DNA, 468 bp, Artificial Sequence
  derived and/or modified sequence
atgcccgtggacctgagcaagtggagcggccccctgagcctgcaggaggtggacgagcagccccagcaccccctgcacgtgacctacgccggcgccgccgtggacgagctgggcaaggtgctgacccccacccaggtgaagaacagacccaccagcatcagctgggacggcctggacagcggcaagctgtacaccctggtgctgaccgaccccgacgcccccagcagaaaggaccccaagtacagagagtggcaccacttcctggtggtgaacatgaagggcaacgacatcagcagcggcaccgtgctgagcgactacgtgggcagcggcccccccaagggcaccggcctgcacagatacgtgtggctggtgtacgagcaggacagacccctgaagtgcgacttcagctgctgcctggccttcatcatcctgctgacccacagcgacctgtgcttcgaccagatctag

SEQ ID NO: 129812 - protein, 968 aa, Artificial Sequence
  derived and/or modified sequence
MPPRAPPAPGPRPPPRAAAATDTAAGAGGAGGAGGAGGPGFRPLAPRPWRWLLLLALPAACSPPPRPVYTNHWAVQVLGGPAEADRVAAAHGYLNLGQIGNLEDYYHFYHSKTFKRSTLSSRGPHTFLRMDPQVKWLQQQEVKRRVKRQVRSDPQALYFNDPIWSNMWYLHCGDKNSRCRSEMNVQAAWKRGYTGKNVVVTILDDGIERNHPDLAPNYDSYASYDVNGNDYDPSPRYDASNENKHGTRCAGEVAASANNSYCIVGIAYNAKIGGIRMLDGDVTDVVEAKSLGIRPNYIDIYSASWGPDDDGKTVDGPGRLAKQAFEYGIKKGRQGLGSIFVWASGNGGREGDYCSCDGYTNSIYTISVSSATENGYKPWYLEECASTLATTYSSGAFYERKIVTTDLRQRCTDGHTGTSVSAPMVAGIIALALEANSQLTWRDVQHLLVKTSRPAHLKASDWKVNGAGHKVSHFYGFGLVDAEALVVEAKKWTAVPSQHMCVAASDKRPRSIPLVQVLRTTALTSACAEHSDQRVVYLEHVVVRTSISHPRRGDLQIYLVSPSGTKSQLLAKRLLDLSNEGFTNWEFMTVHCWGEKAEGQWTLEIQDLPSQVRNPEKQGKLKEWSLILYGTAEHPYHTFSAHQSRSRMLELSAPELEPPKAALSPSQVEVPEDEEDYTAQSTPGSANILQTSVCHPECGDKGCDGPNADQCLNCVHFSLGSVKTSRKCVSVCPLGYFGDTAARRCRRCHKGCETCSSRAATQCLSCRRGFYHHQEMNTCVTLCPAGFYADESQKNCLKCHPSCKKCVDEPEKCTVCKEGFSLARGSCIPDCEPGTYFDSELIRCGECHHTCGTCVGPGREECIHCAKNFHFHDWKCVPACGEGFYPEEMPGLPHKVCRRCDENCLSCAGSSRNCSRCKTGFTQLGTSCITNHTCSNADETFCEMVKSNRLCERKLFIQFCCRTCLLAG

SEQ ID NO: 129813 - DNA, 2907 bp, Artificial Sequence
  derived and/or modified sequence
atgccacctcgagccccaccagcccccgggccccgtcccccaccaagggccgccgccgcgaccgacaccgcagcgggcgccggcggtgccggcggggccggaggggccggaggaccagggtttcggcctcttgcaccacgtccatggcgttggttacttctgctggcactcccagccgcctgttcacctcctcccagacctgtgtatacaaatcattgggctgtccaagtactgggcggacctgccgaggctgaccgggtggcagctgctcatgggtacctcaaccttgggcaaataggcaatctcgaagactactaccacttttaccattctaagacctttaaacggagcacccttagcagcaggggccctcatacgtttctgagaatggacccacaggtgaaatggctgcagcagcaggaagtgaagaggcgggtaaaacgacaagtccgttctgatccacaggcgctctacttcaacgaccctatttggtctaatatgtggtacctgcattgtggcgataaaaacagcagatgcagaagcgagatgaacgtccaggccgcctggaaaaggggctacacaggaaagaatgtggtggtcacaatcttagatgatggcattgagagaaaccatcccgatctggcaccaaattacgacagttatgcctcttacgacgtgaacgggaacgattacgacccaagcccccggtacgacgcctctaacgaaaacaagcatgggacccgctgcgctggggaagtcgcagcaagcgctaataacagctactgcatcgttggcattgcatataacgccaaaatcggcggaatcagaatgttggatggtgatgtgaccgatgtcgtggaagccaagtccttgggaatcagaccaaactacattgacatctactccgcgtcttggggccctgatgatgacgggaagaccgttgacgggcctggacgattggctaagcaagcatttgagtatggcatcaagaagggccgccaggggctgggtagtatcttcgtgtgggccagcggcaacggagggagagagggggactattgtagctgcgacggatacaccaattcgatctacactataagtgttagtagcgcgacagagaatgggtataagccctggtacctagaggaatgcgcttccaccttggccactacctactcttcgggcgctttttacgagcgcaaaattgtcactacagacctgcgccagagatgcacagacggtcacacggggacctcggtgagcgcccctatggtcgcgggaatcatcgcccttgctctcgaagcgaatagccagctgacttggcgggacgttcagcacctgttggtaaagactagtcggccagcacacctcaaggcctccgactggaaagtcaatggtgcagggcacaaggttagtcatttctacgggttcggcttggttgacgctgaggccctggtggtggaagcaaaaaaatggaccgctgttccatcccaacacatgtgcgtggccgctagcgacaagcgccctcggtccattcccctggtgcaggtgctccggaccaccgcattaacctcggcatgcgccgagcattcagatcagagagtcgtgtatttggaacatgtggttgtgagaacatctattagtcaccctaggaggggggaccttcagatatatcttgtcagtccctcagggacaaaaagccaactgcttgccaagagattactggacctgagcaatgaaggctttacaaattgggagttcatgaccgtgcattgctggggagagaaggctgagggacaatggaccctcgagattcaggatcttccttctcaggttagaaaccctgaaaagcagggtaagttgaaggaatggagtctgattctgtatggaactgccgaacacccttatcacaccttctccgcacatcagtctcggtctaggatgctcgagttgtccgctcccgagctcgagccccccaaggccgccctgtctccttctcaggtggaggtgcccgaggacgaagaagattatacggcccagtctaccccgggctccgccaatattctccagacctctgtgtgccacccagaatgcggtgacaaggggtgcgacgggcccaatgcagaccagtgcttgaattgtgtgcacttcagcctcggatccgtgaaaacgtcacgaaaatgcgtctccgtgtgccctctcggttactttggagacacagcggctcgccgatgtagacggtgccacaaaggatgcgagacctgctcctccagagcagccacccagtgcctttcgtgtcggcgtggtttttaccaccatcaggagatgaacacatgtgttacactgtgcccggcaggcttctatgctgacgagagtcagaaaaactgtctgaagtgtcatccatcctgtaaaaagtgtgtggatgagcctgagaaatgcacggtatgcaaggaaggattttccctcgccaggggaagctgcataccagactgcgagcccggaacatactttgactctgaattaatcaggtgtggcgagtgccatcacacttgtggcacttgcgtcggtcctggtcgagaggaatgcatccactgcgctaaaaattttcacttccatgactggaagtgtgtccctgcatgcggggagggattttaccccgaagagatgcctgggctgccgcataaggtatgcagacgttgtgatgagaattgcttatcctgcgcaggttcctccaggaattgtagccgctgcaagacgggatttactcagttgggaaccagttgcatcacaaatcatacttgtagtaatgctgatgagaccttctgcgagatggtaaaatcaaatcgcttgtgcgaaaggaaactctttatccagttctgctgtagaacttgtctgctcgccggctag

SEQ ID NO: 129814 - DNA, 2907 bp, Artificial Sequence
  derived and/or modified sequence
atgccaccccgggcccccccagcccctggcccccggcccccacccagggctgctgctgccacagacacagctgctggagctggaggagctgggggcgccggcggggccggcggccctggcttccggcccctggccccccggccctggcgctggctgctgctgctggccctgcctgctgcctgcagccccccacccaggcctgtgtacaccaaccactgggccgtgcaggtgctgggcggccctgctgaggccgacagagtggccgccgcccacggctacctgaacctgggccagatcggcaacctggaggactactaccacttctaccacagcaagaccttcaagaggagcaccctgagcagccggggcccccacaccttcctgaggatggacccccaggtgaagtggctgcagcagcaggaggtgaagagaagagtgaagaggcaggtgcggagtgacccccaggccctgtacttcaatgaccccatctggagcaacatgtggtacctgcactgtggggacaagaacagccgctgccgctctgagatgaatgtgcaggccgcctggaagaggggctacaccgggaagaatgtggtggtgaccatcctggatgatggcattgaaagaaaccacccagacctggcccccaactatgacagctatgccagctatgatgtgaatggaaatgactatgaccccagccccaggtatgatgccagcaatgaaaacaagcacggcacccgctgtgccggggaggtggccgccagcgccaacaacagctactgcatcgtgggcatcgcctacaatgccaagattggaggcatccgcatgctggatggagatgtgacagatgtggtggaggccaagagcctgggcatccggcccaactacatcgacatctacagcgcctcctggggcccagatgatgatggcaagacagtggatggccctggccgcctggccaagcaggcctttgaatatggcatcaagaagggccggcagggcctgggcagcatctttgtgtgggccagcggaaatggaggccgggagggggactactgcagctgtgatggctacaccaacagcatctacaccatctctgtgagcagcgccacagaaaatggctacaagccctggtacctggaggagtgtgccagcaccctggccaccacctacagcagcggggccttctatgaaaggaagatcgtgaccacagacctgcggcagcgctgcacagatggccacacaggcacctctgtgtctgcccccatggtggccggcatcatcgccctggccctggaggccaacagccagctgacctggagagatgtgcagcacctgctggtgaagaccagcaggcctgcccacctgaaggccagtgactggaaggtgaatggagctggccacaaggtgagccacttctacggcttcggcctggtggatgctgaggccctggtggtggaggccaagaagtggacagctgtgcccagccagcacatgtgtgtggccgccagtgacaagaggcccaggagcatccccctggtgcaggtgctgcggaccacagccctgaccagcgcctgtgccgagcacagcgaccagagggtggtgtacctggagcacgtggtggtgaggaccagcatcagccaccccaggagaggagacctgcagatctacctggtgagccccagcggcaccaagagccagctgctggccaagaggctgctggacctgagcaatgaaggcttcaccaactgggagttcatgacagtgcactgctggggcgagaaggccgagggccagtggaccctggagatccaggacctgcccagccaggtgagaaatcctgagaagcagggcaagctgaaggagtggagcctcatcctgtatggaacagctgagcacccctaccacaccttcagcgcccaccagagccgcagcaggatgctggagctgagcgcccctgagctggagccccccaaggccgccctgagccccagccaggtggaggtgcctgaagatgaggaggactacacagcccagagcaccccaggcagcgccaacatcctgcagacctctgtgtgccacccagaatgtggggacaagggctgtgatggccccaatgctgaccagtgcctgaactgtgtgcacttcagcctgggctctgtgaagaccagcaggaaatgtgtgtctgtgtgccccctgggctactttggagacacagctgcccggcgctgccgccgctgccacaagggctgtgagacctgcagcagcagagctgccacccagtgcctgagctgcagaagaggcttctaccaccaccaggagatgaacacctgtgtgaccctgtgcccagctggcttctatgcagatgagagccagaagaactgcctgaagtgccaccccagctgcaagaagtgtgtggatgagcctgagaagtgcaccgtgtgcaaggagggcttcagcctggcccggggcagctgcatcccagactgtgagcccggcacctactttgattctgagctgatccgctgtggggagtgccaccacacctgtggcacctgtgtgggccctggccgggaggagtgcatccactgtgccaagaacttccacttccatgactggaagtgtgtgcctgcctgtggggagggcttctacccagaggagatgcctggcctgccccacaaggtgtgccgccgctgtgatgagaactgcctgagctgtgccggcagcagcaggaactgcagccgctgcaagacaggcttcacccagctgggcaccagctgcatcaccaaccacacctgcagcaatgctgatgagaccttctgtgagatggtgaagagcaaccggctgtgtgagaggaagctgttcatccagttctgctgcaggacctgcctgctggccggctag

SEQ ID NO: 129815 - DNA, 2907 bp, Artificial Sequence
  derived and/or modified sequence
atgcccccccgggccccccccgcccccggcccccggcccccccccagggccgccgccgccacagacacagcggccggcgctggtggagccggaggggcaggcggcgctgggggcccaggctttaggccgctggcccccaggccatggcgctggcttcttcttctcgcactccctgccgcctgctcgccaccaccacggccggtttatactaatcactgggctgtgcaggtgctgggcggccctgctgaggcagaccgggtcgcagcagctcatgggtatcttaatctgggacagatagggaacctcgaggattactaccatttctatcatagcaaaaccttcaagcgctccactctgtcttccagggggccccacacattcttaagaatggacccacaagtgaagtggctgcagcaacaggaggtcaaacgtcgagtgaaaagacaggtgcggtctgacccacaggccctctattttaatgaccccatctggagcaatatgtggtacctgcattgtggcgataaaaattcccggtgtagaagcgagatgaacgtgcaggccgcttggaagaggggttacaccggaaagaacgtggtagtgaccattctagatgatggcatcgagaggaaccatcccgatctggcccccaattatgacagctacgcaagttacgacgtcaatggcaacgattacgaccctagcccccgttatgatgcatctaacgagaacaagcatggtactagatgtgcaggtgaagtggcggctagcgctaacaactcctactgtattgtcgggatcgcatacaacgccaagatcggagggatcaggatgctggacggcgatgtgacagacgtcgtcgaagctaagtccctgggaatacgacccaactatattgacatttattccgcctcatggggacctgacgacgatggtaagacagttgatggaccaggtaggctggccaaacaggcatttgaatacgggattaaaaaggggaggcaggggttggggagcattttcgtttgggcctcgggtaatgggggtcgagagggcgactactgtagttgcgacgggtatacgaactctatttacactatttctgtgagctctgccacggaaaacgggtataaaccctggtatcttgaagagtgtgctagcacccttgctactacctactcaagcggggcattctatgagcgaaagatcgtaactaccgatctccgacagagatgcacggatgggcataccggcacaagcgtgagtgcaccaatggtggctggtatcatcgcactggctcttgaagcaaatagtcaactgacgtggagagacgtgcaacacctgttggtcaagacttctcggcccgcacacctaaaggcgagtgactggaaagtcaacggcgcaggacacaaggtatcacacttttatggtttcgggctggtggatgcagaggcgctggttgtcgaggcgaagaaatggacagccgtaccatcgcagcatatgtgtgttgccgcctcagataaacgcccccggtcaatcccactggtacaagtgctgcgaaccaccgctcttacctccgcgtgcgcggaacactctgatcagagagtcgtgtaccttgagcacgtcgtagtgagaactagtattagccaccctcgtagaggagatctgcaaatctacctcgtatccccaagtggcaccaaatcccaactgctggcgaagagactccttgacctctccaatgagggatttaccaattgggaatttatgacagtacattgctggggcgagaaagccgaaggccagtggaccctggaaatccaggacttaccctcacaggtcaggaacccggaaaagcaggggaagcttaaagaatggagccttatcttatatggcactgccgaacatccctatcatacctttagcgcccaccagagccggtcacggatgctggaactctcagcacctgaattggaaccccctaaagccgccctgagcccttcccaggtggaagtgccagaagacgaagaggattacaccgctcagagtaccccaggttcggcaaacatcctgcagacgtcggtgtgtcaccccgaatgtggtgacaagggatgtgatggtcctaacgctgatcaatgtctcaactgtgtacactttagtttaggctctgtaaaaacaagtcgcaagtgcgtgagcgtgtgtcctctggggtattttggtgatacggccgcccggaggtgccgccggtgccacaagggctgtgagacatgttcgtcaagggccgcaacacagtgcttgtcttgcaggcgggggttctaccatcatcaggaaatgaatacatgcgtgacactgtgtcctgccgggttctatgccgacgaatcacaaaaaaattgtcttaaatgccacccatcatgcaaaaaatgcgtcgacgagcctgagaagtgcactgtgtgcaaggaaggcttctctctcgccagagggagttgtattcctgactgcgagccaggcacttacttcgacagcgagttgattaggtgcggtgaatgtcaccacacctgtggaacctgtgtaggccccggcagggaggaatgtattcactgtgccaagaattttcacttccatgattggaaatgcgtgcctgcctgtggtgagggcttttaccccgaagagatgccaggccttccccacaaagtttgccgcagatgcgatgagaattgtctctcctgtgccggctcctcccgcaactgtagcaggtgtaaaacaggttttactcagctaggaacgtcatgcatcactaaccatacctgtagtaatgcggatgagaccttctgcgaaatggtcaagtcaaatagactgtgtgaacggaagttgtttatacaattctgctgccgcacatgtctcttggccgggtag

SEQ ID NO: 129816 - DNA, 2907 bp, Artificial Sequence
  derived and/or modified sequence
atgccaccaagagcccctcccgctccaggtcctcgtccgccacctcgtgccgcagcagctactgataccgctgccggagccggaggagctggaggcgctggaggcgctgggggacccggttttcgtccactggcacccagaccctggagatggctgctgctcctggcgctgcctgcagcttgctcacctcctcccaggccagtatacacgaatcattgggctgtgcaggtgttaggaggccctgcagaggccgatagggtggctgctgctcatggctacctcaacctcggacagataggaaatttggaagactactaccacttctaccattcaaagactttcaagcggagtaccctttcttcaaggggcccacatacgttcttgcgaatggatcctcaagtaaaatggctgcaacaacaggaagtgaagcgacgagtgaaaagacaggtacgctctgatccccaggccctttatttcaatgacccaatttggagcaacatgtggtacctgcactgcggggacaagaactcaagatgtcgtagtgaaatgaacgtccaggccgcttggaaaagagggtatactggcaaaaatgtggtggtgactatattagatgacggaatcgagcgaaatcaccccgatctcgcgccaaactacgactcatacgccagttatgatgtgaatggcaatgactatgatccgagcccgaggtacgatgcttccaacgaaaataagcacgggacaaggtgtgcgggtgaagtagctgcaagtgctaataacagctattgcatcgtcggcattgcttataacgccaagattggagggatccgaatgctcgatggagacgttacagacgtggtggaggccaagagtctgggcattcggccaaactatatagacatatattccgcatcgtgggggcctgatgatgatggcaagacagtggatggcccaggcaggctagccaaacaggcatttgaatacggaatcaaaaagggccgtcagggcctgggaagcatttttgtctgggccagcggaaatggaggtcgtgagggcgactattgcagctgcgacggctacacaaactccatttataccatcagcgtttcatcggctaccgagaacggttacaagccttggtacctggaagaatgcgctagcaccctggccaccacatattccagtggcgctttctatgagagaaaaattgtgaccacagatctgcgccagagatgcacagacggtcacaccggaacatctgttagcgcccctatggtggccggtatcattgccctggctctggaggcgaactcccaattaacttggcgggacgttcagcatctgttagtcaaaacgtcaagaccggcacatttaaaagcttcagattggaaagtgaatggcgctgggcataaagtgtcacacttttatggattcggccttgttgatgccgaggccttggttgtcgaggccaagaaatggaccgccgtgccaagtcagcatatgtgcgtggcagcaagcgacaagagacctcgttcaatcccattggttcaggtactgcgaactacagctctgactagcgcttgtgcggagcatagcgatcaacgggtcgtgtacctggagcacgtggttgtgcggacaagtattagccacccgagaagaggcgatctgcagatttacctggtaagcccttccgggaccaagtcacagcttctggcgaaaagactccttgatttgtctaacgagggtttcacgaactgggagtttatgaccgttcattgctggggggagaaggcagagggtcagtggacgctggagatccaagacctcccgtcacaagtacgaaatccagaaaaacagggtaaacttaaggaatggtcactcatactatatgggaccgccgaacacccatatcacacattttccgctcaccagtctaggtctagaatgctggagctctctgccccagagttagagccacctaaggcagctttgagtccatctcaggtggaggtgcccgaagatgaggaggactatacagcacaatccacgcccggatcagcaaatattttgcaaactagcgtctgccatccggagtgcggggataaaggttgcgacggccctaacgcagatcagtgcctgaactgcgtccatttcagccttggaagtgtgaaaacttccagaaagtgcgtctctgtttgtccccttgggtacttcggcgatactgctgcccgtaggtgccggcgttgccataaaggctgcgaaacatgttcatcgagggccgctactcagtgcctgtcatgccgacgagggttctaccaccaccaggagatgaacacatgcgttaccctctgccccgcaggcttctatgctgacgagtctcagaaaaactgtttgaagtgccacccctcatgcaagaagtgcgtcgatgagccggagaaatgtaccgtctgcaaagaggggttttcgttggcgaggggctcttgcatcccagattgcgaacccggtacttactttgacagtgagctgattagatgcggcgaatgccaccatacatgcgggacctgcgttggcccaggtagggaggagtgtatccactgcgcaaaaaatttccactttcacgattggaagtgcgtgccagcgtgtggagagggcttctatccagaggaaatgcccggtctgccacacaaagtctgccgccgatgtgatgagaattgcctttcatgtgcgggttcttcacgcaattgttcccgttgcaagacaggctttacgcagcttggcacatcatgcatcacaaatcacacatgctctaatgctgacgagactttctgcgagatggttaagtccaaccggctctgtgaacgaaagctttttattcagttctgctgtcgcacctgcttgttggccggatag

SEQ ID NO: 129817 - DNA, 4236 bp, Artificial Sequence
  derived and/or modified sequence
atgcctccgcgcgcgccgcctgcgcccgggccccggccgccgccccgggccgccgccgccaccgacaccgccgcgggcgcggggggcgcggggggcgcggggggcgccggcgggcccgggttccggccgctcgcgccgcgtccctggcgctggctgctgctgctggcgctgcctgccgcctgctcccccccgccgcgccccgtctacaccaaccactgggcggtgcaagtgctgggcggcccggccgaggcggaccgcgtggcggcggcgcacgggtacctcaacttgggccagattggaaacctggaagattactaccatttttatcacagcaaaacctttaaaagatcaaccttgagtagcagaggccctcacaccttcctcagaatggacccccaggtgaaatggctccagcaacaggaagtgaaacgaagggtgaagagacaggtgcgaagtgacccgcaggccctttacttcaacgaccccatttggtccaacatgtggtacctgcattgtggcgacaagaacagtcgctgccggtcggaaatgaatgtccaggcagcgtggaagaggggctacacaggaaaaaacgtggtggtcaccatccttgatgatggcatagagagaaatcaccctgacctggccccaaattatgattcctacgccagctacgacgtgaacggcaatgattatgacccatctccacgatatgatgccagcaatgaaaataaacacggcactcgttgtgcgggagaagttgctgcttcagcaaacaattcctactgcatcgtgggcatagcgtacaatgccaaaataggaggcatccgcatgctggacggcgatgtcacagatgtggtcgaggcaaagtcgctgggcatcagacccaactacatcgacatttacagtgccagctgggggccggacgacgacggcaagacggtggacgggcccggccgactggctaagcaggctttcgagtatggcattaaaaagggccggcagggcctgggctccattttcgtctgggcatctgggaatggcgggagagagggggactactgctcgtgcgatggctacaccaacagcatctacaccatctccgtcagcagcgccaccgagaatggctacaagccctggtacctggaagagtgtgcctccaccctggccaccacctacagcagtggggccttttatgagcgaaaaatcgtcaccacggatctgcgtcagcgctgtaccgatggccacactgggacctcagtctctgcccccatggtggcgggcatcatcgccttggctctagaagcaaacagccagttaacctggagggacgtccagcacctgctagtgaagacatcccggccggcccacctgaaagcgagcgactggaaagtgaacggcgcgggtcataaagttagccatttctatggatttggtttggtggacgcagaagctctcgttgtggaggcaaagaagtggacagcagtgccatcgcagcacatgtgtgtggccgcctcggacaagagacccaggagcatccccttagtgcaggtgctgcggactacggccctgaccagcgcctgcgcggagcactcggaccagcgggtggtctacttggagcacgtggtggttcgcacctccatctcacacccacgccgaggagacctccagatctacctggtttctccctcgggaaccaagtctcaacttctggcaaagaggttgctggatctttccaatgaagggtttacaaactgggaattcatgactgtccactgctggggagaaaaggctgaagggcagtggaccttggaaatccaagatctgccatcccaggtccgcaacccggagaagcaagggaagttgaaagaatggagcctcatactgtatggcacagcagagcacccgtaccacaccttcagtgcccatcagtcccgctcgcggatgctggagctctcagccccagagctggagccacccaaggctgccctgtcaccctcccaggtggaagttcctgaagatgaggaagattacacagctcaatccaccccaggctctgctaatattttacagaccagtgtgtgccatccggagtgtggtgacaaaggctgtgatggccccaatgcagaccagtgcttgaactgcgtccacttcagcctggggagtgtcaagaccagcaggaagtgcgtgagtgtgtgccccttgggctactttggggacacagcagcaagacgctgtcgccggtgccacaaggggtgtgagacctgctccagcagagctgcgacgcagtgcctgtcttgccgccgcgggttctatcaccaccaggagatgaacacctgtgtgaccctctgtcctgcaggattttatgctgatgaaagtcagaaaaattgccttaaatgccacccaagctgtaaaaagtgcgtggatgaacctgagaaatgtactgtctgtaaagaaggattcagccttgcacggggcagctgcattcctgactgtgagccaggcacctactttgactcagagctgatcagatgtggggaatgccatcacacctgcggaacctgcgtggggccaggcagagaagagtgcattcactgtgcgaaaaacttccacttccacgactggaagtgtgtgccagcctgtggtgagggcttctacccagaagagatgccgggcttgccccacaaagtgtgtcgaaggtgtgacgagaactgcttgagctgtgcaggctccagcaggaactgtagcaggtgtaagacgggcttcacacagctggggacctcctgcatcaccaaccacacgtgcagcaacgctgacgagacattctgcgagatggtgaagtccaaccggctgtgcgaacggaagctcttcattcagttctgctgccgcacgtgcctcctggccgggtaagggtgcctagctgcccacagagggcaggcactcccatccatccatccgtccaccttcctccagactgtcggccagagtctgtttcaggagcggcgccctgcacctgacagctttatctccccaggagcagcatctctgagcacccaagccaggtgggtggtggctcttaaggaggtgttcctaaaatggtgatatcctctcaaatgctgcttgttggctccagtcttccgacaaactaacaggaacaaaatgaattctgggaatccacagctctggctttggagcagcttctgggaccataagtttactgaatcttcaagaccaaagcagaaaagaaaggcgcttggcatcacacatcactcttctccccgtgcttttctgcggctgtgtagtaaatctccccggcccagctggcgaaccctgggccatcctcacatgtgacaaagggccagcagtctacctgctcgttgcctgccactgagcagtctggggacggtttggtcagactataaataagataggtttgagggcataaaatgtatgaccactggggccggagtatctatttctacatagtcagctacttctgaaactgcagcagtggcttagaaagtccaattccaaagccagaccagaagattctatcccccgcagcgctctcctttgagcaagccgagctctccttgttaccgtgttctgtctgtgtcttcaggagtctcatggcctgaacgaccacctcgacctgatgcagagccttctgaggagaggcaacaggaggcattctgtggccagccaaaaggtaccccgatggccaagcaattcctctgaacaaaatgtaaagccagccatgcattgttaatcatccatcacttcccattttatggaattgcttttaaaatacatttggcctctgcccttcagaagactcgtttttaaggtggaaactcctgtgtctgtgtatattacaagcctacatgacacagttggatttattctgccaaacctgtgtaggcattttataagctacatgttctaatttttaccgatgttaattattttgacaaatatttcatatattttcattgaaatgcacagatctgcttgatcaattcccttgaatagggaagtaacatttgccttaaattttttcgacctcgtctttctccatattgtcctgctcccctgtttgacgacagtgcatttgccttgtcacctgtgagctggagagaacccagatgttgtttattgaatctacaactctgaaagagaaatcaatgaagcaagtacaatgttaaccctaaattaataaaagagttaacatcccatggc

SEQ ID NO: 129818 - DNA, 2907 bp, Artificial Sequence
  derived and/or modified sequence
atgccccccagagccccccccgcccccggccccagacccccccccagagccgccgccgccaccgacaccgccgccggcgccggcggcgccggcggcgccggcggcgccggcggccccggcttcagacccctggcccccagaccctggagatggctgctgctgctggccctgcccgccgcctgcagccccccccccagacccgtgtacaccaaccactgggccgtgcaggtgctgggcggccccgccgaggccgacagagtggccgccgcccacggctacctgaacctgggccagatcggcaacctggaggactactaccacttctaccacagcaagaccttcaagagaagcaccctgagcagcagaggcccccacaccttcctgagaatggacccccaggtgaagtggctgcagcagcaggaggtgaagagaagagtgaagagacaggtgagaagcgacccccaggccctgtacttcaacgaccccatctggagcaacatgtggtacctgcactgcggcgacaagaacagcagatgcagaagcgagatgaacgtgcaggccgcctggaagagaggctacaccggcaagaacgtggtggtgaccatcctggacgacggcatcgagagaaaccaccccgacctggcccccaactacgacagctacgccagctacgacgtgaacggcaacgactacgaccccagccccagatacgacgccagcaacgagaacaagcacggcaccagatgcgccggcgaggtggccgccagcgccaacaacagctactgcatcgtgggcatcgcctacaacgccaagatcggcggcatcagaatgctggacggcgacgtgaccgacgtggtggaggccaagagcctgggcatcagacccaactacatcgacatctacagcgccagctggggccccgacgacgacggcaagaccgtggacggccccggcagactggccaagcaggccttcgagtacggcatcaagaagggcagacagggcctgggcagcatcttcgtgtgggccagcggcaacggcggcagagagggcgactactgcagctgcgacggctacaccaacagcatctacaccatcagcgtgagcagcgccaccgagaacggctacaagccctggtacctggaggagtgcgccagcaccctggccaccacctacagcagcggcgccttctacgagagaaagatcgtgaccaccgacctgagacagagatgcaccgacggccacaccggcaccagcgtgagcgcccccatggtggccggcatcatcgccctggccctggaggccaacagccagctgacctggagagacgtgcagcacctgctggtgaagaccagcagacccgcccacctgaaggccagcgactggaaggtgaacggcgccggccacaaggtgagccacttctacggcttcggcctggtggacgccgaggccctggtggtggaggccaagaagtggaccgccgtgcccagccagcacatgtgcgtggccgccagcgacaagagacccagaagcatccccctggtgcaggtgctgagaaccaccgccctgaccagcgcctgcgccgagcacagcgaccagagagtggtgtacctggagcacgtggtggtgagaaccagcatcagccaccccagaagaggcgacctgcagatctacctggtgagccccagcggcaccaagagccagctgctggccaagagactgctggacctgagcaacgagggcttcaccaactgggagttcatgaccgtgcactgctggggcgagaaggccgagggccagtggaccctggagatccaggacctgcccagccaggtgagaaaccccgagaagcagggcaagctgaaggagtggagcctgatcctgtacggcaccgccgagcacccctaccacaccttcagcgcccaccagagcagaagcagaatgctggagctgagcgcccccgagctggagccccccaaggccgccctgagccccagccaggtggaggtgcccgaggacgaggaggactacaccgcccagagcacccccggcagcgccaacatcctgcagaccagcgtgtgccaccccgagtgcggcgacaagggctgcgacggccccaacgccgaccagtgcctgaactgcgtgcacttcagcctgggcagcgtgaagaccagcagaaagtgcgtgagcgtgtgccccctgggctacttcggcgacaccgccgccagaagatgcagaagatgccacaagggctgcgagacctgcagcagcagagccgccacccagtgcctgagctgcagaagaggcttctaccaccaccaggagatgaacacctgcgtgaccctgtgccccgccggcttctacgccgacgagagccagaagaactgcctgaagtgccaccccagctgcaagaagtgcgtggacgagcccgagaagtgcaccgtgtgcaaggagggcttcagcctggccagaggcagctgcatccccgactgcgagcccggcacctacttcgacagcgagctgatcagatgcggcgagtgccaccacacctgcggcacctgcgtgggccccggcagagaggagtgcatccactgcgccaagaacttccacttccacgactggaagtgcgtgcccgcctgcggcgagggcttctaccccgaggagatgcccggcctgccccacaaggtgtgcagaagatgcgacgagaactgcctgagctgcgccggcagcagcagaaactgcagcagatgcaagaccggcttcacccagctgggcaccagctgcatcaccaaccacacctgcagcaacgccgacgagaccttctgcgagatggtgaagagcaacagactgtgcgagagaaagctgttcatccagttctgctgcagaacctgcctgctggccggctag

SEQ ID NO: 129819 - protein, 229 aa, Artificial Sequence
  derived and/or modified sequence
MSQGDSNPAAIPHAAEDIQGDDRWMSQHNRFVLDCKDKEPDVLFVGDSMVQLMQQYEIWRELFSPLHALNFGIGGDTTRHVLWRLKNGELENIKPKVIVVWVGTNNHENTAEEVAGGIEAIVQLINTRQPQAKIIVLGLLPRGEKPNPLRQKNAKVNQLLKVSLPKLANVQLLDTDGGFVHSDGAISCHDMFDFLHLTGGGYAKICKPLHELIMQLLEETPEEKQTTIA

SEQ ID NO: 129820 - DNA, 690 bp, Artificial Sequence
  derived and/or modified sequence
atgtcacaaggagacagcaatcctgccgccatcccccacgctgccgaggacattcagggcgatgacagatggatgtctcagcataatagatttgtactggattgtaaggataaagagccagatgtactgtttgtgggggatagtatggtgcaattgatgcagcaatatgaaatctggcgagagctgttctcccctcttcacgccctgaattttggtataggaggcgacaccactaggcacgttctttggaggctgaagaatggcgagctggaaaatattaagcctaaagtaattgtggtttgggtggggacaaataatcacgagaataccgccgaggaggttgccggcggcattgaggctatcgtgcagctgattaatacaagacaacctcaagcaaagatcatcgtccttgggctgcttccccgcggcgaaaagccaaaccccctgagacagaaaaacgccaaggttaaccagctgctgaaggtcagtctccctaagttggcaaacgtgcagctgttggataccgatggcggctttgtccactcagatggcgccatctcgtgtcatgatatgttcgactttcttcatcttacaggcggagggtacgctaagatttgcaagcctctgcatgagctgataatgcaacttctggaagagacgcccgaggaaaagcagaccacgatcgcctag

SEQ ID NO: 129821 - DNA, 690 bp, Artificial Sequence
  derived and/or modified sequence
atgagccagggcgacagcaacccagctgccatcccccacgccgctgaggacatccagggagatgaccgctggatgagccagcacaacagatttgtgctggactgcaaggacaaggagccagatgtgctgtttgtgggggacagcatggtgcagctgatgcagcagtatgagatctggagggagctgttcagccccctgcacgccctgaactttggaattggaggagacaccaccaggcatgtgctgtggaggctgaagaatggagagctggagaacatcaagcccaaggtgattgtggtgtgggtgggcaccaacaaccacgagaacacagctgaggaggtggccggcggcatcgaggccatcgtgcagctgatcaacacccggcagccccaggccaagatcatcgtgctgggcctgctgcccagaggagagaagcccaaccccctgcggcagaagaatgccaaggtgaaccagctgctgaaggtgtccctgcccaagctggccaacgtgcagctgctggacacagatggcggctttgtgcacagtgatggagccatcagctgccacgacatgtttgacttcctgcacctgaccggcggcggctacgccaagatctgcaagcccctgcacgagctgatcatgcagctgctggaggagaccccagaggagaagcagaccaccatcgcctag

SEQ ID NO: 129822 - DNA, 690 bp, Artificial Sequence
  derived and/or modified sequence
atgagccagggcgacagcaaccccgccgccatcccccacgccgccgaagacatccaaggcgatgatcgttggatgtcacagcacaaccggtttgtgctcgattgcaaagacaaagaacccgatgtcctatttgttggtgactctatggtgcagctgatgcagcagtatgaaatctggagggagctgttctcccctctgcatgccctcaatttcggcataggtggcgacacgactaggcatgtactgtggaggcttaaaaacggagaactggaaaatatcaagcccaaagttatagtcgtctgggtcggtaccaataaccatgaaaataccgcggaggaagtcgcgggaggaattgaggctatcgtgcaactgatcaacacacgccaacctcaagcaaaaattattgtgctcgggttgcttccgagaggagagaaaccaaatcctctccgccaaaaaaacgctaaggtgaaccagttgttaaaagtgtccctgcccaaacttgcaaatgtacagttgctcgacacagacggaggcttcgtgcatagtgatggcgccattagttgtcatgatatgttcgactttctgcatttgacaggcggcggctacgccaagatatgcaagcccctgcatgagctgattatgcagctgctagaggagacgcctgaggagaagcagactaccatcgcttag

SEQ ID NO: 129823 - DNA, 4195 bp, Artificial Sequence
  derived and/or modified sequence
gtggcaggggaaccggaagtggaggagctgctgctggtgctggggccggaggagggacgcgccggagcgggaccgacgggaccgagcgagcgaccgacgcgccacccgccgacgcctcagccgcttggggcccgcacggaccctctacttcagtgtagaatgagccaaggagactcaaacccagcagctattccgcatgcagcagaagatattcaaggagatgaccgatggatgtctcagcacaacagatttgttttggactgtaaagacaaagagcctgatgtactgttcgtgggagactccatggtgcagttaatgcagcaatatgagatatggcgagagcttttttccccacttcatgcactgaattttggaattgggggagatacaacaagacatgttttgtggagactaaagaatggagaactggagaatattaagcctaaggtcattgttgtctgggtaggaacaaataaccacgaaaatacagcagaagaagtagcaggtgggatcgaggccattgtacaacttatcaacacaaggcagccacaggccaaaatcattgtattgggtttgttacctcgaggtgagaaacccaatcctttgaggcaaaagaacgccaaggtgaaccaactcctcaaggtttcgctgccgaagcttgccaacgtgcagctcctggataccgacgggggttttgtgcactcggacggtgccatctcctgccacgacatgtttgattttctgcatctgacaggagggggctatgcaaagatctgcaaacccctgcatgaactgatcatgcagttgttggaggaaacacctgaggagaaacaaaccaccattgcctgactggctcttatcagtgttaatagcatctcagcttcctcagatcagttctatcactggcactacagaatccttctctttcttaaggcactttgcattgtagaatgttcctggatgttcatatctagtgtttgaaggggaggagggatttaaactggtcctgtacatagaaggtttgtttgacagaggagaaaaattagccaaggaagattgttgtttaaattcatttgaaaccagaaggggactttttagttgtatgtgtaacacattcattgaattattatcactgttttcttgggacaacatcaagcctaaatactgaacaatatgaagattcttttcttggcctttctgtggattatgtcatatataataattatcagaatcattctacttggctttaaaacatgttttctccaatttttttaaggttcataatttagccttttgtttttatgttgcttagattcttatgtatactgaatattttattaacatgtagcatcaggttgaacatgcttgtcattgatatatggaagatgctatagttagaagtgaatttgttctgctttcttaatcttttccatgcttagcagtgaaaaacaggttttgccccagtagagggattctttggagggtattattttttatgctgctgaatatcatgtctataatagacccgtgcatgcagcctttcctccttattccccttcatgcccccctttccccttcattccccccgccaccccgtttttttttttttttttttttttttggttcttgttgacattacaagcttttaacacatttttgacctaggagccctgttgctggaagtatagtctccagccagttactctcatgatagtactgctataaaactcattcttgtgtggtgttctgtgctatagattctgtgtattgctgttcatattcggagttctggttttgtttttcccttaaaacctgttaacagttttttttgggggtggggggattcagaactcttgtttcccattccatagcacctgacattatttcaagttttataatatcttaaggtgtatattttattttttttattggcttagttgttttttgttttgttttgtttgagatggagtttcactgttgcccaggctggggtgcaatggtgtgatcttggctcactgcagcctccacctcccgagttcaaatgattctcctgcctcagcttcctgagtagctgggattacaggtgcatgccaccatgcccggctaatttttatatttttattagagacgggatttcgccatgttaaccaggctggtctcgaactcctgacctcaggtgatctgcccgccttggcctcccaaagtgctgggattacaggcatgagccaccgtgcctggccttattggcttagtttttaaattatcctccaaaaattttgggcctttttctgtggggaaacaagtgaagctgctcttcagcatagacactacctttatcccatcattttagtaaaaactaggtttgtttcacttctgaggtgtcttattaatgtacttcatctgagaatttgttgatcttaatgttcgagctatataagaactgccattaaaaaaaatgggataatagatgattttatcagtatacctgtggaatatgtacaaactggatctatagatattttgaactggaccaggtgggtattgaagtaacccatcaaaatatgctctgcagtgattccgcttaatgtttaaattcagtaacgtacttgaaaggcaaatttcagtgcttttgtatgttggaggagggcttactgatgcgtgctaagaccgatttctgattgagggatgaaccttgggctcatttttttcttgtgaagtctctttctagaaaattttttggttttgttctttttaaaaaatacatacttttttgaatgtatcatgtcttcattaacaacagaaaatccacatggtgtttactaaacttgtttacgacattaaaaatttcctttttatttttagtagcccaggttgagtttttcacaagagatttttttcttagctgaggtatagttgtatagcaagaagaattaagccagatttttgtgtgtggaaagacagttttctatccacgtctttttctgtttgtcagaaggtgggagtatggtccaaataaatccattaggttactcctgcagcatgcgcttttagcttctctcttgactgaggatcaaatatccctttgtgagctggccctcagctcctttgctcatgtgtacaaacctcagatgttactacattttatatctaccagagctattcaagcaatagtatttgaaccactagccttttaaataaaattctgccccattactgatgtgcagatattgagttcactttcattttttgccagatttctttgcactactttaggtaaaaatagttaatctatttttctttgacatcctagtttgcgtcagtgacagaacttactgcttagtctttgtactttttaaaaaatctataaatttaatgcactgtccaagtgaaatgtcctagttgtcattgtgattaaggggccaactttccaggcagctagcagagatactattctcttcctctcccagcaaatttgtattccttcgcccacgcattcctgctatactagatggcagccagtgatggaactataaagatgtctgtggtcatatgttgaatgtggcagcttgaagatgtactgccacgggtgatctagggcaggctgtcttccagtccatgtgttctcggtcgccgtagacagcgctctggctaccaccgtgaggctacttgaactgtcaggggcatctgcctaaaccagaatcttttgtcagaaaccttaacccaacaaaacaaatcttgagtagctcatgcccggctcttaggaattttgtctgtttaaaaaaaaaaaaaaaaaaaaagtccaacttactttattttatttttttaacctagtcactgtttacaattgtatgctaaagcctgaaatattgtctgtgctgtggtgtatgagcattgccaactttatatttattgcagtgaagaagaaactaaaaatatatggaaatgaggagcatgtccaagctcctaaatccgtgtgggtgcatgtgggagaagtgagttagggcctcttgaaaggaggctttttggagaggggtcccccaggtttcttggtgttcctgcttggggatcactgctgctagctgactggacctccccattggaagtttgtgattttgctttggcaaagtttcattgactagtagaactcattctgttttagtgtatatttcaatataaatgtaaacattttgctcaa

SEQ ID NO: 129824 - DNA, 690 bp, Artificial Sequence
  derived and/or modified sequence
atgtctcaaggagacagcaatccagccgctatccctcacgctgccgaagatatacagggcgatgaccgctggatgtcccagcacaacaggtttgtcctggactgtaaggacaaggaaccggatgtgctctttgtgggagactcgatggtgcagctcatgcagcaatacgaaatttggagggaactttttagccctctgcatgctttgaatttcggcattgggggtgatactacacggcatgtgctgtggagacttaagaatggagaactagaaaatatcaagccaaaggtgatcgttgtctgggttggtacaaataaccatgagaacacagccgaggaggtcgccggaggcatcgaagctatcgtgcaactcatcaacacccgccagcctcaggccaagatcatcgtacttggtctgctgccacggggtgagaagccaaatcccttgagacagaagaatgcgaaggtgaatcagctgctaaaagtatcacttcccaaactcgcgaatgtgcaactactagacaccgacggagggtttgtccactccgatggagccatttcttgtcatgatatgtttgattttctccacttaacaggtggcggatatgcgaaaatctgtaagccccttcatgagctgataatgcagctgttggaggaaacgcccgaggaaaaacaaacaacaatcgcctag

SEQ ID NO: 129825 - DNA, 690 bp, Artificial Sequence
  derived and/or modified sequence
atgagccagggcgacagcaaccccgccgccatcccccacgccgccgaggacatccagggcgacgacagatggatgagccagcacaacagattcgtgctggactgcaaggacaaggagcccgacgtgctgttcgtgggcgacagcatggtgcagctgatgcagcagtacgagatctggagagagctgttcagccccctgcacgccctgaacttcggcatcggcggcgacaccaccagacacgtgctgtggagactgaagaacggcgagctggagaacatcaagcccaaggtgatcgtggtgtgggtgggcaccaacaaccacgagaacaccgccgaggaggtggccggcggcatcgaggccatcgtgcagctgatcaacaccagacagccccaggccaagatcatcgtgctgggcctgctgcccagaggcgagaagcccaaccccctgagacagaagaacgccaaggtgaaccagctgctgaaggtgagcctgcccaagctggccaacgtgcagctgctggacaccgacggcggcttcgtgcacagcgacggcgccatcagctgccacgacatgttcgacttcctgcacctgaccggcggcggctacgccaagatctgcaagcccctgcacgagctgatcatgcagctgctggaggagacccccgaggagaagcagaccaccatcgcctag

SEQ ID NO: 129826 - protein, 545 aa, Artificial Sequence
  derived and/or modified sequence
MSNNGLDIQDKPPAPPMRNTSTMIGAGSKDAGTLNHGSKPLPPNPEEKKKKDRFYRSILPGDKTNKKKEKERPEISLPSDFEHTIHVGFDAVTGEFTGMPEQWARLLQTSNITKSEQKKNPQAVLDVLEFYNSKKTSNSQKYMSFTDKSAEDYNSSNALNVKAVSETPAVPPVSEDEDDDDDDATPPPVIAPRPEHTKSVYTRSVIEPLPVTPTRDVATSPISPTENNTTPPDALTRNTEKQKKKPKMSDEEILEKLRSIVSVGDPKKKYTRFEKIGQGASGTVYTAMDVATGQEVAIKQMNLQQQPKKELIINEILVMRENKNPNIVNYLDSYLVGDELWVVMEYLAGGSLTDVVTETCMDEGQIAAVCRECLQALEFLHSNQVIHRDIKSDNILLGMDGSVKLTDFGFCAQITPEQSKRSTMVGTPYWMAPEVVTRKAYGPKVDIWSLGIMAIEMIEGEPPYLNENPLRALYLIATNGTPELQNPEKLSAIFRDFLNRCLEMDVEKRGSAKELLQHQFLKIAKPLSSLTPLIAAAKEATKNNH

SEQ ID NO: 129827 - protein, 26 aa, Artificial Sequence
  derived and/or modified sequence
MSNNGLDIQDKPPAPPMRNTSTMIGA

SEQ ID NO: 129828 - protein, 522 aa, Artificial Sequence
  derived and/or modified sequence
MSNNGLDIQDKPPAPPMRNTSTMIGAGSKDAGTLNHGSKPLPPNPEEKKKKDRFYRSILPGDKTNKKKEKERPEISLPSDFEHTIHVGFDAVTGEFTGMPEQWARLLQTSNITKSEQKKNPQAVLDVLEFYNSKKTSNSQKYMSFTDKSAEDYNSSNALNVKAVSETPAVPPVSEDEDDDDDDATPPPVIAPRPEHTKSVYTRSVIEPLPVTPTRDVATSPISPTENNTTPPDALTRNTEKQKKKPKMSDEEILEKLRSIVSVGDPKKKYTRFEKIGQGASGTVYTAMDVATGQEVAIKQMNLQQQPKKELIINEILVMRENKNPNIVNYLDSYLVGDELWVVMEYLAGGSLTDVVTETCMDEGQIAAVCRECLQALEFLHSNQVIHRDIKSDNILLGMDGSVKLTDFGFCAQITPEQSKRSTMVGTPYWMAPEVVTRKAYGPKVDIWSLGIMAIEMIEGEPPYLNENPLRALYLIATNGTPELQNPEKLSAIFRDFLNRCLEMDVEKRGSAKELLQHSSRL

SEQ ID NO: 129829 - DNA, 1638 bp, Artificial Sequence
  derived and/or modified sequence
atgagcaacaacggcctggacatccaggacaagccccccgccccccccatgagaaacaccagcaccatgatcggcgccggcagcaaggacgccggcaccctgaaccacggcagcaagcccctgccccccaaccccgaggagaagaagaagaaggacagattctacagaagcatcctgcccggcgacaagaccaacaagaagaaggagaaggagagacccgagatcagcctgcccagcgacttcgagcacaccatccacgtgggcttcgacgccgtgaccggcgagttcaccggcatgcccgagcagtgggccagactgctgcagaccagcaacatcaccaagagcgagcagaagaagaacccccaggccgtgctggacgtgctggagttctacaacagcaagaagaccagcaacagccagaagtacatgagcttcaccgacaagagcgccgaggactacaacagcagcaacgccctgaacgtgaaggccgtgagcgagacccccgccgtgccccccgtgagcgaggacgaggacgacgacgacgacgacgccacccccccccccgtgatcgcccccagacccgagcacaccaagagcgtgtacaccagaagcgtgatcgagcccctgcccgtgacccccaccagagacgtggccaccagccccatcagccccaccgagaacaacaccaccccccccgacgccctgaccagaaacaccgagaagcagaagaagaagcccaagatgagcgacgaggagatcctggagaagctgagaagcatcgtgagcgtgggcgaccccaagaagaagtacaccagattcgagaagatcggccagggcgccagcggcaccgtgtacaccgccatggacgtggccaccggccaggaggtggccatcaagcagatgaacctgcagcagcagcccaagaaggagctgatcatcaacgagatcctggtgatgagagagaacaagaaccccaacatcgtgaactacctggacagctacctggtgggcgacgagctgtgggtggtgatggagtacctggccggcggcagcctgaccgacgtggtgaccgagacctgcatggacgagggccagatcgccgccgtgtgcagagagtgcctgcaggccctggagttcctgcacagcaaccaggtgatccacagagacatcaagagcgacaacatcctgctgggcatggacggcagcgtgaagctgaccgacttcggcttctgcgcccagatcacccccgagcagagcaagagaagcaccatggtgggcaccccctactggatggcccccgaggtggtgaccagaaaggcctacggccccaaggtggacatctggagcctgggcatcatggccatcgagatgatcgagggcgagcccccctacctgaacgagaaccccctgagagccctgtacctgatcgccaccaacggcacccccgagctgcagaaccccgagaagctgagcgccatcttcagagacttcctgaacagatgcctggagatggacgtggagaagagaggcagcgccaaggagctgctgcagcaccagttcctgaagatcgccaagcccctgagcagcctgacccccctgatcgccgccgccaaggaggccaccaagaacaaccactag

SEQ ID NO: 129830 - DNA, 300 bp, Artificial Sequence
  derived and/or modified sequence
atgagcaacaacggcctggacatccaggacaagccccccgccccccccatgagaaacaccagcaccatgatcggcgccggcagcaaggacgccggcaccctgaaccacggcagcaagcccctgccccccaaccccgaggagaagaagaagaaggacagattctacagaagcatcctgcccggcgacaagaccaacaagaagaaggagaaggagagacccgagatcagcctgcccagcgacttcgagcacaccatccacgtgggcttcgacgccgtgaccggcgagttcaccggcatgtag

SEQ ID NO: 129831 - DNA, 270 bp, Artificial Sequence
  derived and/or modified sequence
atgagcaacaacggcctggacatccaggacaagccccccgccccccccatgagaaacaccagcaccatgatcggcgccggcagcaaggacgccggcaccctgaaccacggcagcaagcccctgccccccaaccccgaggagaagaagaagaaggacagattctacagaagcatcctgcccggcgacaagaccaacaagaagaaggagaaggagagacccgagatcagcctgcccagcgacttcgagcacaccatccacgtgggcttctag

SEQ ID NO: 129832 - DNA, 192 bp, Artificial Sequence
  derived and/or modified sequence
atgagcaacaacggcctggacatccaggacaagccccccgccccccccatgagaaacaccagcaccatgatcggcgccggcagcaaggacgccggcaccctgaaccacggcagcaagcccctgccccccaaccccgaggagaagaagaagaaggacagattctacagaagcatcctgcccggcgacaagtag

SEQ ID NO: 129833 - DNA, 321 bp, Artificial Sequence
  derived and/or modified sequence
atgagcaacaacggcctggacatccaggacaagccccccgccccccccatgagaaacaccagcaccatgatcggcgccggcagcaaggacgccggcaccctgaaccacggcagcaagcccctgccccccaaccccgaggagaagaagaagaaggacagattctacagaagcatcctgcccggcgacaagaccaacaagaagaaggagaaggagagacccgagatcagcctgcccagcgacttcgagcacaccatccacgtgggcttcgacgccgtgaccggcgagttcaccggcatgcccgagcagtgggccagactgtag

SEQ ID NO: 129834 - DNA, 1569 bp, Artificial Sequence
  derived and/or modified sequence
atgagcaacaacggcctggacatccaggacaagccccccgccccccccatgagaaacaccagcaccatgatcggcgccggcagcaaggacgccggcaccctgaaccacggcagcaagcccctgccccccaaccccgaggagaagaagaagaaggacagattctacagaagcatcctgcccggcgacaagaccaacaagaagaaggagaaggagagacccgagatcagcctgcccagcgacttcgagcacaccatccacgtgggcttcgacgccgtgaccggcgagttcaccggcatgcccgagcagtgggccagactgctgcagaccagcaacatcaccaagagcgagcagaagaagaacccccaggccgtgctggacgtgctggagttctacaacagcaagaagaccagcaacagccagaagtacatgagcttcaccgacaagagcgccgaggactacaacagcagcaacgccctgaacgtgaaggccgtgagcgagacccccgccgtgccccccgtgagcgaggacgaggacgacgacgacgacgacgccacccccccccccgtgatcgcccccagacccgagcacaccaagagcgtgtacaccagaagcgtgatcgagcccctgcccgtgacccccaccagagacgtggccaccagccccatcagccccaccgagaacaacaccaccccccccgacgccctgaccagaaacaccgagaagcagaagaagaagcccaagatgagcgacgaggagatcctggagaagctgagaagcatcgtgagcgtgggcgaccccaagaagaagtacaccagattcgagaagatcggccagggcgccagcggcaccgtgtacaccgccatggacgtggccaccggccaggaggtggccatcaagcagatgaacctgcagcagcagcccaagaaggagctgatcatcaacgagatcctggtgatgagagagaacaagaaccccaacatcgtgaactacctggacagctacctggtgggcgacgagctgtgggtggtgatggagtacctggccggcggcagcctgaccgacgtggtgaccgagacctgcatggacgagggccagatcgccgccgtgtgcagagagtgcctgcaggccctggagttcctgcacagcaaccaggtgatccacagagacatcaagagcgacaacatcctgctgggcatggacggcagcgtgaagctgaccgacttcggcttctgcgcccagatcacccccgagcagagcaagagaagcaccatggtgggcaccccctactggatggcccccgaggtggtgaccagaaaggcctacggccccaaggtggacatctggagcctgggcatcatggccatcgagatgatcgagggcgagcccccctacctgaacgagaaccccctgagagccctgtacctgatcgccaccaacggcacccccgagctgcagaaccccgagaagctgagcgccatcttcagagacttcctgaacagatgcctggagatggacgtggagaagagaggcagcgccaaggagctgctgcagcacagcagcagactgtag

SEQ ID NO: 129835 - DNA, 1638 bp, Artificial Sequence
  derived and/or modified sequence
atgtcaaacaatggattggatattcaggataagcctccagcaccgcctatgcgaaatacgtcgactatgattggcgcggggtctaaggacgcggggacattaaaccacggaagtaaacctcttccaccaaacccagaagaaaagaaaaagaaggaccgtttctataggtctatacttcctggggacaaaacaaacaagaagaaggaaaaggaaagaccggaaataagcctgccttcagatttcgagcacacgatccatgtgggattcgacgcagttaccggggagttcacaggtatgccagagcaatgggccaggttgcttcagaccagtaatattactaaatctgagcagaagaagaatccccaggcagttttggacgtcctggaattctataattccaagaagacatcaaacagccaaaagtatatgagctttactgacaagtccgctgaggactacaactcttccaacgccctgaacgttaaggcagtgtcagagacccccgcagtcccccccgtgtctgaggacgaggatgacgatgacgacgacgccacccctccgcctgtgatagctccgcgtccagaacacaccaagtccgtgtatactcggagcgtgatcgagccactcccagtaaccccgactcgggacgtcgctacttccccaatcagccctaccgaaaacaatacaactcctcccgacgctctgacaaggaacactgaaaaacagaaaaaaaaaccgaagatgagcgacgaagagatcttggagaagttgcggtccattgtgagtgtgggtgaccccaagaagaagtatacacgcttcgaaaagattggtcagggagcgagtggcacggtttacacggccatggatgtcgctacgggccaggaggtcgcaattaagcagatgaacctccagcagcagccaaagaaggagctgatcatcaacgagatcctggtgatgagagaaaataagaatccaaatatcgtgaattacttggactcgtacctggtcggtgatgagctgtgggtggttatggagtacctggcaggcgggagtctgaccgacgtagtgactgaaacctgcatggacgaaggccaaatcgcagctgtctgtagagaatgtctccaggctttggagttcttgcattctaatcaggtgatccaccgcgacattaagtcagacaatatccttttgggcatggatggaagcgtgaaattgacagactttgggttctgcgcccagattactcctgaacagtccaagcgctctaccatggtaggcacaccatattggatggccccagaagtggtgaccaggaaagcctatggacccaaagtcgacatttggagtttagggattatggccatagagatgattgagggcgagccaccctatctcaatgaaaatccattgagagctctctatctgatcgccaccaatggaacaccagaactccaaaacccagaaaaactgtctgctatattccgggattttctgaatagatgccttgagatggatgtcgaaaaacggggttctgctaaggagctgctgcagcaccaattcctaaagattgcgaaaccgctcagctctcttactccactgatcgccgccgccaaggaggcaacaaaaaataatcactag

SEQ ID NO: 129836 - DNA, 300 bp, Artificial Sequence
  derived and/or modified sequence
atgtccaataatggactggatattcaggataagcctcccgcaccacccatgcggaacaccagtactatgattggggcggggagcaaggacgcagggaccctgaatcacggcagcaaaccattgccccccaaccccgaggagaagaaaaaaaaggatcggttttataggtcaatacttcccggcgacaagactaacaagaagaaggagaaggagcggcctgagatcagtctgcccagtgatttcgagcatactatccatgtgggattcgatgcagtgacgggagagttcaccgggatgtag

SEQ ID NO: 129837 - DNA, 270 bp, Artificial Sequence
  derived and/or modified sequence
atgtccaacaacggcctggacatccaagacaaaccccctgctccgccgatgaggaatacaagcacgatgatcggcgccggtagcaaagacgcaggcactttaaaccacggctcgaagcctctccctcccaatcctgaggaaaagaaaaaaaaggaccgcttctaccggagcatcctgcccggagacaaaactaacaagaaaaaagagaaggagcgacccgagataagcctgcctagtgacttcgagcataccattcacgtgggcttctag

SEQ ID NO: 129838 - DNA, 192 bp, Artificial Sequence
  derived and/or modified sequence
atgtctaacaatgggctcgatatccaggataagccacctgcccccccaatgcggaatacctcaacaatgattggcgccggaagcaaggacgcgggtacgttgaaccacggctccaaacccctcccaccaaacccagaggaaaagaagaagaaagacaggttttaccggagtatactcccgggcgacaagtag

SEQ ID NO: 129839 - DNA, 321 bp, Artificial Sequence
  derived and/or modified sequence
atgtcaaacaatggattagacattcaggataaacctcctgcccctccgatgaggaacacaagcacgatgattggggccggaagcaaggacgcaggtactctcaaccacgggtcaaagcctttgcctcctaaccccgaagaaaagaaaaaaaaggatagattctaccggtccattttgccaggggacaagaccaacaaaaaaaaagaaaaagaacgccctgagatcagtcttccatctgattttgaacacacaatacacgtggggttcgatgcggtcaccggagagtttacggggatgcctgagcagtgggctcggctttag

SEQ ID NO: 129840 - DNA, 1569 bp, Artificial Sequence
  derived and/or modified sequence
atgtcaaacaacggcttggacatccaggataaacctccggcaccgcccatgcgcaataccagtacaatgatcggcgcaggctccaaggatgcgggcacactcaaccatggatcaaaacctttgccccccaatcctgaagaaaagaaaaaaaaggataggttctatcggtccatactcccaggagacaagaccaacaagaaaaaagaaaaggaacggcctgagatcagcttgccatcagacttcgagcacacgatccatgtgggttttgatgccgttaccggcgagttcaccgggatgccagagcagtgggctcggctactgcagacttccaatattaccaagagtgaacagaagaaaaatcctcaggcagttctcgatgtgttggagttttacaatagcaaaaagaccagcaattcccagaaatatatgtccttcactgacaagagcgctgaggactacaacagctccaatgcactgaatgtgaaggccgtgagcgagacccccgctgtccctcccgtgtccgaagacgaggatgacgatgatgatgacgccacgcccccaccagtgatcgccccgaggcccgaacacaccaagtccgtctatacacgatcagtcatcgagcctcttcctgtgactccaactcgcgacgtggctacttcgcccatctcacccacagagaataacaccacccccccagacgctctcaccagaaacacagagaagcagaagaaaaaacctaaaatgagcgacgaggaaattctggagaagctgaggagcattgtgagtgtgggcgatcctaagaaaaaatataccaggtttgaaaagattgggcagggcgcaagtgggaccgtgtacaccgctatggatgtggcgacagggcaggaggtggcaattaagcagatgaacctccaacagcaacccaaaaaagagctgataatcaacgaaatactggtgatgcgggagaataagaatccaaacattgtcaattacctcgactcatatcttgtgggggacgagctgtgggttgtgatggaatatttagcaggggggtcacttacggacgtcgtgacagaaacctgcatggatgagggacagatagccgccgtgtgccgcgagtgcctgcaagccctcgagtttctgcatagcaaccaagtgatccatagagacatcaaatcagacaacatcttgctgggtatggatggttccgtaaagttaaccgacttcggtttctgcgcccagattacccccgagcaaagtaagcgtagcactatggttggcaccccttattggatggctcccgaggtcgtcactagaaaagcctacggacctaaagtggacatttggtcgttaggaattatggcaatcgagatgattgagggggagccaccctatttgaacgagaatcctctgagagctctctacctgatcgctacaaatggcacccccgaactccagaaccctgaaaaactttcagccatcttccgcgacttcctgaaccgctgtcttgaaatggatgtcgaaaagagagggagtgctaaggagctcttgcagcattcctccagactgtag

SEQ ID NO: 129841 - DNA, 1638 bp, Artificial Sequence
  derived and/or modified sequence
atgagcaacaacggcctggacatccaggacaagcccccagccccacccatgaggaacaccagcaccatgattggagctggcagcaaggatgctggcaccctgaaccacggcagcaagcccctgccccccaaccctgaggagaagaagaagaaggaccgcttctaccgcagcatcctgcccggggacaagaccaacaagaagaaggagaaggagaggcctgagatcagcctgcccagcgactttgagcacaccatccacgtgggctttgatgctgtgactggagagttcaccggcatgcctgagcagtgggcccggctgctgcagaccagcaacatcaccaagtctgagcagaagaagaacccccaggccgtgctggatgtgctggagttctacaacagcaagaagaccagcaacagccagaagtacatgtccttcacagacaagtctgctgaggactacaacagcagcaatgccctgaatgtgaaggctgtgtctgagaccccagctgtgccccctgtgtctgaagatgaagatgatgatgatgatgatgccaccccacctcctgtgattgcccccaggcctgagcacaccaagtctgtgtacaccaggagcgtcatcgagcccctgcctgtgacccccaccagagatgtggccaccagccccatcagccccacagagaacaacaccaccccaccagatgccctgaccaggaacacagagaagcagaagaagaagcccaagatgtctgatgaggagatcctggagaagctgcggagcatcgtgtctgtgggggaccccaagaagaagtacaccaggtttgagaagattggccagggcgccagcggcaccgtgtacacagccatggatgtggccaccggccaggaggtggccatcaagcagatgaacctgcagcagcagcccaagaaggagctgatcatcaatgagatcctggtgatgagggagaacaagaaccccaacatcgtgaactacctggacagctacctggtgggagatgagctgtgggtggtgatggagtacctggccggcggcagcctgacagatgtggtgacagagacctgcatggatgagggccagattgctgctgtgtgccgggagtgcctgcaggccctggagttcctgcacagcaaccaggtgatccaccgggacatcaagagtgacaacatcctgctgggcatggatggctctgtgaagctgacagactttggcttctgtgcccagatcaccccagagcagagcaagaggagcaccatggtgggcaccccctactggatggcccctgaggtggtgaccaggaaggcctacggccccaaggtggacatctggagcctgggcatcatggccatcgagatgattgaaggagagcccccctacctgaatgaaaaccccctgcgggccctgtacctgattgccaccaacggcaccccagagctgcagaaccctgagaagctgagcgccatcttccgggacttcctgaaccgctgcctggagatggatgtggagaagaggggcagcgccaaggagctgctgcagcaccagttcctgaagatcgccaagcccctgagcagcctgacccccctgattgctgctgccaaggaggccaccaagaacaaccactag

SEQ ID NO: 129842 - DNA, 300 bp, Artificial Sequence
  derived and/or modified sequence
atgagcaacaacggcctggacatccaggacaagcccccagccccacccatgaggaacaccagcaccatgattggagctggcagcaaggatgctggcaccctgaaccacggcagcaagcccctgccccccaaccctgaggagaagaagaagaaggaccgcttctaccgcagcatcctgcccggggacaagaccaacaagaagaaggagaaggagaggcctgagatcagcctgcccagcgactttgagcacaccatccacgtgggctttgatgctgtgactggagagttcaccggcatgtag

SEQ ID NO: 129843 - DNA, 270 bp, Artificial Sequence
  derived and/or modified sequence
atgagcaacaacggcctggacatccaggacaagcccccagccccacccatgaggaacaccagcaccatgattggagctggcagcaaggatgctggcaccctgaaccacggcagcaagcccctgccccccaaccctgaggagaagaagaagaaggaccgcttctaccgcagcatcctgcccggggacaagaccaacaagaagaaggagaaggagaggcctgagatcagcctgcccagcgactttgagcacaccatccacgtgggcttctag

SEQ ID NO: 129844 - DNA, 192 bp, Artificial Sequence
  derived and/or modified sequence
atgagcaacaacggcctggacatccaggacaagcccccagccccacccatgaggaacaccagcaccatgattggagctggcagcaaggatgctggcaccctgaaccacggcagcaagcccctgccccccaaccctgaggagaagaagaagaaggaccgcttctaccgcagcatcctgcccggggacaagtag

SEQ ID NO: 129845 - DNA, 321 bp, Artificial Sequence
  derived and/or modified sequence
atgagcaacaacggcctggacatccaggacaagcccccagccccacccatgaggaacaccagcaccatgattggagctggcagcaaggatgctggcaccctgaaccacggcagcaagcccctgccccccaaccctgaggagaagaagaagaaggaccgcttctaccgcagcatcctgcccggggacaagaccaacaagaagaaggagaaggagaggcctgagatcagcctgcccagcgactttgagcacaccatccacgtgggctttgatgctgtgactggagagttcaccggcatgcctgagcagtgggcccggctgtag

SEQ ID NO: 129846 - DNA, 1569 bp, Artificial Sequence
  derived and/or modified sequence
atgagcaacaacggcctggacatccaggacaagcccccagccccacccatgaggaacaccagcaccatgattggagctggcagcaaggatgctggcaccctgaaccacggcagcaagcccctgccccccaaccctgaggagaagaagaagaaggaccgcttctaccgcagcatcctgcccggggacaagaccaacaagaagaaggagaaggagaggcctgagatcagcctgcccagcgactttgagcacaccatccacgtgggctttgatgctgtgactggagagttcaccggcatgcctgagcagtgggcccggctgctgcagaccagcaacatcaccaagtctgagcagaagaagaacccccaggccgtgctggatgtgctggagttctacaacagcaagaagaccagcaacagccagaagtacatgtccttcacagacaagtctgctgaggactacaacagcagcaatgccctgaatgtgaaggctgtgtctgagaccccagctgtgccccctgtgtctgaagatgaagatgatgatgatgatgatgccaccccacctcctgtgattgcccccaggcctgagcacaccaagtctgtgtacaccaggagcgtcatcgagcccctgcctgtgacccccaccagagatgtggccaccagccccatcagccccacagagaacaacaccaccccaccagatgccctgaccaggaacacagagaagcagaagaagaagcccaagatgtctgatgaggagatcctggagaagctgcggagcatcgtgtctgtgggggaccccaagaagaagtacaccaggtttgagaagattggccagggcgccagcggcaccgtgtacacagccatggatgtggccaccggccaggaggtggccatcaagcagatgaacctgcagcagcagcccaagaaggagctgatcatcaatgagatcctggtgatgagggagaacaagaaccccaacatcgtgaactacctggacagctacctggtgggagatgagctgtgggtggtgatggagtacctggccggcggcagcctgacagatgtggtgacagagacctgcatggatgagggccagattgctgctgtgtgccgggagtgcctgcaggccctggagttcctgcacagcaaccaggtgatccaccgggacatcaagagtgacaacatcctgctgggcatggatggctctgtgaagctgacagactttggcttctgtgcccagatcaccccagagcagagcaagaggagcaccatggtgggcaccccctactggatggcccctgaggtggtgaccaggaaggcctacggccccaaggtggacatctggagcctgggcatcatggccatcgagatgattgaaggagagcccccctacctgaatgaaaaccccctgcgggccctgtacctgattgccaccaacggcaccccagagctgcagaaccctgagaagctgagcgccatcttccgggacttcctgaaccgctgcctggagatggatgtggagaagaggggcagcgccaaggagctgctgcagcacagcagccggctgtag

SEQ ID NO: 129847 - DNA, 1638 bp, Artificial Sequence
  derived and/or modified sequence
atgagcaacaacggcctggacatccaggacaagccccccgccccccctatgcggaatacatccactatgattggcgccggcagcaaagatgctgggacactgaatcacggcagtaaaccattacctcctaacccggaggagaagaaaaaaaaagaccgcttctatcgcagtattctgcccggagacaagaccaataaaaaaaaggaaaaggaaaggccagaaatcagccttccctccgactttgaacacaccatacacgtgggcttcgatgccgtgaccggtgagttcacaggcatgccagagcagtgggctcgactccttcagacttctaatataacgaaatcggaacagaaaaaaaacccacaggctgtgctagatgttctcgaattctacaattcaaaaaaaacaagtaactcgcagaagtatatgtcattcactgataagtccgctgaagactacaactcgagcaacgccctgaacgtgaaggcagtttccgagacccccgccgtgcccccggtatctgaggacgaggacgatgatgacgacgatgctacgcccccacccgttatcgccccccgacccgagcatacaaagtctgtgtacacacggagcgtgattgaacccctgcccgtcaccccaacccgcgacgtcgccaccagcccgatcagtcctaccgagaataatactaccccgccagatgcactgactcgcaacaccgagaagcaaaagaaaaaaccaaagatgagcgatgaagagatcctcgagaagcttagaagtatcgtcagcgtgggggatccaaagaagaagtataccaggtttgaaaaaattggtcagggagctagtgggaccgtttatacagccatggatgttgcaacgggccaggaagtggcgatcaagcagatgaatctgcagcagcagccgaaaaaggagctgatcatcaatgaaatcttggtgatgagggagaacaagaacccaaatatcgtcaattatctggacagttacctggtgggcgacgagctgtgggtggtgatggagtaccttgccggaggctctctgaccgacgttgttaccgaaacttgcatggatgagggacaaatcgcagctgtgtgccgagagtgcttacaggcactcgagtttttgcacagtaaccaggtgatccatagagacattaaaagcgacaacatcctgctggggatggacggatccgtcaagctgacagacttcggcttttgtgcgcagatcacaccggagcaatccaagaggtccaccatggtaggcacaccgtattggatggcacctgaggtggtgacccgaaaggcttacggaccaaaggtggatatatggtcactggggatcatggcaattgagatgatcgaaggggagcctccctatttaaacgagaaccccctgagggctctctatttaatagctactaatggcaccccagaactgcagaaccctgagaaactaagtgcgattttcagagacttcctgaaccgatgtttagaaatggacgtggaaaagagaggctcagctaaagaattgctccagcatcagttcttgaagattgctaaacccctgtccagcctgacccccctcatcgctgcagcaaaagaagccactaaaaataaccactag

SEQ ID NO: 129848 - DNA, 300 bp, Artificial Sequence
  derived and/or modified sequence
atgagcaacaacggcctggacatccaggacaagccccccgcccccccaatgcggaatacttccactatgattggggcgggatccaaagatgcaggaaccctgaaccatggcagcaaacctttaccccctaacccagaggagaaaaaaaagaaagaccgcttctaccgatccatcctacccggagataaaacaaacaagaaaaaggagaaggaaagacctgagatatcactccctagcgattttgaacacaccatccatgtcggttttgatgcagtgacgggagaatttactggcatgtag

SEQ ID NO: 129849 - DNA, 270 bp, Artificial Sequence
  derived and/or modified sequence
atgagcaacaacggcctggacatccaggacaagccccccgccccccccatgaggaatacgagtactatgatcggcgccggcagtaaggatgctggcactctgaatcacggctctaagcctctgcccccaaaccccgaggaaaagaagaagaaggacaggttttacaggagtatacttcccggcgataagaccaataaaaaaaaggaaaaggaaagacccgagatctcactcccgtccgacttcgaacataccattcacgtgggtttttag

SEQ ID NO: 129850 - DNA, 192 bp, Artificial Sequence
  derived and/or modified sequence
atgagcaacaacggcctggacatccaggacaagccccccgccccccctatgagaaacacaagtaccatgatcggtgctggatctaaagacgcaggtacactgaaccatggctccaagccgctccccccgaatccagaagagaagaaaaagaaggaccgattctaccgatcgatcttacctggggataagtag

SEQ ID NO: 129851 - DNA, 321 bp, Artificial Sequence
  derived and/or modified sequence
atgagcaacaacggcctggacatccaggacaagccccccgccccccctatgcggaatacttcaactatgatcggggccggcagcaaagatgctggtaccctgaatcatggctccaaacctctgccacccaatcccgaagagaagaagaaaaaggatcgcttctataggagcatcttgcctggagacaagaccaataagaaaaaggaaaaggaacgacccgagatctccctgccaagcgattttgagcatacaatccacgttggcttcgacgcggtgaccggggagttcacagggatgcctgagcagtgggcacgcctttag

SEQ ID NO: 129852 - DNA, 1569 bp, Artificial Sequence
  derived and/or modified sequence
atgagcaacaacggcctggacatccaggacaagccccccgccccccctatgcgtaatacatctaccatgattggagctgggtccaaagatgctggcactctgaaccacggatccaagccgctgccacccaacccagaagagaagaagaaaaaggatagattttacagatcaattctgcctggtgataaaaccaataaaaaaaaggaaaaagagcggccagagattagcttgccctccgacttcgagcataccattcacgttggctttgatgccgtgacaggggaattcactgggatgcccgaacagtgggcacgactgctccagacctctaatataaccaagtctgagcagaagaaaaatccgcaagctgtcctagatgtgcttgaattttacaacagcaagaaaacatccaattcccagaaatatatgagctttacagataagagtgctgaagactacaacagctctaatgctctaaatgtgaaagcggtgagcgagactccagccgtgcctccagtctctgaggacgaggatgatgacgacgacgacgcaacacctccgcctgtgattgcacctcgccccgagcacacaaaatcagtgtacacaaggagcgtgatcgagccgttgccagttaccccaacaagggatgtcgccacgagccctatctcaccgactgagaacaacacgacaccccctgatgccctcacgcggaataccgagaagcaaaagaaaaaaccgaagatgagtgatgaggagattctggagaagctgagatccatcgtctcagtcggtgatccaaaaaagaaatatacacgttttgagaaaatcggccaaggcgcctccggaactgtttataccgcgatggacgtcgccaccggacaggaggtcgccatcaagcagatgaatctgcaacagcaaccaaagaaagagctaattatcaacgagattctggtgatgagagaaaacaagaacccgaacatcgtcaactatctcgactcatatctcgtgggagacgaactgtgggttgttatggaatatctggcaggcggttccctgactgacgtggtcaccgagacttgcatggatgaaggacagatagcagcagtgtgcagggagtgtttacaggctctggagttcctccattccaaccaagtgatccaccgggacattaaatcagataacatccttcttgggatggatggcagcgtcaaacttactgattttggcttctgcgcacagattactcccgagcagagcaagaggagtaccatggttgggacaccgtattggatggccccagaggtcgtgacccgtaaggcatatgggccgaaagtggacatctggagtctaggcattatggctatagagatgatagagggcgagcccccgtatctgaacgagaacccacttcgagcgctctacctaatcgcaaccaacgggactccagagctacagaaccccgaaaagctcagtgcaatcttccgagacttcctgaacagatgtctggaaatggacgtcgaaaaacgcggctcggctaaggagctattacaacactcaagcagactctag

SEQ ID NO: 129853 - DNA, 3737 bp, Artificial Sequence
  derived and/or modified sequence
gccctcccgcggctgcagccggagccgaaggtggtggctgcacagtagacgccccctcacggcttcccccacacgctcccgccccctcgctcgcccatcgcgcttccctcacaggctctgcagtcctcccccacagacgccttcccccttggactctcattcccttttccacggagccccgcgctttcgtgagccccctcgaggaacctggtctccgcatccagttaccacctcctgcctcagaggccatctgagcccttcgcacctcgcccctcagtccccccttccccccccgcccgcgtcgcctcgctccctcccgcccccccatcatcccttccctcgcagttcccctgtcctgaggggagccccgccacgggcagcgcggcggcggcggcaggagggagaaagtgaagcggtagctcgcgcacactcgcgccctcactcccggctaggcggcacccaccgccgggaggaggaggaggagccgagaggagctgagcgagcgcggaagtagctgctgctggtggtgacaatgtcaaataacggcctagacattcaagacaaacccccagcccctccgatgagaaataccagcactatgattggagccggcagcaaagatgctggaaccctaaaccatggttctaaacctctgcctccaaacccagaggagaagaaaaagaaggaccgattttaccgatccattttacctggagataaaacaaataaaaagaaagagaaagagcggccagagatttctctcccttcagattttgaacacacaattcatgtcggttttgatgctgtcacaggggagtttacgggaatgccagagcagtgggcccgcttgcttcagacatcaaatatcactaagtcggagcagaagaaaaacccgcaggctgttctggatgtgttggagttttacaactcgaagaagacatccaacagccagaaatacatgagctttacagataagtcagctgaggattacaattcttctaatgccttgaatgtgaaggctgtgtctgagactcctgcagtgccaccagtttcagaagatgaggatgatgatgatgatgatgctaccccaccaccagtgattgctccacgcccagagcacacaaaatctgtatacacacggtctgtgattgaaccacttcctgtcactccaactcgggacgtggctacatctcccatttcacctactgaaaataacaccactccaccagatgctttgacccggaatactgagaagcagaagaagaagcctaaaatgtctgatgaggagatcttggagaaattacgaagcatagtgagtgtgggcgatcctaagaagaaatatacacggtttgagaagattggacaaggtgcttcaggcaccgtgtacacagcaatggatgtggccacaggacaggaggtggccattaagcagatgaatcttcagcagcagcccaagaaagagctgattattaatgagatcctggtcatgagggaaaacaagaacccaaacattgtgaattacttggacagttacctcgtgggagatgagctgtgggttgttatggaatacttggctggaggctccttgacagatgtggtgacagaaacttgcatggatgaaggccaaattgcagctgtgtgccgtgagtgtctgcaggctctggagttcttgcattcgaaccaggtcattcacagagacatcaagagtgacaatattctgttgggaatggatggctctgtcaagctaactgactttggattctgtgcacagataaccccagagcagagcaaacggagcaccatggtaggaaccccatactggatggcaccagaggttgtgacacgaaaggcctatgggcccaaggttgacatctggtccctgggcatcatggccatcgaaatgattgaaggggagcctccatacctcaatgaaaaccctctgagagccttgtacctcattgccaccaatgggaccccagaacttcagaacccagagaagctgtcagctatcttccgggactttctgaaccgctgtctcgagatggatgtggagaagagaggttcagctaaagagctgctacagcatcaattcctgaagattgccaagcccctctccagcctcactccactgattgctgcagctaaggaggcaacaaagaacaatcactaaaaccacactcaccccagcctcattgtgccaagccttctgtgagataaatgcacatttcagaaattccaactcctgatgccctcttctccttgccttgcttctcccatttcctgatctagcactcctcaagactttgatccttggaaaccgtgtgtccagcattgaagagaactgcaactgaatgactaatcagatgatggccatttctaaataaggaatttcctcccaattcatggatatgagggtggtttatgattaagggtttatataaataaatgtttctagtcttccgtgtgtcaaaatcctcacctccttcataaccatctcccacaattaattcttgactatataaatttatggtttgataatattatcaatttgtaatcaattgagatttctttagtgcttgcttttctgtgactcaactgcccagacacctcattgtacttgaaaactggaacagcttgggaatgccatggggtttgataatctgccagggacatgaagaggctcagcttcctggaccatgactttggctcagctgatcctgacatgggagaacaaccacatttttctttgtgtgtgcttctagcagctgttcgggaggaccttgacccaatagtgttcccatgctgtttcttgtgaaatgctctcggctatgtagcagcttttgattccctgcataccctaggctgctgcccctatcctgtcccttgtttataacattgagaggttttctagggcacatactgagtgagagcagtgttgagaagtcggggaaaatggtgactacttttagagcaaggctgggcatcagcacctgtccagctctacttgtgtgatgtttcaggaactcagcccctttttctgcctaggataaggagctgaaagattaacttggatcttctaatggtccaaatcttttggtcacaataaagagtctccaaattagagactgcatgttagttctggatggatttggtggcctgacatgataccctgccagctgtgaggggaccccgtttttaagatgcatggccaagctctctgcaaatggaaatgcttacactgggtgttggggatgtttgctacctcctgctatttttgtggttttggttctcccactatggtaggacccctggccagcattgtggcttgtcatgtcagccccattgactaccttctcatgctctgaggtactactgcctctgcagcacaaatttctatttctgtcaataaaaggagatgaaaatattctattggagtatgcctttcttttttctcttcgttttttctttccttttctaattttttatatgaaataatgagtagtttcttcctgaaccatttgagagtggtaagttgcagatagaatgcccctttaccactatatacctgaatgtgtattctttctttttaacacttttattttaaatataaattaagagaaatgggccaaaaccatttgtattgtttaaagaataattataaacacacttgtatccaccaaatcaagaaatggaacactgacagtaagaaccttctctatcttgtccttcctttctca

SEQ ID NO: 129854 - DNA, 559 bp, Artificial Sequence
  derived and/or modified sequence
tcatcccttccctcgcagttcccctgtcctgaggggagccccgccacgggcagcgcggcggcggcggcaggagggagaaagtgaagcggtagctcgcgcacactcgcgccctcactcccggctaggcggcacccaccgccgggaggaggaggaggagccgagaggagctgagcgagcgcggaagatgacatacccctcattcttcagagctcagtctcctgtcaagtctttcttcctttattagctgctgctggtggtgacaatgtcaaataacggcctagacattcaagacaaacccccagcccctccgatgagaaataccagcactatgattggagccggcagcaaagatgctggaaccctaaaccatggttctaaacctctgcctccaaacccagaggagaagaaaaagaaggaccgattttaccgatccattttacctggagataaaacaaataaaaagaaagagaaagagcggccagagatttctctcccttcagattttgaacacacaattcatgtcggttttgatgctgtcacaggggagtttacgggaatg

SEQ ID NO: 129855 - DNA, 502 bp, Artificial Sequence
  derived and/or modified sequence
acacgacatcggatagttttcaaattcagcccttgacaacgagctcatagatgcggtggtgctttgttaacctgaaaaggaccctcagcgccggaagttagccgtctttctccatcctgactactacagtagccctcccagaaatcgtcccaaaattgtctgatagaaaggctgcacggaaacaacccgccacggacagcggaccgagaacagtgacgcgacgcgatgacgtcacgcagcaagcgggtgattccccagcctctggcgtcacgcgccgatgacgtaatcccaggcgttcgccctcatgcgggccagggtttggcctcgctcccacggcacgtctgaggcattggtttttcatccttccaaacttttggtctacagagactattagaagattaagtagctgctgctggtggtgacaatgtcaaataacggcctagacattcaagacaaacccccagcccctccgatgagaaataccagcactatgattggagcc

SEQ ID NO: 129856 - DNA, 581 bp, Artificial Sequence
  derived and/or modified sequence
acctcgggagctggcggctgagctgccaggagcccagcccagctgaatcgagcggagccggtggagcaggggccttgtgggtacccggttgggcagggagaggtgcggctctgcgacggaaacaatcgccagagatgccggggctagccttccccaccaggatggatagaatggtgctatctgagctgttataatgttggcctcatgcctagctttatattgcagcacgtctgaggcattggtttttcatccttccaaacttttggtctacagagactattagaagattaagtagctgctgctggtggtgacaatgtcaaataacggcctagacattcaagacaaacccccagcccctccgatgagaaataccagcactatgattggagccggcagcaaagatgctggaaccctaaaccatggttctaaacctctgcctccaaacccagaggagaagaaaaagaaggaccgattttaccgatccattttacctggagataaaacaaataaaaagaaagagaaagagcggccagagatttctctcccttcagattttgaacacacaattcatgtcggttttg

SEQ ID NO: 129857 - DNA, 450 bp, Artificial Sequence
  derived and/or modified sequence
acctcgggagctggcggctgagctgccaggagcccagcccagctgaatcgagcggagccggtggagcaggggccttgtgggtacccggttgggcagggagaggtgcggctctgcgacggaaacaatcgccagagatgccggggctagccttccccaccaggttggtggcgatacaaaaattgaaactggcctcagttgttgctctcaaatgcagatcaaggaatgtggacgctcatgtgtagctgctgctggtggtgacaatgtcaaataacggcctagacattcaagacaaacccccagcccctccgatgagaaataccagcactatgattggagccggcagcaaagatgctggaaccctaaaccatggttctaaacctctgcctccaaacccagaggagaagaaaaagaaggaccgattttaccgatccattttacctggagataaaa

SEQ ID NO: 129858 - DNA, 576 bp, Artificial Sequence
  derived and/or modified sequence
gagcgtgctgcacctcgggagctggcggctgagctgccaggagcccagcccagctgaatcgagcggagccggtggagcaggggccttgtgggtacccggttgggcagggagaggtgcggctctgcgacggaaacaatcgccagagatgccggggctagccttccccaccagcacgtctgaggcattggtttttcatccttccaaacttttggtctacagagactattagaagattaagctgctgctggtggtgacaatgtcaaataacggcctagacattcaagacaaacccccagcccctccgatgagaaataccagcactatgattggagccggcagcaaagatgctggaaccctaaaccatggttctaaacctctgcctccaaacccagaggagaagaaaaagaaggaccgattttaccgatccattttacctggagataaaacaaataaaaagaaagagaaagagcggccagagatttctctcccttcagattttgaacacacaattcatgtcggttttgatgctgtcacaggggagtttacgggaatgccagagcagtgggcccgcttgct

SEQ ID NO: 129859 - DNA, 3001 bp, Artificial Sequence
  derived and/or modified sequence
tgctttgcagaaaaggagaagcgcgcggcttcctcccgcctccttccctcctttcttcccccgccccttctgtttcgccaaccccgacgcggcgccttcgctgccgccctgcgagagcgcgagcgtgctgcacctcgggagctggcggctgagctgccaggagcccagcccagctgaatcgagcggagccggtggagcaggggccttgtgggtacccggttgggcagggagaggtgcggctctgcgacggaaacaatcgccagagatgccggggctagccttccccaccagtagctgctgctggtggtgacaatgtcaaataacggcctagacattcaagacaaacccccagcccctccgatgagaaataccagcactatgattggagccggcagcaaagatgctggaaccctaaaccatggttctaaacctctgcctccaaacccagaggagaagaaaaagaaggaccgattttaccgatccattttacctggagataaaacaaataaaaagaaagagaaagagcggccagagatttctctcccttcagattttgaacacacaattcatgtcggttttgatgctgtcacaggggagtttacgggaatgccagagcagtgggcccgcttgcttcagacatcaaatatcactaagtcggagcagaagaaaaacccgcaggctgttctggatgtgttggagttttacaactcgaagaagacatccaacagccagaaatacatgagctttacagataagtcagctgaggattacaattcttctaatgccttgaatgtgaaggctgtgtctgagactcctgcagtgccaccagtttcagaagatgaggatgatgatgatgatgatgctaccccaccaccagtgattgctccacgcccagagcacacaaaatctgtatacacacggtctgtgattgaaccacttcctgtcactccaactcgggacgtggctacatctcccatttcacctactgaaaataacaccactccaccagatgctttgacccggaatactgagaagcagaagaagaagcctaaaatgtctgatgaggagatcttggagaaattacgaagcatagtgagtgtgggcgatcctaagaagaaatatacacggtttgagaagattggacaaggtgcttcaggcaccgtgtacacagcaatggatgtggccacaggacaggaggtggccattaagcagatgaatcttcagcagcagcccaagaaagagctgattattaatgagatcctggtcatgagggaaaacaagaacccaaacattgtgaattacttggacagttacctcgtgggagatgagctgtgggttgttatggaatacttggctggaggctccttgacagatgtggtgacagaaacttgcatggatgaaggccaaattgcagctgtgtgccgtgagtgtctgcaggctctggagttcttgcattcgaaccaggtcattcacagagacatcaagagtgacaatattctgttgggaatggatggctctgtcaagctaactgactttggattctgtgcacagataaccccagagcagagcaaacggagcaccatggtaggaaccccatactggatggcaccagaggttgtgacacgaaaggcctatgggcccaaggttgacatctggtccctgggcatcatggccatcgaaatgattgaaggggagcctccatacctcaatgaaaaccctctgagagccttgtacctcattgccaccaatgggaccccagaacttcagaacccagagaagctgtcagctatcttccgggactttctgaaccgctgtctcgagatggatgtggagaagagaggttcagctaaagagctgctacagcactcctcaagactttgatccttggaaaccgtgtgtccagcattgaagagaactgcaactgaatgactaatcagatgatggccatttctaaataaggaatttcctcccaattcatggatatgagggtggtttatgattaagggtttatataaataaatgtttctagtcttccgtgtgtcaaaatcctcacctccttcataaccatctcccacaattaattcttgactatataaatttatggtttgataatattatcaatttgtaatcaattgagatttctttagtgcttgcttttctgtgactcaactgcccagacacctcattgtacttgaaaactggaacagcttgggaatgccatggggtttgataatctgccagggacatgaagaggctcagcttcctggaccatgactttggctcagctgatcctgacatgggagaacaaccacatttttctttgtgtgtgcttctagcagctgttcgggaggaccttgacccaatagtgttcccatgctgtttcttgtgaaatgctctcggctatgtagcagcttttgattccctgcataccctaggctgctgcccctatcctgtcccttgtttataacattgagaggttttctagggcacatactgagtgagagcagtgttgagaagtcggggaaaatggtgactacttttagagcaaggctgggcatcagcacctgtccagctctacttgtgtgatgtttcaggaactcagcccctttttctgcctaggataaggagctgaaagattaacttggatcttctaatggtccaaatcttttggtcacaataaagagtctccaaattagagactgcatgttagttctggatggatttggtggcctgacatgataccctgccagctgtgaggggaccccgtttttaagatgcatggccaagctctctgcaaatggaaatgcttacactgggtgttggggatgtttgctacctcctgctatttttgtggttttggttctcccactatggtaggacccctggccagcattgtggcttgtcatgtcagccccattgactaccttctcatgctctgaggtactactgcctctgcagcacaaatttctatttctgtcaataaaaggagatgaaaatattc

SEQ ID NO: 129860 - DNA, 1638 bp, Artificial Sequence
  derived and/or modified sequence
atgtccaataatgggcttgatattcaggacaagccacccgctccccctatgcggaacacaagtaccatgataggtgcgggttcaaaggatgctggcaccctgaaccacggatccaaacctctgccaccaaatccagaggagaaaaaaaagaaggaccggttttacagatctatcctgccgggagacaaaaccaataaaaaaaaggaaaaggagagaccagaaatctctctccccagcgattttgagcataccatccatgtggggttcgatgccgttacaggcgagtttacagggatgccagagcagtgggctcgactattacagacaagtaatatcaccaaaagcgaacagaagaagaaccctcaggccgttctcgacgttctcgagttctacaattccaagaaaacctctaatagtcagaagtacatgagcttcacggacaaatcagcagaggactataacagcagcaatgcactcaatgtgaaggctgtgtcagagactccagccgtgcccccagtgtcggaagatgaagacgatgacgacgacgacgccaccccccctcctgttatcgctccccgtcctgaacacaccaagagcgtctacactcgatctgtcattgagcctctcccagttacacccacacgcgatgtggcaacttcacccatctctcccacggaaaataataccacgccacctgatgccctgaccagaaacactgaaaaacagaaaaagaaaccaaagatgagcgatgaagagatcctcgagaaactcagaagcatcgtgagcgttggcgatcctaagaaaaagtatactcgcttcgaaaagatcggccagggagccagcggcacagtgtatactgcgatggacgttgctacgggccaggaagtggcgatcaagcagatgaatttacagcagcaaccgaaaaaagaactgataataaacgaaattcttgtgatgcgtgaaaataaaaaccccaacattgtgaactatctcgactcatacctggtgggggatgagttgtgggtggtgatggagtatctggcaggcggaagcctcacagacgtagtgactgaaacctgcatggatgaaggtcaaattgccgcagtctgtcgcgaatgtcttcaggcccttgagtttcttcactccaatcaggttatccatcgcgatatcaagtcagataatatcctcctcggaatggacgggagcgtgaagctgacagactttggattttgtgcgcaaatcacacctgagcagtctaagcgttccactatggtagggactccctactggatggcccctgaagtggtcactaggaaagcttacggtccgaaggtggacatctggagcctgggaatcatggctattgaaatgattgagggcgagcccccttacctaaatgaaaatcctcttagggctctatatctgatcgctacgaatggaaccccagaactgcagaatccagaaaaactatccgctatcttcagggacttcttgaaccgctgcctggagatggacgttgaaaaacgtggcagtgcaaaggagttgttgcagcatcagtttctgaaaatcgctaagcctctctcctctctgactccgctgatcgccgcagctaaggaagccactaagaacaatcattag

SEQ ID NO: 129861 - DNA, 300 bp, Artificial Sequence
  derived and/or modified sequence
atgtcaaacaatgggctcgatattcaggacaagccaccggcaccccctatgaggaacacatcaacgatgatcggcgctggctctaaggacgcgggtactttaaaccacgggtctaagcccctgccaccaaacccagaagaaaaaaaaaaaaaggatcgattttatcgcagtattctgccaggagacaaaacaaacaagaagaaggagaaggagcgcccagagattagcctgccctccgactttgagcacacaatacacgtgggtttcgatgccgtgactggtgaattcaccggtatgtag

SEQ ID NO: 129862 - DNA, 270 bp, Artificial Sequence
  derived and/or modified sequence
atgtctaacaacgggttggacatccaggacaagcctccagccccaccgatgaggaatacatcaacaatgattggcgcaggctccaaagatgctggtacacttaatcacggttcaaagcctctccccccaaacccagaggagaaaaagaagaaagaccgtttctataggtctatcttacctggggacaagaccaacaagaagaaagagaaagaacggccagaaatttcactcccatctgactttgaacacaccattcatgtgggtttctag

SEQ ID NO: 129863 - DNA, 192 bp, Artificial Sequence
  derived and/or modified sequence
atgtctaataatggactggatatccaggacaaacccccagctcctccaatgcgtaacacgtcaaccatgataggggcaggttctaaggatgccggaaccctaaatcacggttccaagccactccctcccaatcccgaagagaagaaaaagaaggaccggttctatcgctcaatcttacctggagacaaatag

SEQ ID NO: 129864 - DNA, 321 bp, Artificial Sequence
  derived and/or modified sequence
atgagcaataacgggctggatattcaagataaaccgcctgctccaccaatgcggaacacatcaactatgataggcgcaggttctaaagacgctggaacgctgaatcatggatctaagccacttcctcccaaccctgaagagaagaagaagaaggaccgattctataggtcaatccttccaggagacaaaactaacaaaaagaaggaaaaagaacgccctgagatcagcttgcccagcgatttcgagcacaccattcacgttgggtttgacgccgtcaccggagaatttactgggatgccagagcagtgggccaggctgtag

SEQ ID NO: 129865 - DNA, 1569 bp, Artificial Sequence
  derived and/or modified sequence
atgtcaaacaacggcctggatattcaggataagcccccagcaccccctatgcggaacacatcaacaatgatcggtgccggttccaaggacgcgggtacactgaaccacggcagcaaaccactcccccctaatcctgaagaaaaaaagaagaaagaccggttctaccgcagtatcctccctggggataagaccaataaaaagaaagagaaggagaggcctgagatcagtctgccaagcgactttgagcatacaatccacgttggttttgacgctgtcactggagaatttacggggatgcctgaacaatgggctcgcctgctccagaccagcaacatcaccaagagtgagcagaagaaaaacccccaggctgtgcttgacgtcctggaattttataactcaaagaagacaagcaacagtcagaaatatatgtcatttaccgataagtccgcagaggactataattcctctaacgccctgaatgtcaaagccgtaagcgagacccccgctgtccctcccgtgagcgaagacgaagacgatgatgatgacgatgcgacgccccctcctgtcatcgcacccaggccggagcatacaaagagtgtatatacccggtctgtgatcgagcctcttccggtgacacctacacgagatgtggcaacgagccctatctctcccacagaaaataataccactccacctgacgccttgacaagaaacactgaaaagcagaagaaaaagccaaaaatgtctgacgaggagattctagaaaagttgagatccatcgtttccgtgggggatccaaaaaagaagtacacaaggttcgagaaaatcggccagggcgctagcgggactgtgtacaccgcaatggacgtcgccacggggcaagaggtggccattaaacagatgaatctgcagcaacaacccaagaaagagctgattattaacgagattctggtgatgcgagaaaacaagaacccaaatatagtaaattatctggacagttatttggtcggtgacgagctgtgggtcgtgatggaatacctggcaggcggatctttgacagacgtagtgacagagacatgcatggacgaggggcagatcgccgctgtgtgtcgggagtgtctgcaggcactggagtttttacacagcaatcaggtcatccacagagatatcaaatccgataatatactcctcggaatggatggtagtgtaaagctgacagactttggattttgcgctcaaatcacaccggaacagtctaaacgttccaccatggtgggtacaccatactggatggcccctgaggtcgtcacccgtaaagcctacggaccaaaggttgatatctggtccctcggtattatggccattgaaatgattgagggcgaaccaccctaccttaatgaaaaccctctgagagccctctaccttattgccacaaatggcacacccgaactgcaaaaccccgagaagctgagtgccattttccgggacttcctcaaccgatgtcttgagatggacgtagagaagagaggctctgccaaggaactcctgcagcactcgtccaggctgtag

SEQ ID NO: 129866 - protein, 524 aa, Artificial Sequence
  derived and/or modified sequence
MSDNGELEDKPPAPPVRMSSTIFSTGGKDPLSANHSLKPLPSVPEEKKPRHKIISIFSGTEKGSKKKEKERPEISPPSDFEHTIHVGFDAVTGEFTGMPEQWARLLQTSNITKLEQKKNPQAVLDVLKFYDSNTVKQKYLSFTPPEKDGFPSGTPALNAKGTEAPAVVTEEEDDDEETAPPVIAPRPDHTKSIYTRSVIDPVPAPVGDSHVDGAAKSLDKQKKKTKMTDEEIMEKLRTIVSIGDPKKKYTRYEKIGQGASGTVFTATDVALGQEVAIKQINLQKQPKKELIINEILVMKELKNPNIVNFLDSYLVGDELFVVMEYLAGGSLTDVVTETCMDEAQIAAVCRECLQALEFLHANQVIHRDIKSDNVLLGMEGSVKLTDFGFCAQITPEQSKRSTMVGTPYWMAPEVVTRKAYGPKVDIWSLGIMAIEMVEGEPPYLNENPLRALYLIATNGTPELQNPEKLSPIFRDFLNRCLEMDVEKRGSAKELLQHPFLKLAKPLSSLTPLIMAAKEAMKSNR

SEQ ID NO: 129867 - DNA, 1575 bp, Artificial Sequence
  derived and/or modified sequence
atgagcgataacggcgagcttgaggataagccgccagcaccacccgtccgaatgagtagcacaatcttctcaactggcggtaaagaccctctgtccgccaatcactccctgaaacccttgccctcagtgcccgaagagaaaaagcctcggcacaaaattatcagtatcttcagcggaaccgaaaagggctcgaaaaaaaaggagaaagagagacccgagatctcacccccctcggacttcgagcacacgatccacgtgggcttcgacgctgtgaccggcgagttcaccggaatgcccgaacagtgggctcgcttactgcagacaagcaatataactaagctcgagcagaagaaaaaccctcaggctgtcctcgacgtgctcaaattttacgacagtaataccgtaaaacagaaataccttagttttaccccaccagagaaagacgggttcccatccgggacccctgctctgaacgccaagggaacagaggccccagctgtggtcacggaggaggaggatgacgacgaggaaaccgcccctcccgtaattgcgccccgtcccgatcacacaaaatccatatatacccgatcagttattgatccagtgcctgctccagtcggcgactcacacgtagacggtgcagctaaaagtctggacaagcagaaaaaaaagacgaaaatgacagatgaggaaatcatggagaagctaagaactatcgtgagcattggcgatccaaagaaaaaatacacacgatatgagaaaatcgggcagggcgcttccggcacagtgttcaccgctactgatgtagccctcgggcaggaggtcgccatcaaacagatcaacctccagaaacagcctaagaaggagcttatcatcaatgagattcttgtgatgaaggagctgaaaaaccccaacattgtgaatttcctagattcttatcttgtaggcgatgagctgttcgtggtcatggagtatctggcaggcgggtccctgaccgacgtggtcaccgaaacctgcatggacgaggcccagatcgctgctgtatgccgggagtgtctgcaagcacttgaattcctgcatgccaatcaggttatccacagggatataaaatccgacaacgtgcttctggggatggagggcagcgtgaaattgacggatttcggattttgcgcgcaaatcaccccagaacagtcaaaacgtagcaccatggtgggaacaccgtactggatggcaccagaggtcgttactaggaaggcttacgggcctaaggtggacatctggtccctcgggatcatggccattgagatggtggaaggggagcccccttaccttaacgaaaacccactgcgggctctgtacttgatagccaccaacggcacccctgaactgcaaaaccctgaaaaactgagccctattttcagagactttttgaatagatgcctcgagatggacgtggaaaaacgagggtccgctaaagagctactgcagcaccctttccttaagctggcaaaaccattgagtagtctcacaccccttatcatggccgccaaggaggcaatgaagtcgaatagatag

SEQ ID NO: 129868 - DNA, 1575 bp, Artificial Sequence
  derived and/or modified sequence
atgtctgacaacggggagctggaggacaagcccccagcccctcctgtgaggatgagcagcaccatcttcagcactggaggcaaggaccccctgagcgccaaccacagcctgaagcccctgcccagcgtgcctgaggagaagaagcccaggcacaagatcatcagcatcttcagcggcacagagaagggcagcaagaagaaggagaaggagaggcctgagatcagcccccccagcgactttgagcacaccatccacgtgggctttgatgctgtgactggagagttcaccggcatgcctgagcagtgggcccggctgctgcagaccagcaacatcaccaagctggagcagaagaagaacccccaggccgtgctggatgtgctgaagttctatgacagcaacacagtgaagcagaagtacctgtccttcaccccacctgagaaggatggcttccccagcggcaccccagccctgaatgccaagggcacagaggccccagctgtggtgacagaggaggaggatgatgatgaggagacagcccctcctgtgattgcccccaggccagaccacaccaagagcatctacaccaggtctgtgattgatcctgtgcctgcccctgtgggggacagccacgtggatggagctgccaagagcctggacaagcagaagaagaagaccaagatgacagatgaggagatcatggagaagctgcggaccatcgtgtccatcggggaccccaagaagaagtacaccaggtatgagaagattggccagggcgccagcggcaccgtcttcaccgccacagatgtggccctgggccaggaggtggccatcaagcagatcaacctgcagaagcagcccaagaaggagctgatcatcaatgagatcctggtgatgaaggagctgaagaaccccaacatcgtgaacttcctggacagctacctggtgggagatgagctgtttgtggtgatggagtacctggccggcggcagcctgacagatgtggtgacagagacctgcatggatgaggcccagattgctgctgtgtgcagagaatgtctgcaggccctggagttcctgcacgccaaccaggtgatccaccgggacatcaagagtgacaacgtgctgctgggcatggagggctctgtgaagctgacagactttggcttctgtgcccagatcaccccagagcagagcaagaggagcaccatggtgggcaccccctactggatggcccctgaggtggtgaccaggaaggcctacggccccaaggtggacatctggagcctgggcatcatggccatcgagatggtggagggggagcccccctacctgaatgaaaaccccctgcgggccctgtacctgattgccaccaacggcaccccagagctgcagaaccctgagaagctgagccccatcttccgggacttcctgaaccgctgcctggagatggatgtggagaagaggggcagcgccaaggagctgctgcagcaccccttcctgaagctggccaagcccctgagcagcctgacccccctcatcatggccgccaaggaggccatgaagagcaacagatag

SEQ ID NO: 129869 - DNA, 1575 bp, Artificial Sequence
  derived and/or modified sequence
atgagcgacaacggcgagctggaggacaagccccccgccccccccgtccgtatgtcttctactatcttcagtacaggtggtaaggatcctctgtcggccaatcattccttgaaacctcttccctctgtgcccgaggagaaaaaacccagacataagattattagcatttttagcggtactgaaaagggctccaaaaagaaggagaaagaacgccccgagatatcaccgccctcagatttcgaacatactattcacgttggtttcgacgcagtaacgggggagtttactggcatgccagagcagtgggcgcgcctcttgcagactagtaatatcacaaagttagagcagaagaagaacccccaagccgtgctggacgtgctgaaattctacgattctaataccgtgaagcaaaaatacttaagcttcactcccccagagaaggatgggttccccagtggcacccctgccctcaatgcaaagggcactgaggctccggccgtggtgaccgaggaggaagatgatgatgaggagaccgctccgccagtgatagccccaagaccagatcataccaagagcatctatacccgcagtgtaattgatcctgttccagcccccgtcggcgatagccacgtggacggcgctgctaagtccctcgataagcagaaaaagaaaacaaagatgactgacgaggagataatggaaaagctgcggacaatcgtgagtatcggagatccgaagaagaaatatacgagatacgaaaaaatcggccagggggcaagcggcacggtgttcacagccactgatgttgccctgggacaagaggtcgctattaagcagatcaacctgcagaagcagccaaaaaaggaacttattattaacgagattctcgtgatgaaggagctgaaaaaccctaatattgtgaactttttggatagctatctggtgggcgatgaactgttcgtagtgatggaatacctcgccggggggagtctgacagatgtggtaacagagacttgtatggatgaagctcagattgctgctgtgtgtagagaatgtttgcaggcactggagtttctgcacgctaaccaggtgatccacagagacattaaaagcgataacgttctgctgggtatggagggcagtgtgaaactgacagacttcggtttctgtgcccagatcaccccagagcagtcaaagagaagcactatggtgggtaccccgtactggatggctcctgaagtggtgaccaggaaggcttatggacccaaggtggacatttggtcacttgggatcatggctattgagatggtggagggagagcccccatacctgaacgagaatcccctgcgagcactgtacctcattgctacaaacgggacacccgaactgcaaaacccagagaagttgagtccaatctttcgggacttcctgaatcgatgccttgaaatggacgtggagaagcgtggtagcgccaaagagcttttgcagcaccctttcctgaagctggccaagcccctctcctccctgacccccttgataatggcggcgaaagaagctatgaagtcaaacagatag

SEQ ID NO: 129870 - DNA, 6139 bp, Artificial Sequence
  derived and/or modified sequence
gtcttcctcccccagggttgtggccacgcgcagcggcggcggttgttccgcttcccctccggcccgggccgtcgccattgccgaaggctccctcccctcccctccctggcgtgcgcaggactccgccgccgctgggcctagcggtagcagcggctgctccagcgcggcgtctcttcccgccccgcttccccttccctcccctcccctccccgcaccgcgcgctagcccggggcggctccgcagcccgccgggagctctgaccgaggcgcctcgctggggcggggaccttgccttgcccggggccatttcataattctgaatcatgtctgataacggagaactggaagataagcctccagcacctcctgtgcgaatgagcagcaccatctttagcactggaggcaaagaccctttgtcagccaatcacagtttgaaacctttgccctctgttccagaagagaaaaagcccaggcataaaatcatctccatattctcaggcacagagaaaggaagtaaaaagaaagaaaaggaacggccagaaatttctcctccatctgattttgagcacaccatccatgttggctttgatgctgttactggagaattcactggcatgccagaacagtgggctcgattactacagacctccaatatcaccaaactagagcaaaagaagaatcctcaggctgtgctggatgtcctaaagttctacgactccaacacagtgaagcagaaatatctgagctttactcctcctgagaaagatggctttccttctggaacaccagcactgaatgccaagggaacagaagcacccgcagtagtgacagaggaggaggatgatgatgaagagactgctcctcccgttattgccccgcgaccggatcatacgaaatcaatttacacacggtctgtaattgaccctgttcctgcaccagttggtgattcacatgttgatggtgctgccaagtctttagacaaacagaaaaagaagactaagatgacagatgaagagattatggagaaattaagaactatcgtgagcataggtgaccctaagaaaaaatatacaagatatgaaaaaattggacaaggggcttctggtacagttttcactgctactgacgttgcactgggacaggaggttgctatcaaacaaattaatttacagaaacagccaaagaaggaactgatcattaacgagattctggtgatgaaagaattgaaaaatcccaacatcgttaactttttggacagttacctggtaggagatgaattgtttgtggtcatggaataccttgctggggggtcactcactgatgtggtaacagaaacgtgcatggatgaagcacagattgctgctgtatgcagagagtgtttacaggcattggagtttttacatgctaatcaagtgatccacagagacatcaaaagtgacaatgtacttttgggaatggaaggatctgttaagctcactgactttggtttctgtgcccagatcacccctgagcagagcaaacgcagtaccatggtcggaacgccatactggatggcaccagaggtggttacacggaaagcttatggccctaaagtcgacatatggtctctgggtatcatggctattgagatggtagaaggagagcctccatacctcaatgaaaatcccttgagggccttgtacctaatagcaactaatggaaccccagaacttcagaatccagagaaactttccccaatatttcgggatttcttaaatcgatgtttggaaatggatgtggaaaaaaggggttcagccaaagaattattacagcatcctttcctgaaactggccaaaccgttatctagcttgacaccactgatcatggcagctaaagaagcaatgaagagtaaccgttaacatcactgctgtggcctcatactcttttttccattttctacaagaagccttttagtatatgaaaattattactctttttggggtttaaagaaatggtctgcataacctgaatgaaagaagcaaatgactattctctgaagacaaccaagagaaaattgcaaaaagacaagtatgacttttatatgaaccccttctttagggtccagaaggaattgtggactgaatcactagccttaggtctttcagcaaacagcctatcagggccatttatcatgtgtgagatttgcattttactttgctgactttgttgtaatagatcccattcattgtcccctttggggtatttccaatacttgaatggcagattggagtttttcagagtatgtgtttcatctgctagtctttctctccttcatagcttttcttttcctggacttgctccttttgagttgcttttgcgtttctcatgcctaggcaagtgtaatagaaattatgtagctccttatgttggcaaaggagctctatatagtttcactttgtataaaagttaggaccagctgttgttacatgtaatattttagttcagaacttgacctgaaggaagggaagaaaagtatgtgatttttaccttttttaacaaatgtgaaaaagtcagttttagaaatttcgtggtagtaagttcggcatttgttacatgtatagagagaagactaataatctctatttataactaaatcattgagatagaaaaagattcccattgactgtagacttcttcccattttgtcttcccttctgcctgtttccccttcaggcttggctctaggaaccaaagtgatttgttgttgttccaacctgggctttgtgactttggttagtgccactaccttcttccctcctttcccccttcaatttggaaataaatttctgtatatgttgcaattttaggtttaggtttgttctttttctttttcattaatcctctctcacctcacagataccccctcccatggcaaataatataataaccagtgaattttcaggaatttaaaaattagcttttttccacttaaaggagaaaaatatttgggactagcagcagaggcagtaagagatgtgaaccttggtgagctctgatacagtgagaagagattatactcatgaaagagaatgttagtgttacagagaagcagccgatagcaaatcgactgtagagacttggcggcggtggcattgccccaggtcgtcagcagtgtggtattatctatgagaacttgagcgacagagtatttcttgatgaatttatagatcatttgagatgttgagttactttagtttagttttgttttgttttttcaaataagtagagactattgtaaaaaacgagaaaggaaaatgaaatgtgcgtgttgatagcaataatttgtttcttttaaagattctaaaaggtctgagacctgtagcattaattatttgagtgccctcccttctcccctcccctcccttttctcttctcttttttcctctcctcttcttctcctttattcattgttttgcttttggagtgggtgttgttcaagtatctgtggtttggttctggcattttgttcccaccatccccttcccccattaacttcccccctgcttgccatcctgcagtagtataaatcatgaataaaaaataattttgctgttgtagtatacattggagaaactggcaggttttatttccattattttatttccactatatctatgataagatgcaattataaggagagaagtgactgttttttattgataaggcaagattttcagaaaaatgagtaaaataattaatgaaacatatttagagcacttaatggtctctgttttcaatataattcttgatttcatttttctctggaatatattggccttctacagctattactgaattatagaaactggtttatttctggcagaaagctgcagtgccacctgagttccaaattttaccattctttgtaaacagttggatggattatgataaagaagatgctaccaatgaaatagaaaaccaacgagatgagaagactgtgatcctcatgtactcagaggcacttccctcctaagtcaaagaccatcctcactgactatgtgccaacgcctcgtttcaggcttgtgactcaacaaagggcttttccattgatagaagcagtttgggatttgtagttgcgacttcttcgatagttacctgcacgtccattgctggcaactgacttgtcattaaaacctggctctttggttaagggagctacgctgtggtttattcttaagttacgtggataaactaacctctaacagaaatatactttggttaattttgaaatgtgtcatttttaaacaatcttaaaagtaatacagaattgtgatttattaattttaaaacattcagaacttgttgaaagaaaaattatatctgaatcaagattcatgttttttatttttattttttttgatacagagtctcactctgtcactcaggctggagtgcagtgacatgatctcagctcactgcaacctccgcttcctgggttcaagcaattctcatgcctcagcctcctgagtagctgagaccacaggcacccgccaccacacccagctatttttttgtatttttagtagagacagagtctcaccacattgcccaggctggtctccaactcctgagctcaggcagtctgcccaccttggcctcccaaagtgctgcagttacaggcgtgagccactgcacctggcctcatgttttttaaataattgccttttatatttaccctttttgtcatcactttagaatgaaaattcccatttaaatctgaaagttaccttaatagtcctcttgtgttattaggacagtattattatagtacttatttattttattttagatttaaagttatcttctctttttcttttttcttctgctgcttttagggacaattaaaactgggaaactatgaaacatggaacattttatcctacctgaaagtaaacgagtaattgtgaagcataagacactgaggctaatacaactctgtcttcatgtgttgactgcctggcacatagtattcattctcttccctttaacatagaagtgtccagctgcgtacagtctagtaaccagcaactgtaaacgaacctgtgcctctaacaagcgattctaaaccacctatgagtatttcttttagggctcacttaaatacatgtttgtatatactgtattctagccagaataattttagatctgatcaggtagtagctaaaattagaaaaaaacaaaatagatgcttaaagaatttgcatccatttttgagtctaaatcttttaaaatatactgagatccacatctagtgaaatgtcagtgtcaaaatattatagattatagctaaaatccagattaatactcatttggggttttttatagtggaacttcatagtaatacaaaaagcagattgtcttcctgtctccgctgctcccacagtaggtattgaaactggtaaaatcagttttttgatagtgtgtgtatataagaaaaaatagatacacacattcttttttctcagtcaacacattgattgaacactctggcaaagatgctgtggtggatgaggttggagttcgaaagaagaagcaagcgctggcctggccttgaaagaaccgaagtctttcccattcacttctctagaaagctgccaagacagaggcagaaagaaatggatgatagttctgtcaagcacacttctgttctcttagaacttagaagtgtttctaagagaacagaagtaataagagaaacagttacgtgtggaattcaacatctttggttggaacgcattggctttttttttcttgttttgatagaaatggaattaagcaaaagtagtttttgtcttttctgttgtcttcaaattttatgccttttatttttaatttaatcccgttcaattatttaattgttatacattgacattaactgctgtattttgactttgttcaataattttgttctttcagggctagaaataaactttttaaaaaaagtgtgcatttttccctttcctaaacttttattctttcttttgatcagcgtaaaagaatattttaatgtcttttgatagcataaaagaatatttaaatgtcttaataggttttcaaagaacatttagtatttttagtgataaatgttttaaaccttttaa

SEQ ID NO: 129871 - DNA, 1575 bp, Artificial Sequence
  derived and/or modified sequence
atgagtgataacggggaactagaggataagccacccgcaccccctgtgcgcatgtcttccacgatcttctctacagggggtaaagaccctctctccgccaatcattctctgaagccgttgcccagcgtacctgaggaaaagaagccaagacacaaaatcatttctatttttagtgggacggagaaaggatcaaagaagaaggagaaagagcgccctgaaattagtcctccgtcagattttgagcatactatccacgtgggttttgacgcggtcacaggcgaattcacgggtatgcccgagcaatgggccaggctactgcagacctccaatatcacaaaactggagcagaaaaagaatccccaagcagtgctagacgtcctgaagttttacgacagcaataccgtaaagcagaaataccttagctttacacctcccgaaaaagatggctttccatctggcacccccgcactcaatgctaaggggacagaggccccagctgtcgtaactgaagaggaagacgacgatgaggagaccgctccccctgtgatcgcgcctaggcccgatcacaccaagtctatatatacaagaagtgttattgatccagtgccagccccagtcggtgacagtcacgtggatggggctgctaagtctctagacaagcagaagaagaaaaccaagatgaccgatgaagaaatcatggagaaacttcggactattgtatcaattggggacccaaagaagaagtacacccgctatgaaaaaattgggcagggggcttctggcaccgtgtttactgccacagacgttgcgctggggcaagaagttgctatcaaacagattaatctgcagaaacagcccaaaaaagaattgatcatcaacgagattctggtgatgaaagaactcaaaaatccaaatatcgtgaactttctggattcctatttggtaggtgatgagctgttcgtggtgatggagtatctggccggaggctccctgacagatgtggttaccgaaacctgcatggatgaggcacaaatcgctgccgtttgcagagaatgtttgcaggctttagagttcctgcacgcgaaccaggtcattcaccgggacattaagtcagacaacgtcctacttggcatggaggggagtgttaaactgaccgacttcggtttttgcgctcagatcacccctgaacaaagtaagaggagtacaatggtgggcactccatactggatggcccctgaggtggtcacccgtaaggcctatggacctaaagttgacatttggagcttgggcatcatggcaattgaaatggtagagggggagcctccttatctgaacgagaaccctctgcgggcactgtacctgatcgccacaaatgggactcctgagttgcaaaaccctgagaaactttccccaatcttccgcgacttcctcaatcgatgcttagagatggacgtagagaaacgagggtccgccaaggagctcttacagcacccctttctgaagctagcgaaacctctgagcagcctcaccccactgattatggcggcaaaagaagcaatgaagtccaaccgctag

SEQ ID NO: 129872 - DNA, 1575 bp, Artificial Sequence
  derived and/or modified sequence
atgagcgacaacggcgagctggaggacaagccccccgccccccccgtgagaatgagcagcaccatcttcagcaccggcggcaaggaccccctgagcgccaaccacagcctgaagcccctgcccagcgtgcccgaggagaagaagcccagacacaagatcatcagcatcttcagcggcaccgagaagggcagcaagaagaaggagaaggagagacccgagatcagcccccccagcgacttcgagcacaccatccacgtgggcttcgacgccgtgaccggcgagttcaccggcatgcccgagcagtgggccagactgctgcagaccagcaacatcaccaagctggagcagaagaagaacccccaggccgtgctggacgtgctgaagttctacgacagcaacaccgtgaagcagaagtacctgagcttcaccccccccgagaaggacggcttccccagcggcacccccgccctgaacgccaagggcaccgaggcccccgccgtggtgaccgaggaggaggacgacgacgaggagaccgccccccccgtgatcgcccccagacccgaccacaccaagagcatctacaccagaagcgtgatcgaccccgtgcccgcccccgtgggcgacagccacgtggacggcgccgccaagagcctggacaagcagaagaagaagaccaagatgaccgacgaggagatcatggagaagctgagaaccatcgtgagcatcggcgaccccaagaagaagtacaccagatacgagaagatcggccagggcgccagcggcaccgtgttcaccgccaccgacgtggccctgggccaggaggtggccatcaagcagatcaacctgcagaagcagcccaagaaggagctgatcatcaacgagatcctggtgatgaaggagctgaagaaccccaacatcgtgaacttcctggacagctacctggtgggcgacgagctgttcgtggtgatggagtacctggccggcggcagcctgaccgacgtggtgaccgagacctgcatggacgaggcccagatcgccgccgtgtgcagagagtgcctgcaggccctggagttcctgcacgccaaccaggtgatccacagagacatcaagagcgacaacgtgctgctgggcatggagggcagcgtgaagctgaccgacttcggcttctgcgcccagatcacccccgagcagagcaagagaagcaccatggtgggcaccccctactggatggcccccgaggtggtgaccagaaaggcctacggccccaaggtggacatctggagcctgggcatcatggccatcgagatggtggagggcgagcccccctacctgaacgagaaccccctgagagccctgtacctgatcgccaccaacggcacccccgagctgcagaaccccgagaagctgagccccatcttcagagacttcctgaacagatgcctggagatggacgtggagaagagaggcagcgccaaggagctgctgcagcaccccttcctgaagctggccaagcccctgagcagcctgacccccctgatcatggccgccaaggaggccatgaagagcaacagatag

SEQ ID NO: 129873 - protein, 1627 aa, Artificial Sequence
  derived and/or modified sequence
MRLWSWVLHLGLLSAALGCGLAERPRRARRDPRAGRPPRPAAGPATCATRAARGRRASPPPPPPPGGAWEAVRVPRRRQQREARGATEEPSPPSRALYFSGRGEQLRLRADLELPRDAFTLQVWLRAEGGQRSPAVITGLYDKCSYISRDRGWVVGIHTISDQDNKDPRYFFSLKTDRARQVTTINAHRSYLPGQWVYLAATYDGQFMKLYVNGAQVATSGEQVGGIFSPLTQKCKVLMLGGSALNHNYRGYIEHFSLWKVARTQREILSDMETHGAHTALPQLLLQENWDNVKHAWSPMKDGSSPKVEFSNAHGFLLDTSLEPPLCGQTLCDNTEVIASYNQLSSFRQPKVVRYRVVNLYEDDHKNPTVTREQVDFQHHQLAEAFKQYNISWELDVLEVSNSSLRRRLILANCDISKIGDENCDPECNHTLTGHDGGDCRHLRHPAFVKKQHNGVCDMDCNYERFNFDGGECCDPEITNVTQTCFDPDSPHRAYLDVNELKNILKLDGSTHLNIFFAKSSEEELAGVATWPWDKEALMHLGGIVLNPSFYGMPGHTHTMIHEIGHSLGLYHVFRGISEIQSCSDPCMETEPSFETGDLCNDTNPAPKHKSCGDPGPGNDTCGFHSFFNTPYNNFMSYADDDCTDSFTPNQVARMHCYLDLVYQGWQPSRKPAPVALAPQVLGHTTDSVTLEWFPPIDGHFFERELGSACHLCLEGRILVQYASNASSPMPCSPSGHWSPREAEGHPDVEQPCKSSVRTWSPNSAVNPHTVPPACPEPQGCYLELEFLYPLVPESLTIWVTFVSTDWDSSGAVNDIKLLAVSGKNISLGPQNVFCDVPLTIRLWDVGEEVYGIQIYTLDEHLEIDAAMLTSTADTPLCLQCKPLKYKVVRDPPLQMDVASILHLNRKFVDMDLNLGSVYQYWVITISGTEESEPSPAVTYIHGSGYCGDGIIQKDQGEQCDDMNKINGDGCSLFCRQEVSFNCIDEPSRCYFHDGDGVCEEFEQKTSIKDCGVYTPQGFLDQWASNASVSHQDQQCPGWVIIGQPAASQVCRTKVIDLSEGISQHAWYPCTISYPYSQLAQTTFWLRAYFSQPMVAAAVIVHLVTDGTYYGDQKQETISVQLLDTKDQSHDLGLHVLSCRNNPLIIPVVHDLSQPFYHSQAVRVSFSSPLVAISGVALRSFDNFDPVTLSSCQRGETYSPAEQSCVHFACEKTDCPELAVENASLNCSSSDRYHGAQCTVSCRTGYVLQIRRDDELIKSQTGPSVTVTCTEGKWNKQVACEPVDCSIPDHHQVYAASFSCPEGTTFGSQCSFQCRHPAQLKGNNSLLTCMEDGLWSFPEALCELMCLAPPPVPNADLQTARCRENKHKVGSFCKYKCKPGYHVPGSSRKSKKRAFKTQCTQDGSWQEGACVPVTCDPPPPKFHGLYQCTNGFQFNSECRIKCEDSDASQGLGSNVIHCRKDGTWNGSFHVCQEMQGQCSVPNELNSNLKLQCPDGYAIGSECATSCLDHNSESIILPMNVTVRDIPHWLNPTRVERVVCTAGLKWYPHPALIHCVKGCEPFMGDNYCDAINNRAFCNYDGGDCCTSTVKTKKVTPFPMSCDLQGDCACRDPQAQEHSRKDLRGYSHG

SEQ ID NO: 129874 - protein, 566 aa, Artificial Sequence
  derived and/or modified sequence
MDCNYERFNFDGGECCDPEITNVTQTCFDPDSPHRAYLDVNELKNILKLDGSTHLNIFFAKSSEEELAGVATWPWDKEALMHLDDDCTDSFTPNQVARMHCYLDLVYQGWQPSRKPAPVALAPQVLGHTTDSVTLEWFPPIDGHFFERELGSACHLCLEGRILVQYASNASSPMPCSPSGHWSPREAEGHPDVEQPCKSSVRTWSPNSAVNPHTVPPACPEPQGCYLELEFLYPLVPESLTIWVTFVSTDWDSSGAVNDIKLLAVSGKNISLGPQNVFCDVPLTIRLWDVGEEVYGIQIYTLDEHLEIDAAMLTSTADTPLCLQCKPLKYKVVRDPPLQMDVASILHLNRKFVDMDLNLGSVYQYWVITISGTEESEPSPAVTYIHGSGYCGDGIIQKDQGEQCDDMNKINGDGCSLFCRQEVSFNCIDEPSRCYFHDGDGVCEEFEQKTSIKDCGVYTPQGFLDQWASNASVSHQDQQCPGWVIIGQPAASQVCRTKVIDLSEGISACLVPLHHQLPIFPAGSDHFLAPGVFFSTNGCRSCHCPPGDGWDILWGPKAGDHQRAAA

SEQ ID NO: 129875 - protein, 665 aa, Artificial Sequence [sequence omitted]

SEQ ID NO: 129876 - DNA, 4884 bp, Artificial Sequence
  derived and/or modified sequence
atgagactttggagttgggttctgcatctcggtctgctgtccgccgccctcgggtgcggcttggcggagaggccacgacgcgcccgtagagacccacgcgcaggcaggcccccgcgacccgcagccgggccagccacctgcgcgactcgagccgccaggggccgaagggccagtccgcccccaccacccccccccgggggagcctgggaagcggtccgagtgccacgacgtcgacaacagagggaagccagaggggccacagaagagcctagtccaccatcgcgagctctgtattttagcgggcgcggtgaacagttgaggctgagggccgatctcgagttacctagagatgcctttactctgcaggtgtggttgcgcgcagaaggcgggcagcggtcacccgctgttattacaggcctatatgataaatgctcctacattagcagggataggggctgggtggtggggattcacacgatctccgatcaagataataaagacccaagatatttttttagcttgaaaactgacagagccaggcaagtaacaactatcaacgcccatcggtcctacctaccaggacagtgggtctatctcgccgctacatacgacgggcagtttatgaagttatacgtaaatggggcccaggtggccacctccggcgagcaggttggtgggatcttttcccccctgactcaaaagtgcaaggtgctgatgttaggggggtctgccttaaaccacaattacagaggctatattgagcactttagcttatggaaagtggcaagaactcagagagaaattctatctgatatggagactcacggcgcacacacagctctgccccaacttctgctgcaggaaaattgggataatgttaagcacgcttggagcccgatgaaggacggctcctcccccaaggtggagttctctaacgcccacggattcttactggataccagcctggaaccaccgctatgcggccagaccttgtgtgacaatactgaggtgatcgcatcctataatcagctgagctcatttcggcagcctaaggtcgtgcgctatcgggtagtgaatctctatgaggatgatcataaaaatccgactgtgacaagagagcaggtagattttcaacatcaccagctggccgaagccttcaagcagtacaatatcagctgggagctggacgtcctcgaggtctctaatagttcccttcgcagacggctcatcctggccaattgtgatatctcaaagataggcgacgaaaattgtgaccccgagtgtaaccacacacttacgggccatgacggtggagattgtcgtcacctgaggcaccctgcatttgtgaaaaaacaacataacggggtgtgtgacatggattgtaattatgagaggtttaactttgacgggggcgaatgttgcgaccccgaaatcaccaacgtcacccagacatgctttgatcctgacagtccgcaccgcgcctatctcgatgtcaatgagctcaagaatattctaaagctggatggctctacacacctgaatatattctttgctaaatcgtcggaggaggagttagcaggagttgctacttggccatgggacaaggaggcattaatgcatttaggcggcatcgtgctgaacccttctttttacggaatgccaggacatacccataccatgatccatgagattggacatagtctggggctctaccatgtctttcgaggcatcagtgaaattcagagttgctccgacccttgcatggagactgaaccatcatttgagaccggtgatctgtgcaatgacaccaatcccgctcctaagcacaagagctgcggcgaccccggtcctggaaacgacacttgcggttttcatagcttctttaataccccatacaataatttcatgagctacgctgacgacgactgtacagactcattcacacctaatcaagttgcccgcatgcactgctacctcgatctcgtgtatcagggttggcagccgagccggaagccagcccccgtcgcgctcgcaccccaagtgctgggacatacgacagatagcgtcaccctcgagtggttccctccaatcgatggccattttttcgaacgtgagctcggctccgcctgccatctctgtctggaaggtcgtatcctcgttcaatacgcgagcaacgcctcatctccgatgccgtgctcaccttcggggcattggtccccccgggaggccgaaggtcatccggatgtggagcaaccatgcaagtcttccgtgcggacatggtctccgaattctgctgttaatccacatacagtgccacccgcttgccccgagccacaaggctgctatctggagctagagttcctctaccccctggtacccgagtctcttaccatatgggtaactttcgtgagtacagactgggacagctccggcgccgtcaacgacatcaagctcctcgctgtttccggaaaaaatatcagcctgggcccccagaacgtcttttgtgatgtgccccttactattcgcctgtgggatgtcggcgaggaggtttacggcatccagatttatacactggacgagcacctggagatcgatgcagctatgctgactagtaccgccgatactccactttgcctacagtgcaagcccctgaagtacaaggtggtgagggatccaccactgcaaatggacgtggcatctattctgcaccttaaccggaaattcgtggatatggacctcaacctcggatccgtgtatcaatactgggtgattacgatctcggggactgaagagtccgaaccttcgcctgcagttacatacattcacgggagcggctactgtggcgatggcattatccaaaaagaccagggggagcaatgtgacgatatgaacaaaattaatggggacggctgcagcctgttctgcagacaagaagtgagctttaattgcatcgacgaaccatcaaggtgttacttccacgacggcgatggagtctgcgaggagtttgaacagaaaacaagcattaaagactgcggcgtttacacgccacagggatttctcgatcaatgggcttctaacgcctctgtgtcccatcaggatcagcagtgtcctggatgggtgattatcggccagcccgcagcttcacaggtctgcagaacgaaagttatcgacctgagcgaggggatctctcagcatgcttggtatccctgtaccattagctatccctattcccaactggctcagactacgttttggctcagggcctattttagccagcctatggtcgccgcagccgtgatcgttcatctggtgacagacgggacttactatggagatcaaaaacaggagaccatcagcgtccagcttcttgacaccaaggaccagtctcacgacctgggcctccacgtgctgtcttgccgcaacaatcctctcattatcccagttgttcacgatttatcccagcctttctaccactcacaggcagtcagggtaagcttcagctctccattagttgccatctcaggggtggcgctgcggtctttcgataatttcgatcccgtgactctctcctcctgccaaagaggagaaacctactcccccgcggagcaatcttgtgtccactttgcctgcgaaaagaccgattgtccagaactcgctgtcgaaaacgcatctcttaactgctcaagcagtgaccggtaccacggtgcccagtgtaccgtgtcctgcagaaccgggtatgtcctccagatccggcgagatgatgagctgataaaaagtcagacaggcccttcggttaccgttacatgcacagaggggaaatggaataaacaggtggcctgcgagcctgtggattgttctatccctgatcaccatcaggtttacgcggctagcttttcttgcccggagggcacgacctttgggtctcagtgtagttttcaatgtaggcaccccgcccagttaaaaggcaataatagcctactgacttgcatggaggacgggctgtggagcttcccagaggcactctgtgagctgatgtgcctcgcaccacctcctgtgcctaacgccgatttgcaaacagctcgctgccgggaaaacaagcataaagtgggcagcttctgcaagtataagtgcaagccagggtaccacgtgcctgggagctctcggaagagtaaaaagcgtgcctttaagacccaatgtacccaggacggcagctggcaggagggggcatgtgttcctgtgacctgtgatcctccccctcctaagttccatggtctctatcagtgtacaaacggctttcaatttaactcagaatgcagaatcaaatgcgaagattctgatgccagccaagggctgggatctaacgtcatccactgccggaaggacgggacttggaacggctcatttcatgtctgtcaggaaatgcagggacaatgctcggtcccgaacgagctgaattccaacctaaagttacagtgccccgatgggtacgcgataggctccgagtgcgcaacttcctgtttggaccataactctgaaagtataattctgcctatgaatgtgacggtaagagatataccacactggctgaacccaacgagggtagagagggtcgtttgtacggcggggttaaaatggtatccacaccctgccctgatccattgtgtgaagggttgtgagccgttcatgggggacaactactgcgacgccatcaataatcgcgcattctgtaactacgatggtggagactgttgtacttctacagtgaagaccaaaaaagttacccctttccctatgagctgcgacctccagggcgattgtgcctgccgcgaccctcaggcccaggagcacagtcgaaaggacctgaggggttacagccacggctag

SEQ ID NO: 129877 - DNA, 1701 bp, Artificial Sequence
  derived and/or modified sequence
atggattgcaactacgagagattcaatttcgacggcggagagtgctgtgacccggagattacaaatgtgactcagacttgtttcgatccagatagcccccatcgcgcatacctagacgtgaacgagttgaagaatattctcaaactggacggcagcacgcacctgaacatcttttttgcgaagtcatcagaagaggaattagcaggggtcgccacctggccttgggataaagaagctctcatgcacctggatgatgactgtactgacagcttcacacccaatcaggtcgcccgcatgcattgttatttggacctagtctaccagggatggcagccatcccgcaagcctgccccagttgcattggctccccaagttttaggccatacaaccgactcggtgacacttgagtggttccctcctattgacgggcatttttttgaaagggagctcggctctgcctgccatctgtgtctggagggtaggattttagtccagtacgcttctaacgccagctcacccatgccatgctctccctctggtcattggagccctagagaggctgagggtcatcccgatgtcgagcagccctgtaagtcttcagtacggacatggtcaccaaactccgccgtcaaccctcacacagttccacctgcttgccccgaaccacagggatgttatctcgaacttgagttcctgtaccccctcgtgcccgagagcctgaccatatgggtgacctttgtgtcgacagattgggacagtagcggggcagtcaacgacattaaactccttgctgtgtccggtaaaaacatcagtttaggccctcagaacgtgttttgcgacgtgccgctgactatcaggctctgggatgttggagaggaggtttatgggattcagatatataccctggatgagcacctggaaatcgacgcagccatgctgaccagcacagcagatactcctctgtgtcttcagtgcaagcctctgaagtacaaggtggtcagggatcccccgctccagatggatgtggcgagtatcctccacttaaatcggaaattcgtggatatggatcttaacctaggatcggtgtaccagtattgggtcattactattagcggcactgaggaaagcgaaccatctcctgcagtaacgtacatacacggcagcggttactgtggggatggcatcatacagaaggatcaaggagaacaatgcgacgacatgaataagattaatggggacgggtgtagcttgttctgtcgccaggaggtttcgttcaactgcattgatgaaccctcaaggtgctactttcacgacggggacggcgtgtgtgaggaattcgagcaaaagacttctattaaggattgcggcgtgtatactccgcagggcttcctggatcagtgggcctcaaatgcttccgtgtctcaccaggaccagcagtgtcccgggtgggtaatcatcggtcagccagcagcctcccaagtctgtcgtactaaagtcatcgatctgagcgagggcatctccgcctgcctggttccattgcatcaccagctgcccatctttccggcggggtcagatcatttcctggccccaggggtcttttttagtacgaacggctgcagaagctgccattgccctcccggagatgggtgggacattctttggggacctaaggcaggcgatcatcaacgcgcggctgcctag

SEQ ID NO: 129878 - DNA, 1998 bp, Artificial Sequence
  derived and/or modified sequence
atgaacaaaataaacggcgatggatgttctctgttttgtcgtcaggaggtttccttcaattgcatcgacgaaccgtcccgctgttatttccatgacggagatggcgtttgcgaggagttcgagcagaaaaccagcatcaaagactgcggtgtctacaccccacagggctttctggaccagtgggccagtaacgcatcagtcagccatcaggaccaacagtgcccagggtgggtaattattggccagccagcagccagtcaagtgtgccgcacaaaagtgatagatttatcagaagggataagtcaacatgcgtggtatccctgcactatcagttacccgtacagccagctggcccagactacattttggcttcgggcctatttctcacagcctatggtggcagccgccgttatcgtccacctggtcaccgacggaacctactacggggatcagaagcaggaaacaatctctgtccagctgctagatacaaaggatcagtcccatgacttgggtctccacgtcctgagctgccgcaacaatccactcataattcctgtggttcacgatctttctcaaccgttttaccactctcaggccgtacgcgtctcttttagctccccactcgtagccatttctggcgtggctcttaggtcattcgacaacttcgacccagtgacactcagctcttgtcagcggggggagacctactcccctgcggagcaatcatgcgtgcacttcgcttgtgagaaaaccgattgcccagagctcgcggttgagaacgcctcgctcaactgctcttcctcggatcgctaccatggggcccagtgtacagtttcgtgcagaactggctacgtgctgcagatcagacgggatgatgagctcatcaaatcccaaaccgggccctccgtgactgtaacttgcactgaaggaaaatggaataaacaggtcgcctgcgagcctgtcgattgttctatccctgaccaccaccaggtgtatgccgcatcgtttagctgtcctgagggaactacctttggatctcagtgttctttccagtgtcgccaccccgcccaactcaaaggcaataattccctcctgacttgcatggaagatggtctttggtccttcccggaggcgctgtgtgagctcatgtgccttgcgcctccacccgtgcctaatgccgacttgcagaccgctcgatgtcgcgaaaataagcacaaggtcggatcgttctgcaagtacaagtgtaaaccaggatatcatgtgcccgggtccagccgcaagtccaagaagcgagccttcaaaacccaatgtacccaagatggaagctggcaggagggtgcatgtgttcctgtcacctgcgacccccccccaccaaagttccatggtctctatcagtgcactaatggcttccagttcaacagtgagtgtcggataaagtgcgaagactctgatgcatcccaggggctggggagcaacgtgatccactgccgaaaagatggaacttggaacggcagctttcatgtgtgccaggagatgcaagggcagtgcagtgttccaaatgaacttaatagcaacctcaaactgcaatgccctgacgggtatgcaattggctctgaatgcgcgacgagctgtctggatcataactccgaatccatcattctccccatgaatgtgactgtgcgcgatatccctcattggctgaaccctaccagggtggagcgggttgtgtgtacagccggcttaaaatggtatccccatcccgcattaattcactgtgtcaagggctgtgaaccttttatgggcgacaattactgtgacgcgatcaataacagggctttttgcaattatgatggtggagattgttgcacatccaccgtcaaaactaaaaaagtgacaccattccccatgagctgtgacttacaaggtgactgcgcctgccgggatccccaggcccaagagcactcccggaaggacctcagaggatactctcacggctag

SEQ ID NO: 129879 - DNA, 4884 bp, Artificial Sequence
  derived and/or modified sequence
atgaggctgtggagctgggtgctgcacctgggcctgctgtctgctgccctgggctgcggcctggccgagcggccccggcgggcccggcgggacccccgggccggccggccccccaggcctgctgctggccctgccacctgtgccaccagggctgcccggggcagaagagccagccccccacctcctcctcctcctggaggagcctgggaggccgtgcgggtgccccggcggcggcagcagcgggaggcccggggggccacagaggagcccagcccccccagccgggccctgtacttcagcggccgcggggagcagctgcggctgcgggctgacctggagctgcccagagatgccttcaccctgcaggtgtggctgcgggcagagggcggccagaggagccctgctgtgatcaccggcctgtatgacaagtgcagctacatcagccgggaccggggctgggtggtgggcatccacaccatcagtgaccaggacaacaaggacccccgctacttcttcagcctgaagacagaccgggcccggcaggtgaccaccatcaatgcccacaggagctacctgcccggccagtgggtgtacctggccgccacctatgatggccagttcatgaagctgtatgtgaatggagcccaggtggccaccagcggggagcaggtgggcggcatcttcagccccctgacccagaagtgcaaggtgctgatgctgggcggcagcgccctgaaccacaactaccggggctacatcgagcacttcagcctgtggaaggtggcccggacccagcgggagatcctgagtgacatggagacccatggagcccacacagccctgccccagctgctgctgcaggagaactgggacaacgtgaagcacgcctggagccccatgaaggatggcagcagccccaaggtggagttcagcaatgcccacggcttcctgctggacaccagcctggagccccccctgtgtggccagaccctgtgtgacaacacagaggtgattgccagctacaaccagctgagcagcttccggcagcccaaggtggtgcgctacagagtggtgaacctgtatgaagatgaccacaagaaccccaccgtgacccgggagcaggtggacttccagcaccaccagctggccgaggccttcaagcagtacaacatctcctgggagctggatgtgctggaggtgagcaacagcagcctgcggcggcggctcatcctggccaactgtgacatcagcaagattggagatgagaactgtgaccctgagtgcaaccacaccctgactggacatgatggaggagactgccgccacctgcggcacccagcctttgtgaagaagcagcacaacggggtgtgtgacatggactgcaactatgagcgcttcaactttgatggaggagagtgctgtgaccctgagatcaccaacgtgacccagacctgctttgatcctgacagcccccaccgggcctacctggatgtgaatgagctgaagaacatcctgaagctggatggcagcacccacctgaacatcttctttgccaagagcagcgaggaggagctggccggcgtggccacctggccctgggacaaggaggccctgatgcacctgggcggcatcgtgctgaaccccagcttctacggcatgcctggccacacccacaccatgatccacgagatcggccacagcctgggcctgtaccacgtgttccggggcatcagcgagatccagagctgcagcgacccctgcatggagacagagcccagctttgagaccggggacctgtgcaatgacaccaacccagcccccaagcacaagagctgtggggaccccggccctggaaatgacacctgtggcttccacagcttcttcaacaccccctacaacaacttcatgtcctatgcagatgatgactgcacagacagcttcacccccaaccaggtggccaggatgcactgctacctggacctggtgtaccagggctggcagcccagcaggaagccagcccctgtggccctggccccccaggtgctgggccacaccacagacagcgtgaccctggagtggttcccccccattgatggccacttctttgagcgggagctgggcagcgcctgccacctgtgcctggagggccgcatcctggtgcagtatgccagcaatgccagcagccccatgccctgcagccccagcggccactggagcccccgggaggccgagggccacccagatgtggagcagccctgcaagagctctgtgaggacctggagccccaacagcgctgtgaacccccacacagtgcccccagcctgcccagagccccagggctgctacctggagctggagttcctgtaccccctggtgcctgagagcctgaccatctgggtgacctttgtgtccacagactgggacagcagcggggctgtgaatgacatcaagctgctggccgtgtctgggaagaacatcagcctgggcccccagaatgtgttctgtgatgtgcccctgaccatccggctgtgggatgtgggggaggaggtgtatggcatccagatctacaccctggatgagcacctggagattgatgctgccatgctgaccagcacagctgacacccccctgtgcctgcagtgcaagcccctgaagtacaaggtggtgcgggacccccccctgcagatggatgtggccagcatcctgcacctgaacaggaagtttgtggacatggacctgaacctgggctctgtgtaccagtactgggtgatcaccatctctggaacagaggagagcgagcccagccctgctgtgacctacatccacggcagcggctactgtggagatggcatcatccagaaggaccagggcgagcagtgtgatgacatgaacaagatcaatggagatggctgcagcctcttctgccggcaggaggtgtccttcaactgcattgatgagcccagccgctgctacttccatgatggagatggagtgtgtgaggagtttgagcagaagaccagcatcaaggactgtggggtgtacaccccccagggcttcctggaccagtgggccagcaatgcctctgtgagccaccaggaccagcagtgccccggctgggtgatcatcggccagcctgctgccagccaggtgtgcaggaccaaggtgattgacctgtctgagggcatcagccagcacgcctggtacccctgcaccatctcctacccctacagccagctggcccagaccaccttctggctgcgggcctacttcagccagcccatggtggccgccgccgtcatcgtgcacctggtgacagatggcacctactacggggaccagaagcaggagaccatctctgtgcagctgctggacaccaaggaccagagccatgacctgggcctgcacgtgctgagctgcaggaacaaccccctcatcatccctgtggtgcatgacctgagccagcccttctaccacagccaggccgtgcgggtgtccttcagcagccccctggtggccatcagcggcgtggccctgcggagctttgacaactttgatcctgtgaccctgagcagctgccagagaggagagacctacagccctgctgagcagagctgtgtgcactttgcctgtgagaagacagactgcccagagctggccgtggagaatgccagcctgaactgcagcagcagtgaccgctaccacggggcccagtgcaccgtgtcctgcaggacaggctacgtgctgcagatcagaagagatgatgagctgatcaagagccagacaggccccagcgtgacagtgacctgcacagagggcaagtggaacaagcaggtggcctgtgagcctgtggactgcagcatcccagaccaccaccaggtgtatgctgccagcttcagctgcccagagggcaccaccttcggcagccagtgcagcttccagtgccgccacccagcccagctgaagggcaacaacagcctgctgacctgcatggaggatggcctgtggagcttccctgaggccctgtgtgagctgatgtgcctggcccctcctcctgtgcccaatgctgacctgcagacagcccgctgccgggagaacaagcacaaggtgggcagcttctgcaagtacaagtgcaagccaggctaccacgtgcccggcagcagcaggaagagcaagaagagggccttcaagacccagtgcacccaggacggctcctggcaggagggcgcctgtgtgcctgtgacctgtgaccccccaccacccaagttccacggcctgtaccagtgcaccaacggcttccagttcaacagtgaatgtcgcatcaagtgtgaagattctgatgccagccagggcctgggcagcaatgtcatccactgcaggaaggatggcacctggaatggcagcttccacgtgtgccaggagatgcagggccagtgcagcgtgcccaatgagctgaacagcaacctgaagctgcagtgcccagatggctacgccatcggctctgaatgtgccaccagctgcctggaccacaacagcgagagcatcatcctgcccatgaatgtgacagtgcgggacatcccccactggctgaaccccaccagggtggagcgggtggtgtgcacagctggcctgaagtggtacccccacccagccctgatccactgtgtgaagggctgtgagcccttcatgggagacaactactgtgatgccatcaacaacagagccttctgcaactatgatggaggagactgctgcaccagcacagtgaagaccaagaaggtgacccccttccccatgagctgtgacctgcagggcgactgtgcctgccgggacccccaggcccaggagcacagcaggaaggacctgcggggctacagccacggctag

SEQ ID NO: 129880 - DNA, 1701 bp, Artificial Sequence
  derived and/or modified sequence
atggactgcaactatgagcgcttcaactttgatggaggagagtgctgtgaccctgagatcaccaacgtgacccagacctgctttgatcctgacagcccccaccgggcctacctggatgtgaatgagctgaagaacatcctgaagctggatggcagcacccacctgaacatcttctttgccaagagcagcgaggaggagctggccggcgtggccacctggccctgggacaaggaggccctgatgcacctggatgatgactgcacagacagcttcacccccaaccaggtggccaggatgcactgctacctggacctggtgtaccagggctggcagcccagcaggaagccagcccctgtggccctggccccccaggtgctgggccacaccacagacagcgtgaccctggagtggttcccccccattgatggccacttctttgagcgggagctgggcagcgcctgccacctgtgcctggagggccgcatcctggtgcagtatgccagcaatgccagcagccccatgccctgcagccccagcggccactggagcccccgggaggccgagggccacccagatgtggagcagccctgcaagagctctgtgaggacctggagccccaacagcgctgtgaacccccacacagtgcccccagcctgcccagagccccagggctgctacctggagctggagttcctgtaccccctggtgcctgagagcctgaccatctgggtgacctttgtgtccacagactgggacagcagcggggctgtgaatgacatcaagctgctggccgtgtctgggaagaacatcagcctgggcccccagaatgtgttctgtgatgtgcccctgaccatccggctgtgggatgtgggggaggaggtgtatggcatccagatctacaccctggatgagcacctggagattgatgctgccatgctgaccagcacagctgacacccccctgtgcctgcagtgcaagcccctgaagtacaaggtggtgcgggacccccccctgcagatggatgtggccagcatcctgcacctgaacaggaagtttgtggacatggacctgaacctgggctctgtgtaccagtactgggtgatcaccatctctggaacagaggagagcgagcccagccctgctgtgacctacatccacggcagcggctactgtggagatggcatcatccagaaggaccagggcgagcagtgtgatgacatgaacaagatcaatggagatggctgcagcctcttctgccggcaggaggtgtccttcaactgcattgatgagcccagccgctgctacttccatgatggagatggagtgtgtgaggagtttgagcagaagaccagcatcaaggactgtggggtgtacaccccccagggcttcctggaccagtgggccagcaatgcctctgtgagccaccaggaccagcagtgccccggctgggtgatcatcggccagcctgctgccagccaggtgtgcaggaccaaggtgattgacctgtctgagggcatcagcgcctgcctggtgcccctgcaccaccagctgcccatcttccctgctggcagtgaccacttcctggcccctggggtcttcttcagcaccaacggctgccgcagctgccactgccccccaggagatggctgggacatcctgtggggccccaaggccggggaccaccagagagctgctgcctag

SEQ ID NO: 129881 - DNA, 1998 bp, Artificial Sequence
  derived and/or modified sequence
atgaacaagatcaatggagatggctgcagcctcttctgccggcaggaggtgtccttcaactgcattgatgagcccagccgctgctacttccatgatggagatggagtgtgtgaggagtttgagcagaagaccagcatcaaggactgtggggtgtacaccccccagggcttcctggaccagtgggccagcaatgcctctgtgagccaccaggaccagcagtgccccggctgggtgatcatcggccagcctgctgccagccaggtgtgcaggaccaaggtgattgacctgtctgagggcatcagccagcacgcctggtacccctgcaccatctcctacccctacagccagctggcccagaccaccttctggctgcgggcctacttcagccagcccatggtggccgccgccgtcatcgtgcacctggtgacagatggcacctactacggggaccagaagcaggagaccatctctgtgcagctgctggacaccaaggaccagagccatgacctgggcctgcacgtgctgagctgcaggaacaaccccctcatcatccctgtggtgcatgacctgagccagcccttctaccacagccaggccgtgcgggtgtccttcagcagccccctggtggccatcagcggcgtggccctgcggagctttgacaactttgatcctgtgaccctgagcagctgccagagaggagagacctacagccctgctgagcagagctgtgtgcactttgcctgtgagaagacagactgcccagagctggccgtggagaatgccagcctgaactgcagcagcagtgaccgctaccacggggcccagtgcaccgtgtcctgcaggacaggctacgtgctgcagatcagaagagatgatgagctgatcaagagccagacaggccccagcgtgacagtgacctgcacagagggcaagtggaacaagcaggtggcctgtgagcctgtggactgcagcatcccagaccaccaccaggtgtatgctgccagcttcagctgcccagagggcaccaccttcggcagccagtgcagcttccagtgccgccacccagcccagctgaagggcaacaacagcctgctgacctgcatggaggatggcctgtggagcttccctgaggccctgtgtgagctgatgtgcctggcccctcctcctgtgcccaatgctgacctgcagacagcccgctgccgggagaacaagcacaaggtgggcagcttctgcaagtacaagtgcaagccaggctaccacgtgcccggcagcagcaggaagagcaagaagagggccttcaagacccagtgcacccaggacggctcctggcaggagggcgcctgtgtgcctgtgacctgtgaccccccaccacccaagttccacggcctgtaccagtgcaccaacggcttccagttcaacagtgaatgtcgcatcaagtgtgaagattctgatgccagccagggcctgggcagcaatgtcatccactgcaggaaggatggcacctggaatggcagcttccacgtgtgccaggagatgcagggccagtgcagcgtgcccaatgagctgaacagcaacctgaagctgcagtgcccagatggctacgccatcggctctgaatgtgccaccagctgcctggaccacaacagcgagagcatcatcctgcccatgaatgtgacagtgcgggacatcccccactggctgaaccccaccagggtggagcgggtggtgtgcacagctggcctgaagtggtacccccacccagccctgatccactgtgtgaagggctgtgagcccttcatgggagacaactactgtgatgccatcaacaacagagccttctgcaactatgatggaggagactgctgcaccagcacagtgaagaccaagaaggtgacccccttccccatgagctgtgacctgcagggcgactgtgcctgccgggacccccaggcccaggagcacagcaggaaggacctgcggggctacagccacggctag

SEQ ID NO: 129882 - DNA, 4884 bp, Artificial Sequence
  derived and/or modified sequence
atgcggctgtggagctgggtgctgcacctgggcctgctgagcgccgccctgggttgcgggttggcagagaggccccggcgagcacggcgcgatcctagggccgggagacccccaagaccggctgccggaccagcgacctgtgccaccagggctgcacggggaagacgcgcttcgcctcccccccccccccctccaggcggggcctgggaagcagtccgagtcccaaggagaagacaacagcgggaggccaggggagcaaccgaagagccttccccgccttcccgcgccttgtactttagtggcagaggtgaacagctgaggctgcgggccgatctggagctacctcgcgatgccttcacactacaggtgtggctgcgggcggaggggggacaaagatcaccggctgtgataacaggattgtacgacaagtgctcttatatctcaagagatcgtggctgggtggtggggattcatacgattagcgatcaagacaacaaggatcccaggtatttttttagccttaaaactgaccgtgcacgtcaggttacgacgatcaacgctcatagatcctacctgccaggccaatgggtgtatctcgctgccacctatgacggccagtttatgaaactgtacgtgaatggagcccaggtagctacgtccggggagcaagttggcggaattttctcccctctaacccagaaatgtaaggtgctgatgttaggaggttccgcactcaatcacaactacaggggttatattgagcatttcagtctatggaaggtggctcgtacccagcgcgagattctctccgacatggaaacccatggcgctcacacggctctcccccaactgctcctgcaggagaattgggacaacgtgaagcatgcatggtcccctatgaaggacggatcatctcctaaggtggagttttccaatgcccatggtttcctgttggacacttcactggagcctccactttgtggccagacgctctgtgacaataccgaagttatcgccagttacaatcagctgagctcttttagacaacctaaagtggtgcgctatagagtcgtgaacctctatgaagatgaccacaagaacccgaccgtcacgagggagcaagtggattttcaacatcaccagttagcagaagcattcaaacagtataatatctcatgggaattggacgtgcttgaggtctctaactcttccctgcggcgacggttgatcctggccaactgtgacatttcaaagataggagatgagaactgcgacccggaatgtaaccacactctcaccggccacgatggaggggattgccgacacctgcggcaccctgctttcgtcaagaaacagcataacggagtgtgtgacatggattgtaattacgagcgtttcaatttcgacggcggcgaatgctgcgacccagagattacaaacgtcacccagacatgcttcgatccggactcaccacatagggcttatcttgacgtgaacgagctcaagaacatcttgaagctcgatggctccacccacttgaacatcttcttcgccaagtcttccgaagaagagctcgctggtgtggcgacctggccatgggacaaggaggcactcatgcacctgggcggaatcgtgctgaacccctccttttacggcatgccgggacacacccataccatgattcatgaaataggccattcactggggctctaccatgtttttagagggatcagcgaaattcaatcctgcagcgatccgtgtatggaaaccgagcctagttttgagaccggtgatctttgcaatgatactaatcctgctccgaaacacaagtcttgcggagatcccggccccgggaatgatacctgtggctttcactcatttttcaataccccttataacaatttcatgtcttatgcggatgatgactgtaccgattcctttacccccaatcaggtcgcccggatgcactgttatcttgacctagtctaccaggggtggcagccgtctcgcaagccggcccccgtggctctggccccacaggtcctgggccacacaacagactcagtcactctcgaatggttcccaccgatcgacggacacttttttgaacgggaattggggtcagcctgtcatctgtgtttggaaggccggattctggtccagtatgcctctaatgcttcatcccccatgccttgcagcccttccgggcactggtctccgcgcgaggccgaaggacaccctgacgtggagcaaccatgcaaatcctccgttcggacctggagccccaacagcgctgtcaacccccacacggtcccccccgcttgccccgagccacaggggtgctatctggaactcgagttcctgtatccactggttcccgaaagcctcacgatttgggtgacttttgtgagtacagattgggatagctctggggcagtgaatgatatcaagctgctagcagtaagcggtaagaacatctccttaggtccccagaacgtgttttgcgacgtgccattaaccattaggctctgggacgtgggggaggaggtctatggcatccagatctacactctcgacgaacatctggagattgacgcagccatgctgacatccaccgccgatacccctctatgcttgcagtgtaagccccttaagtacaaggtggtcagggaccctcctttacagatggacgtcgcttccattttacacttgaatcgcaagttcgtggacatggacctgaatttgggctctgtctatcagtattgggtgattaccatcagcggaactgaggaatctgagccaagccccgccgtcacatatatccacgggagcggctactgtggagatggtattattcagaaggatcaaggagaacagtgtgacgacatgaacaaaatcaatggcgacggctgcagtctcttctgtcgccaagaggtcagttttaactgtatcgatgaaccatctcgctgttacttccacgatggcgacggcgtatgcgaagagttcgaacagaagacaagtataaaagactgtggggtctacacaccccagggatttctggatcagtgggcatcaaatgcgagcgtaagtcaccaagatcagcagtgtccaggatgggtaattatcgggcaacccgccgcatcccaggtttgccgcacaaaagtgattgatctgtctgagggcatttcccagcacgcatggtatccctgcacgatttcttacccctactctcagctggctcagactacgttttggctgagggcctattttagtcagcccatggtggcagcagcggttatcgttcatctggtgaccgacgggacatactacggcgaccaaaaacaggaaaccataagtgtgcagttgcttgacaccaaagaccaatcccatgatctgggtctgcacgtattgtcctgtagaaacaaccctttgatcatccctgtggtgcacgacctgtctcagcccttctatcattcccaagccgtgagagttagcttcagctcgcctcttgtggcaatctcaggcgtcgccctgcggagtttcgataatttcgatcctgtgacacttagcagttgccagcggggcgagacgtattcacctgctgagcagagttgtgtccatttcgcatgcgaaaaaacagattgtcccgaactggcagtggagaacgcctcgcttaattgcagcagctcggacaggtaccacggagctcagtgtactgtcagctgcagaactgggtacgttctgcaaatacgtagggacgacgaacttattaaatcacagaccggcccctccgtaaccgtcacatgcacggaagggaagtggaataaacaggtggcctgcgagcctgttgattgcagcatccccgaccaccaccaggtgtatgctgctagtttctcctgtccagaagggaccacatttggttctcaatgctcctttcagtgccggcatcccgctcagctgaagggtaacaacagcctgctgacttgcatggaggatgggctgtggagttttcctgaagctctttgcgagctcatgtgtctggcacctcccccagtgcccaacgcagaccttcagacagcccggtgccgcgagaacaaacataaagtgggcagtttttgcaagtataaatgcaagccagggtaccatgtacctggctcctcgaggaagagtaaaaaacgagcctttaaaacccagtgcactcaggacgggtcatggcaggaaggcgcctgtgtacccgtcacctgcgaccctccgcccccaaaatttcacggcctgtatcagtgcacaaacggattccaatttaattccgagtgccgaatcaaatgtgaagacagcgatgcctctcagggcctcggatccaatgtgattcattgcagaaaagatgggacctggaacggatccttccatgtatgccaggagatgcaaggccaatgttctgtgccaaacgaactcaactcaaacctgaagcttcagtgtcctgacggatatgccatcgggtctgagtgtgcaacgagttgcctggaccacaactctgagtctatcatcttgccaatgaacgtaacggtgagagacattcctcactggttgaatccaacaagagtcgaaagagtggtgtgtacagctggactgaaatggtatccacatccagcactgatccattgtgtgaaaggatgtgaaccattcatgggtgataactactgcgatgctatcaataatcgggccttttgtaactatgacggcggtgattgttgtacttctaccgtaaaaacgaagaaagtcacacctttccctatgagctgcgacttgcaaggtgactgtgcctgccgggatccccaggcccaggaacattctcgcaaggacctgcgaggctacagtcacggatag

SEQ ID NO: 129883 - DNA, 1701 bp, Artificial Sequence
  derived and/or modified sequence
atggactgcaactacgagcggttcaacttcgacggcggcgagtgctgcgaccctgaaataactaatgtgacccagacttgcttcgatcctgactcaccgcaccgggcttacctcgatgtaaatgagctgaagaacatccttaaattggacgggtcgacccacctgaacattttctttgccaaatcctccgaggaggagctcgccggggtggccacttggccatgggataaggaggctctgatgcatctcgatgatgattgcacagattcgttcacccccaaccaggtagcccggatgcattgttacttggatctagtgtatcagggctggcagccctctcgcaagcccgcccctgtggccctcgccccacaggtgctgggacacacaaccgactctgtaaccctggagtggtttccgcctatagatggacactttttcgagagagagctcggctcagcatgtcatctgtgcttggagggtcgaattcttgtccagtacgccagcaacgcttcatccccaatgccctgctctcctagcggccattggagcccacgcgaggctgaaggacatcccgacgtagagcaaccttgtaagtccagtgtgcgaacatggagccccaatagcgccgtgaacccccacactgtcccccctgcctgccccgaaccacaagggtgctacctggaattagaattcttataccccctggtgcctgaatccctgactatttgggtaactttcgtgtccacagactgggactcaagcggggccgtgaacgatatcaagttactggccgttagcggcaaaaacatcagcctgggaccacagaacgttttttgtgacgtgcctctgaccatccgcctatgggacgttggagaggaggtctatgggatccagatttatactctggacgagcacttagaaatcgatgctgctatgctgacgtccactgctgacactcccctatgcctgcaatgcaagcctcttaagtataaggtagtacgcgacccccctctgcaaatggacgtggcttcaattctgcacctcaacaggaaatttgtggacatggacctcaatctagggagcgtgtatcagtactgggtcattacaatcagtggcacggaggagtccgagccctctccggccgttacctacattcatggctctggttattgtggcgacgggataatacaaaaggaccagggagagcagtgcgatgacatgaacaagatcaacggcgatggttgttcactcttttgcagacaggaggtgagctttaattgcatcgatgagccctcacgatgttacttccacgatggggatggcgtgtgcgaggagtttgagcagaaaacttcaatcaaggattgcggtgtttataccccacagggctttctcgatcaatgggcttccaatgcctcggtctctcaccaggaccaacaatgccccggctgggtcatcataggccagcccgcggcttcccaggtttgcaggacaaaggtcatcgacctgagtgaagggatcagtgcctgtctggtgcccctgcaccatcagctgcctatcttccccgccggatctgaccacttcctggctcccggcgtgtttttcagcactaacgggtgcaggtcctgccactgtccccctggcgacggctgggacatactctggggtcccaaagccggagatcaccagcgcgcagccgcttag

SEQ ID NO: 129884 - DNA, 1998 bp, Artificial Sequence
  derived and/or modified sequence
atgaacaagatcaacggcgacggctgcagcctgttctgccggcaggaggtgtcctttaactgtattgacgaaccatctcgttgttattttcacgacggggatggcgtgtgcgaagaattcgagcagaaaacttcgattaaagactgcggagtctacactccccaaggtttcctggatcagtgggcctccaatgcatccgtatcacaccaagatcaacagtgcccgggctgggtgatcatcggacagcctgctgccagtcaggtatgcaggacaaaggtgatcgatctgtcggaaggaatttcacagcatgcttggtatccttgtacaattagctacccatacagccagctggcgcaaaccaccttttggcttagggcttacttttctcaacctatggtggcagcagccgtgatcgtgcacctcgtgacagatggtacctattacggcgatcagaagcaagagaccatcagcgtgcaactcttggataccaaagaccagtcgcacgaccttggcctccatgttttgtcatgtcgcaacaatcccttgattattcctgttgttcacgatctctcccagcctttttatcattctcaggctgttcgggttagcttcagctcccccctggtcgcgatttctggcgtcgccctccgctcttttgataactttgaccctgtgaccttgtcatcctgccagcgcggagagacttattcacctgctgaacagagctgtgtgcactttgcttgtgaaaagaccgactgccctgagctcgccgttgaaaatgcttcattgaactgttcgagcagcgaccgttaccatggggctcagtgtaccgtatcatgtcggacaggatatgtcctccagatcaggagggatgacgagctgattaaatctcagaccggcccctcagtcactgtgacatgcactgaagggaaatggaataagcaagttgcctgcgaacccgtagattgctccataccagaccaccatcaggtatacgccgcatcttttagttgtccagaaggcaccacgtttgggtcccaatgcagcttccagtgtcgacaccccgcccagctcaagggaaacaacagcctcctgacgtgcatggaagatggcttatggtctttccccgaagcactgtgcgaacttatgtgtctggcccctccgcctgtgcccaacgccgatctgcaaacagccagatgccgagagaacaagcacaaagtcggctcgttttgcaagtacaaatgcaagccaggataccatgttcccggatcttcccgaaaatctaagaagcgggctttcaaaacccagtgtacgcaggatgggtcatggcaggagggtgcctgtgtccctgttacatgcgatccacctcccccgaaattccatgggctttaccagtgtacgaacgggttccagttcaatagtgaatgtcggatcaagtgtgaggattctgatgcttctcagggcctcgggtctaacgtcatccattgtcgcaaggacgggacctggaacggatcctttcacgtttgccaagaaatgcaggggcagtgtagcgtgccaaacgaactgaactccaacctgaagctgcaatgtcccgacggctatgcaattgggagcgaatgtgccacgagctgcctggatcataactccgaatccattattctgccaatgaacgtgactgtgcgtgacataccccactggctgaatcctactcgtgtggagagagtcgtgtgcaccgctgggctaaaatggtatccacaccccgccctgattcattgtgtgaagggctgcgaacccttcatgggcgacaactactgcgatgccattaataaccgtgccttctgcaattatgacggcggggattgctgcacaagcacagtgaaaactaagaaagttactcctttcccaatgagctgcgaccttcagggggactgcgcatgccgggatccccaggcccaggaacattctagaaaagatttaagagggtactcccacggctag

SEQ ID NO: 129885 - DNA, 10959 bp, Artificial Sequence
  derived and/or modified sequence
gggggagggaattcagcggatcagtcttaagaggagcttttttttggagcgagaaatcatataaaataaaatgaaataaaacaaggaggaaggcaaccagctgttaggggaaaaataaggcagataaaggagcggggagagaaattaattgccaaccaggaggagttgggctgtatttttcaaaggtggggagagtggagcacacaccttgaggaggaaagcgagaaagaaaagaaaaaagcaagtggaaaggggggctcgcccaagaagggtgaagaagcgaagaaagtcgaggcgccgaggctcccaaagctggcagctccgggtggcggtgcaggggcgaagggggggcggggggaaccgtcggacatgcggctctggagttgggtgctgcacctggggctgctgagcgccgcgctgggctgcgggctggccgagcgtccccgccgggcccggagagacccgcgggccggccgacccccgcgccccgccgccggcccggccacctgcgccacccgggcggcccgcggccgccgcgcctcgccgccgccgccgccgccgccgggcggtgcctgggaagccgtgcgcgtcccccggcggcggcagcagcgggaggcgaggggcgccaccgaggagccgagcccgccgagccgggcgctctatttcagcgggcgaggcgagcagctgcgcctccgggccgacctcgagctgccccgggacgcgttcacgctgcaagtgtggctgcgagcggaggggggccagaggtctccggcagtgatcacagggctgtatgacaaatgttcttatatctcacgtgaccgaggatgggtcgtgggcattcacaccatcagtgaccaagacaacaaagacccacgctactttttctccttgaagacagaccgagcccggcaagtgaccaccatcaatgcccaccgcagctacctcccaggccagtgggtatacctagctgccacctatgatgggcagttcatgaagctctatgtgaatggtgcccaggtggccacctctggggaacaagtgggtggcatattcagcccactgacccagaagtgcaaagtgctcatgttagggggcagtgccctgaatcacaactaccggggctacatcgagcacttcagtctgtggaaggtggccaggactcagcgggagatactgtctgacatggaaacccatggcgcccacactgctctacctcagctcctcctccaggagaactgggacaatgtgaagcatgcctggtcccccatgaaggatggcagcagccccaaagtggaattcagcaatgcccacggctttctgctggacacgagtctggagcctcctctgtgcggacagacattgtgtgacaacacagaggtcattgccagctacaatcagctctcaagtttccgccagcccaaggtggtgcgctaccgcgtggtcaacctctatgaagatgatcataagaacccgacggtgacgcgcgagcaggtggacttccagcaccatcagctggctgaggccttcaagcaatacaacatctcctgggagctggacgtgctggaggtgagcaactcctcccttcgccgccgcctcatcctggccaactgtgacatcagcaagattggggatgagaactgtgaccccgagtgcaaccacacgctgacgggccacgacggcggggattgccgccacctgcgccaccctgccttcgtgaagaagcagcacaacggggtgtgtgacatggactgcaactatgaacggttcaactttgatggtggagagtgctgtgaccctgaaatcaccaatgtcactcagacttgctttgaccccgactctccacacagagcctacttggatgttaatgagctgaagaacattcttaaattggatggatcaacacatctcaatattttctttgcaaaatcctcagaggaggagttggcaggagtagcaacttggccatgggacaaggaggccctgatgcacttaggtggcattgtcttgaacccatctttctatggcatgcctgggcacacccacaccatgatccatgagattggtcacagcctgggcctctatcacgtcttccgaggcatctcagaaatccagtcctgcagtgacccctgcatggagacagagccctccttcgagactggagacctctgcaatgataccaacccagcccctaaacacaagtcctgtggtgacccagggccaggaaatgacacctgtggctttcatagcttcttcaacactccttacaacaacttcatgagctatgcagatgacgactgtacggactccttcacgcccaatcaagtcgccagaatgcactgttacctggacctggtctaccagggctggcagccctccaggaaaccagcgcctgttgccctcgccccccaagttctgggccacacaacggactctgtgacactggagtggttcccacctatagatggccatttctttgaaagagaattgggatcagcatgtcatctttgcctggaagggagaatcctggtgcagtatgcttccaacgcttcctccccaatgccctgcagcccatcaggacactggagccctcgtgaagcagaaggtcatcctgatgttgaacagccctgtaagtccagtgtccgcacctggagcccaaattcagctgtcaacccacacacggttcctccagcctgccctgagcctcaaggctgctacctcgagctggagttcctctaccccttggtccctgagtctctgaccatttgggtgacctttgtctccactgactgggactctagtggagctgtcaatgacatcaaactgttggctgtcagtgggaagaacatctccctgggtcctcagaatgtcttctgtgatgtcccactgaccatcagactctgggacgtgggcgaggaggtgtatggcatccaaatctacacgctggatgagcacctggagatcgatgctgccatgttgacctccactgcagacaccccactctgtctacagtgtaagcccctgaagtataaggtggtccgggaccctcctctccagatggatgtggcctccatcctacatctcaataggaaattcgtagacatggatctaaatcttggcagtgtgtaccagtattgggtcataactatttcaggaactgaagagagtgagccatcacctgctgtcacatacatccatggaagtgggtactgtggcgatggcattatacaaaaagaccaaggtgaacaatgcgacgacatgaataagatcaatggtgatggctgctcccttttctgccgacaagaagtctccttcaattgtattgatgaacccagccggtgctatttccatgatggtgatggggtatgtgaggagtttgaacaaaaaaccagcattaaggactgtggtgtctacacgccccagggattcctggatcagtgggcatccaatgcttcagtatctcatcaagaccagcaatgcccaggctgggtcatcatcggacagccagcagcatcccaggtgtgtcgaaccaaggtgatagatctcagtgaaggcatttcccagcatgcctggtacccttgcaccatcagctacccatattcccagctggctcagaccactttttggctccgggcgtatttttctcaaccaatggttgccgcagctgtcattgtccacctggtgacggatgggacatattatggggaccaaaagcaggagaccatcagcgtgcagctgcttgataccaaagatcagagccacgatctaggcctccatgtcctgagctgcaggaacaatcccctgattatccctgtggtccatgacctcagccagcccttctaccacagccaggcggtacgtgtgagcttcagttcgcccctggtcgccatctcgggggtggccctccgttccttcgacaactttgaccccgtcaccctgagcagctgccagagaggggagacctacagccctgccgagcagagctgcgtgcacttcgcatgtgagaaaactgactgtccagagctggctgtggagaatgcttctctcaattgctccagcagcgaccgctaccacggtgcccagtgtactgtgagctgccggacaggctacgtgctccagatacggcgggatgatgagctgatcaagagccagacgggacccagcgtcacagtgacctgtacagagggcaagtggaataagcaggtggcctgtgagccagtcgactgcagcatcccagatcaccatcaagtctatgctgcctccttctcctgccctgagggcaccacctttggcagtcaatgttccttccagtgccgtcaccctgcacaattgaaaggcaacaacagcctcctgacctgcatggaggatgggctgtggtccttcccagaggccctgtgtgagctcatgtgcctcgctccaccccctgtgcccaatgcagacctccagaccgcccggtgccgagagaataagcacaaggtgggctccttctgcaaatacaaatgcaagcctggataccatgtgcctggatcctctcggaagtcaaagaaacgggccttcaagactcagtgtacccaggatggcagctggcaggagggagcttgtgttcctgtgacctgtgacccacctccaccaaaattccatgggctctaccagtgtactaatggcttccagttcaacagtgagtgtaggatcaagtgtgaagacagtgatgcctcccagggacttgggagcaatgtcattcattgccggaaagatggcacctggaacggctccttccatgtctgccaggagatgcaaggccagtgctcggttccaaacgagctcaacagcaacctcaaactgcagtgccctgatggctatgccatagggtcggagtgtgccacctcgtgcctggaccacaacagcgagtccatcatcctgccaatgaacgtgaccgtgcgtgacatcccccactggctgaaccccacacgggtagagagagttgtctgcactgctggtctcaagtggtatcctcaccctgctctgattcactgtgtcaaaggctgtgagcccttcatgggagacaattattgtgatgccatcaacaaccgagccttttgcaactatgacggtggggattgctgcacctccacagtgaagaccaaaaaggtcaccccattccctatgtcctgtgatctacaaggtgactgtgcttgtcgggacccccaggcccaagaacacagccggaaagacctccggggatacagccatggctaaggaaggacaagaagttgtcaaagaattcccaacgccaggacccacatccctttggtattgatttcacagtcagctgctcaacggaatggcctctccacaccagggatccttagcacccaaccggtctgcctttaattttacccaggaaggactcacattggggcgaatgaaccaagtttcgccatgctggatgatgaaatggattcccatcccaaagtctgagatggattgcatatacagtgtgcagtcccagagcctcctaaaattctagccatttgtcacacaaccacagcaagaaacgtgttctatatctagagtgtgcccatctgtgtttagtacacatgcatgcatacacacccatacaaacatctgtgtgagggcagttctggagatgagcagagagagaccggaataaactcaatcttttctttcccaagctcctagccaacactatccttgggagaaagaaatttgcagaaactgctaagaccaagtgtggagatgtcaagctagttcacactctgaggctcagaatatgtaggacatgcacaattgtgcagtcctttgggattggaagtgaaacagtctgtgatcccctaccttctagggaactaggacctaggaagaggtaaagattatcaggtatgcaaagcgccccaattcttctgctgccatgggggattttaccccaactccagggttcgaggccaatctgagaatggcttaggattgcaatgtcaaggtattatatcagccccttgcttgaggcttgaggtcataatatccctctaggacttacctgttcccccagatcttgccttgggaccacatttgctgctacttttcctgctgctctatcctatacattgaataatccaagatggtagaactaggttaggaaaaattccacacaaccaaacagtctgccttaaaagtgacccacatttttccatagctcctcactttttagcccttctgcaagagaaaaaccctcatgggtccacatggtgagaagttaagtttcctgtaagtgggcctctcaccctggaaaggagttgagggacatcagatgctggaaccctcactgaaagtccagaatgtctaagccagtgttagattttgtaaacaagtggaacagtgttaaatttctatgatgttggagccatccagagactactggaattgtcgagacttttggattattatccttatccttatcctaatcttcctagcccttcaggctagagtaggctttgatcctgagaaccttgctgttgctctgaggagatataattctgggagaaagaatcttttataagaacagtacagattgttctcaagagggccatcagaaggaagccaaagagttcacagcctcagcaccaacaactcaacatggtcatcatgttttctatatggtttttccagctagcagtactcccttccatacctgtgactgggcagtgcttttctctctcccatgtctagcctccaaaagttaagtgaaaattagtcaactgcacgtggaagcccccaccactttggggatctctttatttcttttcagccagggacctgtccactccctttgaattaatatgggaagaaattaatacaggatgaactggagagaagggttgagtgtggcatactttctgaaacctggagctgggaattgcggagaagggaaggtctagactagttacatcacatagggattactgtaaatcaagtcatctcaagtctagtgaagacagccaacagaaacaaaacctagcatagggatagaaaataccatgcacgtgtgcagccccacctaattcctgcatccaaggcaggtgttgttaatctatcatagcacttaaaaaaaaaaaaaaaaagagaccaaaaataactttaggaaccaccatattatatcactcccaatagcactgacctggtgatcaaaaacacttgagaagacatctattggccatctctggccaattacactaagaaacatatcaaggtgcttttggcacaggtgcccacaaatacggatgcagtgctgagatagtttatgagacttgtaccatttcacaaactctgaaattgggttccatattggcaaggctgccacagttgttaagaataatcctctatgtttcttcctcacaaaaccatatctcatttatatccagaccattacttcactataattacaaggacaaattattagcaagaaataagaatagtattagaagaattgatcctattttgaacccctctccagtatcttcacactcttgtcaactctccaggcctctctcttgccctgagttatcagcctgtgtggtgttaactaccttagaaggtacaagctaagaaatgtaacagtatcaaccctcccagttgcttaattatacccataggtaatacaaaaagctctgaagacccaaagatgacattactaatgatgtgatttcaggagccacagaagaaccttaccagcttccctcaaatcagtccttatcctctttctatcttcactcccatcatcatctattttcacactatccagctaagcaaagattcctggaggctgacttgtatcttcagactcacagagtgaattcagctcttctgaatcaagacccacccagtctctttcattcagacctgttgctaacaaatttatatttgccaaggatattaggcaaaagaggctacttgattggtggccaacctcgtgcccacatggaaggtatctttaatagggtcttttcaaaccttagtggaggagggtcagctcaatttgggcaatgcatttgttcccagtttcattttcttcctgggaattaactcgtcatttcattccttcagtcatcttctgtgtaggtgaccggagcactgagaggcagctctgatgcactattgtgtgtcagcagctcaaaggccctaaaacactgaaggttctgcatctgaagtattagattgttagcagcaaaatatgaaagatgaggtggacagtcctctaagccctatttagggaagcttttccaagccacaatcttaactacctacccaaaggatttgcattacccccagattctgtgccaacaaccttttaaggaaatacagtccttgggaaatgagttttgatggtgaattggggtgttaaggaagggaaagattgtcatagatggtagggctttgaaaatgcagggtatcagctgccactcctggcttcaacacattgagtcactgcctagacggttctcttggtcttattcccatcctggccaatgcttaaatactatttgttgaaaataattctttgagacagatttcagctacctcccttccaggttcgatttaacttggttgtaattgtcaatttgttgttataggtcttacctgtgtgaaagaaagaaaaagaaagaaagaaagaaagagaaaggaaattataaggtcaagttaacagttttgaggttttgtgtttttttctggaactacttcaagtgagaaaataaaaaaaaatggtgacaaagctgtacagatagagataatagaagacaaagagattaaaaggaaataaaaatgcatgattaaaaactaagaataaaaaacctatttttatgtttcctaaaggaaattgtttattctacagcctcagtaggtagacacaaacataaagatttccctagaagacatagagtgggatttgataacactgtctgttattttctgtacattgtggtaggtccaggaaatatgacattttcccccttgatgtgttattgttgttgttgggtggggtgggcattttgtttatttgtttggtggcaatcagtggtagtagggagtgggagggcttatattggtttttccagctattaaggggacatattgtgtcgttgtgcttttcacgttataaaatgtttatatttaccagtacagcactgggctttataaagactgcactcagaaccacactgcacagtccagttttttaaaaagctgctacatgacagacaggtaatcccactgagtgagttttgagaaacaaatcaaacgaagtaaacaagaaacataaaaaccaaatagcaaatgaataaaagcctgttcttgtaacttattcaacttttgccaaattcctaccaatcacttgctttttaaaagaaatgtataatagccaaaagagaaattatgtccctgttgtacagaagttagaatttttgactccaggcagcagtttgctcagtgatcttgaacaagttatccaattgcctctacatttgcatcagtttctctagctgcaaaatggggataatactatatacctacctcacagtgggagggcaggagattttgaggccctgaggttttaggtgggctgtgagggccaacgcttgacacaaagtccatgggttattattcaagaatgcacaggcccatcggccttttagaaagacaagacagggagtgcttgtttgatatttcaaggaataaagccggagctcctgaattgtagtccaccttaaaagagagacctgtattggagaatattttatttttttggcaaatttgatcttaccctttaccagttctataatttggttaaaagctgattatgtcctacaatgtcaaagtcagctaactgtcgtctacttaagacttctggtcatttccaacttatagaggaagggagtctctaaaatctcttcttcagaaggcacctcacttctcagacttaaaattccacatcaagtgttccattaaaagaagataaggcattctgagtgcaaacaaatgggggcttcttaaactacacaccagcagtcagtgaggaaaactttgaacaattattgagttgctttcttgggtctctataatcaataacctgtctgcagatatctatctatataaagatattatatataaatataaatttacatatatatgcacatgtatatatagttgtacatatatgtgtgtatatatatacttaaatgtaatatttacaaaataaaactgtgatctcgtctagagaaaatgtattcatattacaaactgctcttccatatttatgtaccatattatacctttttattattgttataattattatgggtatttctaattaatatgatgttgaaacctgtttggcaccttctggaagctaccaaaaaaatgacactccattgaagtgcttaaaagctgttctcataagaattcttctggcctattgtaaaaaagaaaaaaaaaaagaaaaagaagaaagacacaaagaaaataatctaaacaccaaaaactaaacacaattccaatcctttttctgtacctcacgcgcataaatttgctgctcctatttttttttctgtttatgtgtttttatggatctaagttaaatcttttggcaatatataaaaatgtaaatagtaaactttatttattaagaatgtcatcttttttaatttatatttacacaattgttcatctaatttattttttctatacagttttaaatactcagacatattttgctgttcatgatatttttatcctgttctcatggatttgttttcccatactgttttctctgatctcaattacaggttggatctcacaaataataatgtcagagacagaaatattttgccactgttgattactatactttaaagttctatattatgaaaatatataatagcttgtacgcttcag

SEQ ID NO: 129886 - DNA, 2135 bp, Artificial Sequence
  derived and/or modified sequence
aacccgacggtgacgcgcgagcaggtggacttccagcaccatcagctggctgaggccttcaagcaatacaacatctcctgggagctggacgtgctggaggtgagcaactcctcccttcgccgccgcctcatcctggccaactgtgacatcagcaagattggggatgagaactgtgaccccgagtgcaaccacacgctgacgggccacgacggcggggattgccgccacctgcgccaccctgccttcgtgaagaagcagcacaacggggtgtgtgacatggactgcaactatgaacggttcaactttgatggtggagagtgctgtgaccctgaaatcaccaatgtcactcagacttgctttgaccccgactctccacacagagcctacttggatgttaatgagctgaagaacattcttaaattggatggatcaacacatctcaatattttctttgcaaaatcctcagaggaggagttggcaggagtagcaacttggccatgggacaaggaggccctgatgcacttagatgacgactgtacggactccttcacgcccaatcaagtcgccagaatgcactgttacctggacctggtctaccagggctggcagccctccaggaaaccagcgcctgttgccctcgccccccaagttctgggccacacaacggactctgtgacactggagtggttcccacctatagatggccatttctttgaaagagaattgggatcagcatgtcatctttgcctggaagggagaatcctggtgcagtatgcttccaacgcttcctccccaatgccctgcagcccatcaggacactggagccctcgtgaagcagaaggtcatcctgatgttgaacagccctgtaagtccagtgtccgcacctggagcccaaattcagctgtcaacccacacacggttcctccagcctgccctgagcctcaaggctgctacctcgagctggagttcctctaccccttggtccctgagtctctgaccatttgggtgacctttgtctccactgactgggactctagtggagctgtcaatgacatcaaactgttggctgtcagtgggaagaacatctccctgggtcctcagaatgtcttctgtgatgtcccactgaccatcagactctgggacgtgggcgaggaggtgtatggcatccaaatctacacgctggatgagcacctggagatcgatgctgccatgttgacctccactgcagacaccccactctgtctacagtgtaagcccctgaagtataaggtggtccgggaccctcctctccagatggatgtggcctccatcctacatctcaataggaaattcgtagacatggatctaaatcttggcagtgtgtaccagtattgggtcataactatttcaggaactgaagagagtgagccatcacctgctgtcacatacatccatggaagtgggtactgtggcgatggcattatacaaaaagaccaaggtgaacaatgcgacgacatgaataagatcaatggtgatggctgctcccttttctgccgacaagaagtctccttcaattgtattgatgaacccagccggtgctatttccatgatggtgatggggtatgtgaggagtttgaacaaaaaaccagcattaaggactgtggtgtctacacgccccagggattcctggatcagtgggcatccaatgcttcagtatctcatcaagaccagcaatgcccaggctgggtcatcatcggacagccagcagcatcccaggtgtgtcgaaccaaggtgatagatctcagtgaaggcatttccgcatgcctggtacccttgcaccatcagctacccatattcccagctggctcagaccactttttggctccgggcgtatttttctcaaccaatggttgccgcagctgtcattgtccacctggtgacggatgggacatattatggggaccaaaagcaggagaccatcagcgtgcagctgcttgataccaaagatcagagccacgatctaggcctccatgtcctgagctgcaggaacaatcccctgattatccctgtggtccatgacctcagccagcccttctaccacagccaggcggtacgtgtgagcttcagttcgcccctggtcgccatctcgggggtgg

SEQ ID NO: 129887 - DNA, 2342 bp, Artificial Sequence
  derived and/or modified sequence
accaatgtcactcagacttgctttgaccccgactctccacacagggatctaaatcttggcagtgtgtaccagtattgggtcataactatttcaggaactgaagagagtgagccatcacctgctgtcacatacatccatggaagtgggtactgtggcgatggcattatacaaaaagaccaaggtgaacaatgcgacgacatgaataagatcaatggtgatggctgctcccttttctgccgacaagaagtctccttcaattgtattgatgaacccagccggtgctatttccatgatggtgatggggtatgtgaggagtttgaacaaaaaaccagcattaaggactgtggtgtctacacgccccagggattcctggatcagtgggcatccaatgcttcagtatctcatcaagaccagcaatgcccaggctgggtcatcatcggacagccagcagcatcccaggtgtgtcgaaccaaggtgatagatctcagtgaaggcatttcccagcatgcctggtacccttgcaccatcagctacccatattcccagctggctcagaccactttttggctccgggcgtatttttctcaaccaatggttgccgcagctgtcattgtccacctggtgacggatgggacatattatggggaccaaaagcaggagaccatcagcgtgcagctgcttgataccaaagatcagagccacgatctaggcctccatgtcctgagctgcaggaacaatcccctgattatccctgtggtccatgacctcagccagcccttctaccacagccaggcggtacgtgtgagcttcagttcgcccctggtcgccatctcgggggtggccctccgttccttcgacaactttgaccccgtcaccctgagcagctgccagagaggggagacctacagccctgccgagcagagctgcgtgcacttcgcatgtgagaaaactgactgtccagagctggctgtggagaatgcttctctcaattgctccagcagcgaccgctaccacggtgcccagtgtactgtgagctgccggacaggctacgtgctccagatacggcgggatgatgagctgatcaagagccagacgggacccagcgtcacagtgacctgtacagagggcaagtggaataagcaggtggcctgtgagccagtcgactgcagcatcccagatcaccatcaagtctatgctgcctccttctcctgccctgagggcaccacctttggcagtcaatgttccttccagtgccgtcaccctgcacaattgaaaggcaacaacagcctcctgacctgcatggaggatgggctgtggtccttcccagaggccctgtgtgagctcatgtgcctcgctccaccccctgtgcccaatgcagacctccagaccgcccggtgccgagagaataagcacaaggtgggctccttctgcaaatacaaatgcaagcctggataccatgtgcctggatcctctcggaagtcaaagaaacgggccttcaagactcagtgtacccaggatggcagctggcaggagggagcttgtgttcctgtgacctgtgacccacctccaccaaaattccatgggctctaccagtgtactaatggcttccagttcaacagtgagtgtaggatcaagtgtgaagacagtgatgcctcccagggacttgggagcaatgtcattcattgccggaaagatggcacctggaacggctccttccatgtctgccaggagatgcaaggccagtgctcggttccaaacgagctcaacagcaacctcaaactgcagtgccctgatggctatgccatagggtcggagtgtgccacctcgtgcctggaccacaacagcgagtccatcatcctgccaatgaacgtgaccgtgcgtgacatcccccactggctgaaccccacacgggtagagagagttgtctgcactgctggtctcaagtggtatcctcaccctgctctgattcactgtgtcaaaggctgtgagcccttcatgggagacaattattgtgatgccatcaacaaccgagccttttgcaactatgacggtggggattgctgcacctccacagtgaagaccaaaaaggtcaccccattccctatgtcctgtgatctacaaggtgactgtgcttgtcgggacccccaggcccaagaacacagccggaaagacctccggggatacagccatggctaaggaaggacaagaagttgtcaaagaattcccaacgccaggacccacatccctttggtattgatttcacagtcagctgctcaacggaatggcctctccacaccagggatccttagcacccaaccggtctgcctttaattttacccagg

SEQ ID NO: 129888 - DNA, 4883 bp, Artificial Sequence
  derived and/or modified sequence
atgcggttgtggtcatgggtcctgcaccttggattgctgagtgcagccctcgggtgcggcctggcagagcgtcccaggagggcacggagagatcctcgcgctggtcggccaccaaggcctgcggctggccctgccacttgtgcaactcgcgctgctagagggcgacgagcatctccgcctccacctccgccacctggaggggcttgggaggcagtgcgagtgcctaggcgcaggcaacagcgggaggccagaggcgcaacagaagaaccctccccaccgagtcgggcactgtacttcagtggacggggagagcagctccgactgagagcagatctagaactgccgagggatgcctttacactgcaggtttggttgagggcagagggaggtcagaggtcacccgcagtgataactggtttgtatgacaagtgtagctacatctcccgggataggggctgggttgttggtattcacactatttcagaccaggataacaaggatcccagatacttcttctcgcttaaaaccgatcgggctaggcaggttactacgattaacgctcacagatcatatctacctggacagtgggtgtatttagctgccacttacgacggccaatttatgaagctttacgttaatggggcacaggttgcaacctccggggagcaggtgggcggtatcttcagcccgctcacacagaaatgtaaagtcctgatgctggggggttccgcactcaaccacaactacagggggtacattgagcacttttctctgtggaaggtcgctaggacacagcgagaaattctctcagatatggagacgcacggcgcacacactgccctgcctcagctgctgctacaagagaactgggacaatgtgaaacatgcctggtcacctatgaaggacggctcctctccaaaggttgagttctccaatgcccacggatttttgctggacacctcactggagcctcccctctgcgggcagaccctgtgcgataatacggaggtgattgcctcctataaccaattgagctctttcagacagccaaaggtggttagataccgtgtggtaaacctttacgaagacgatcataaaaaccctaccgttacacgggagcaggttgacttccagcaccaccagctggctgaagctttcaagcaatataatatttcttgggaactagatgtactggaggttagtaactcttccctccgccgaaggctgatacttgctaattgcgatatatctaagattggagatgagaattgtgatcctgagtgtaatcatacccttacaggccacgatggcggagattgccggcatctccggcatccagctttcgtgaagaagcaacataacggagtgtgcgacatggattgtaactatgaaagattcaactttgacggtggcgagtgctgcgaccccgagattactaacgtgacacagacctgctttgatccagactcgccccacagagcctacctggacgtaaacgaacttaagaatatcctgaagctcgacggcagtacccatctaaatattttcttcgcaaaatctagcgaggaggagttggctggtgtcgctacctggccctgggacaaggaagctctcatgcatttgggtggcattgtcctgaatccttctttctatgggatgccaggccacactcataccatgatacatgagatcggtcactccctagggctgtatcacgtgttccggggaataagtgaaatacagagctgctcagacccctgcatggaaactgagccttcctttgaaacgggagacttgtgtaacgacaccaatccagcccctaagcataagtcttgtggagaccccggtccgggaaatgacacatgtgggtttcacagtttttttaacaccccctacaataatttcatgtcttacgccgacgacgactgcacagattcttttactcctaaccaggtcgctaggatgcactgttacctagacctcgtgtaccagggttggcaaccatctaggaaaccagccccagtggccctggcccctcaggtgctcggacatactaccgattccgtcactctcgagtggtttcctccaatcgacgggcacttctttgagcgagaacttggctctgcctgccacctttgccttgaaggcaggatcctggtgcagtatgcaagcaatgccagcagccccatgccatgttcccccagcggacactggagcccaagggaggccgagggccatcccgatgtggaacagccatgcaaatcctccgtgcggacttggagccccaactcggctgtgaacccacacacagttccacctgcttgcccggagccccaaggatgttacttggagctggaattcctgtacccactggtgccagaaagccttacgatttgggtgacttttgtctcaacagactgggattcctccggcgcagttaatgatattaaacttttagctgtgagcggaaagaacatctctcttggacctcagaacgtattctgcgacgtcccactgacgatccgcctttgggacgtgggcgaggaggtctacggaatacaaatatatacactggatgagcacctggaaatcgacgccgcaatgcttaccagtactgccgataccccactgtgccttcagtgcaaacccctaaagtataaagtggtcagagatcctccactacagatggacgttgctagtatcttgcacctgaatagaaaatttgtcgatatggatctaaaccttggaagcgtgtatcagtactgggttattactatctcagggaccgaggaaagtgagccctctcctgccgttacgtacatccacggcagcggctactgtggcgatgggattatccaaaaggaccagggtgaacagtgtgatgacatgaacaagattaacggggacggatgttccctgttctgcagacaggaggtgagttttaactgcatcgatgagccctcaagatgctattttcatgatggcgacggggtttgcgaggaatttgaacagaagacatcaattaaggattgtggagtgtacaccccacagggtttcctggaccagtgggccagcaatgccagcgtgtctcaccaagaccagcaatgtccaggttgggttatcatcgggcagccagctgcaagccaggtctgtcgcaccaaagtcattgatctttccgagggaatttcgcagcacgcatggtacccctgcactattagttatccttattcccagctcgcccagacaaccttttggttaagagcctacttctcccagccaatggtggctgccgcagtaattgtacacctggttactgatgggacctattacggagaccaaaaacaggaaacaatctccgttcaactgctggacactaaagatcagtctcatgacctgggtctacatgtcctctcctgtaggaataatcccttgatcatacccgtcgtgcacgatctcagccagcccttttaccacagccaggctgtgagagtcagcttttcaagccccctcgtagccatttctggagtcgccctccggagtttcgacaactttgatcccgtaacgctgagtagctgtcagaggggcgagacctactcacctgccgagcaatcatgcgtccatttcgcatgtgaaaaaaccgactgccctgagctggccgtggagaacgctagtcttaattgttcctccagcgaccgctatcacggtgctcaatgtacagtctcatgtcgtacaggatatgttctgcaaatccggagagatgatgagctgataaagagtcaaacgggaccttcagtgacagttacgtgtaccgaagggaagtggaataagcaggttgcatgcgagcctgtggactgttctatccctgaccaccatcaggtatacgcagcctctttttcctgcccagaaggcaccacctttggcagccagtgctctttccagtgccgacaccccgctcagctcaaaggtaataactcacttctgacctgcatggaagatggcttatggagtttcccagaagcactgtgtgagttgatgtgtctggctcccccacctgtccccaacgccgaccttcagacggccaggtgcagagagaacaagcacaaggtcggctctttttgcaaatacaaatgtaaacccggatatcacgtcccaggaagttctaggaaatctaagaagcgggcttttaaaacacagtgtacccaggatggttcttggcaggaaggagcatgtgtgcctgttacctgcgacccaccccctcccaagttccacggcctctaccaatgcactaatggtttccaatttaactcggagtgccgcatcaaatgtgaggattcagatgccagtcagggattaggaagcaacgtgattcactgccgcaaagatggcacatggaacggctcattccacgtatgccaggagatgcaggggcagtgctctgtgccaaacgaacttaactctaatctcaaacttcaatgtcccgatggctacgctattggatccgagtgcgcaaccagttgcctggaccataactccgagagcatcatcctcccaatgaatgtcaccgtgagagacataccccactggctcaaccctacccgggtagaacgtgtggtgtgcactgcagggctgaagtggtatccacatcccgctttgatacactgcgtaaaaggctgcgaacctttcatgggtgacaattattgtgacgccatcaataaccgggcattttgcaattacgacggcggagattgctgtactagtacagtgaaaaccaagaaagtgactcctttcccaatgagctgcgacctacagggagattgcgcctgccgcgacccacaagctcaggaacactcccgtaaggatttgcgtggatacagccatggata

SEQ ID NO: 129889 - DNA, 1701 bp, Artificial Sequence
  derived and/or modified sequence
atggactgtaattatgaacgcttcaattttgacgggggagagtgctgtgatcctgagataacgaatgtaacgcagacgtgttttgatccggattcgcctcacagagcctacctggacgtgaacgagctcaaaaatatactgaaactggacggctcgactcacctgaatatattcttcgctaagagttccgaggaggaattggctggggtggcaacctggccatgggacaaagaggcacttatgcaccttgacgatgattgcacggattccttcacacctaaccaagtggctagaatgcactgttacctggacctagtctatcagggatggcagccatctaggaagccagctcctgtggccttggctcctcaggtgctcggccataccacagactctgtgacactggaatggttcccccctattgacggtcactttttcgagagggagctggggtccgcatgccacctctgtcttgaggggagaatactggtccaatatgccagcaatgccagttctccaatgccatgcagcccctcaggacattggtctccaagggaggcagagggccacccggatgtggagcagccatgcaaatcttccgtgaggacatggtccccgaactccgccgtgaatccacatactgtgcccccagcctgcccagagccgcagggttgctacctagagctggagttcttgtatcctttagttccagaaagcctcaccatctgggtaacattcgtttctaccgattgggactcatctggggcagttaacgatataaaactcctggcggtaagtggaaagaatatatcactcggtcctcagaatgtcttctgcgatgtcccactcactattcggctgtgggatgtcggcgaggaagtgtacggcatccagatatacactcttgacgagcacctggagatcgatgccgcaatgctgacctctacggctgacactcccctgtgtctgcagtgcaaacctctgaaatataaggtggtgagggatccacctttgcagatggatgtggcttcaattttgcatctcaaccgcaagttcgtggacatggatttaaatctgggctcagtgtaccagtactgggtaatcacaatttctggtaccgaggagtcggagccttctcccgcagttacatatatacacggcagcgggtattgtggcgacgggatcattcagaaagaccagggggaacaatgtgacgacatgaataaaataaacggggacggctgcagcctgttctgcaggcaggaggtgtcctttaactgcattgatgagcccagtcgctgctacttccatgacggcgatggagtgtgcgaggagttcgagcaaaaaacctctataaaagactgcggagtgtacactccccaaggcttcctggaccagtgggcctcgaacgctagtgtgtcccaccaggatcagcaatgtccgggttgggtgatcataggccagcccgctgcctcccaggtctgccggaccaaggtcatagatctctccgagggaataagtgcttgcctcgtgcctctgcaccaccagctacctattttcccagccggtagtgatcattttcttgctccaggcgtgttttttagtacaaatggctgccggtcctgtcattgcccgcctggggatgggtgggacatcttgtggggacccaaagccggtgaccatcagcgggcagctgcttag

SEQ ID NO: 129890 - DNA, 1998 bp, Artificial Sequence
  derived and/or modified sequence
atgaacaagataaacggagacggctgctctcttttctgtcgacaggaggtcagcttcaattgcatcgatgagccgtcacggtgctatttccatgacggagacggagtttgtgaggagttcgagcagaagacttctattaaggactgcggcgtgtacacacctcagggcttccttgatcagtgggcctctaatgccagcgtttctcatcaggatcaacagtgtcctggctgggttattattgggcagccagctgcctctcaagtctgtcggacgaaggttattgatctgagcgaggggatctctcagcacgcatggtatccttgcacaataagttacccctattcccaactggcccagacaaccttctggctgcgggcttacttcagccagcctatggtagctgcggcagtgattgtccatctcgtgactgatggcacgtattacggagatcagaagcaggagactattagcgtgcagcttctcgacaccaaggaccagagccacgaccttggactgcatgtactgagctgcaggaacaacccactgatcataccggtcgtgcatgacctgtctcagccgttctatcactctcaggcggttcgggtgtctttctcctctcctttggtcgctattagcggagtcgctctgcggtcattcgacaattttgaccccgttacactgagctcatgtcagaggggggagacctacagcccggctgaacagtcttgcgtgcatttcgcatgcgaaaaaacagattgtccggagctggccgtagaaaatgcttccctaaactgtagctcatccgacaggtatcatggcgctcagtgtacagtttcttgcagaacaggctatgtgcttcagatcaggagggatgacgagctgatcaagtcccagactggcccaagtgtaaccgtgacctgcactgaaggcaagtggaacaaacaggtcgcctgcgagcccgttgattgcagtattcccgaccatcatcaagtttacgcagctagtttctcttgtcccgaaggtaccacttttggaagccagtgttccttccagtgtcgtcatcctgctcaacttaagggaaacaatagtctcttaacctgcatggaagacgggctgtggagctttcccgaagctttgtgtgagcttatgtgcctggcgcctcctcccgtgcccaacgcagacctgcagaccgcccgatgtcgtgaaaacaaacataaagttggatcattttgtaagtataaatgcaagcccggatatcatgttccgggaagctcaaggaagagcaaaaagcgagccttcaaaacgcagtgcacacaagacggatcatggcaggagggagcatgcgtgcctgtcacttgtgatcctcccccacccaagttccatggcttgtaccagtgtacaaacggcttccagttcaattccgagtgcagaatcaaatgtgaggacagcgatgcttctcaggggctgggtagtaatgtcatacattgtcgtaaggatggcacatggaatgggagcttccacgtctgccaggagatgcagggtcagtgttccgtccccaatgaattgaacagtaatcttaagctgcagtgtccagacggctatgccatcggaagcgaatgtgccacatcttgtcttgatcacaattctgaatcaatcatcctaccgatgaatgtcaccgtaagggacatcccacactggctgaacccaaccagggtggaaagagtcgtttgtaccgccggtctcaaatggtatccacatcccgctctgattcattgtgtcaagggttgtgaaccctttatgggggataactactgcgatgctataaacaaccgcgctttttgcaattacgacggaggggattgttgcactagtacagtgaaaaccaaaaaggtaaccccttttcctatgtcgtgcgatcttcagggtgattgcgcatgcagggacccgcaggcccaggagcattcgagaaaggatctgcggggttattctcacggatag

SEQ ID NO: 129891 - DNA, 4884 bp, Artificial Sequence
  derived and/or modified sequence
atgagactgtggagctgggtgctgcacctgggcctgctgagcgccgccctgggctgcggcctggccgagagacccagaagagccagaagagaccccagagccggcagaccccccagacccgccgccggccccgccacctgcgccaccagagccgccagaggcagaagagccagccccccccccccccccccccccggcggcgcctgggaggccgtgagagtgcccagaagaagacagcagagagaggccagaggcgccaccgaggagcccagcccccccagcagagccctgtacttcagcggcagaggcgagcagctgagactgagagccgacctggagctgcccagagacgccttcaccctgcaggtgtggctgagagccgagggcggccagagaagccccgccgtgatcaccggcctgtacgacaagtgcagctacatcagcagagacagaggctgggtggtgggcatccacaccatcagcgaccaggacaacaaggaccccagatacttcttcagcctgaagaccgacagagccagacaggtgaccaccatcaacgcccacagaagctacctgcccggccagtgggtgtacctggccgccacctacgacggccagttcatgaagctgtacgtgaacggcgcccaggtggccaccagcggcgagcaggtgggcggcatcttcagccccctgacccagaagtgcaaggtgctgatgctgggcggcagcgccctgaaccacaactacagaggctacatcgagcacttcagcctgtggaaggtggccagaacccagagagagatcctgagcgacatggagacccacggcgcccacaccgccctgccccagctgctgctgcaggagaactgggacaacgtgaagcacgcctggagccccatgaaggacggcagcagccccaaggtggagttcagcaacgcccacggcttcctgctggacaccagcctggagccccccctgtgcggccagaccctgtgcgacaacaccgaggtgatcgccagctacaaccagctgagcagcttcagacagcccaaggtggtgagatacagagtggtgaacctgtacgaggacgaccacaagaaccccaccgtgaccagagagcaggtggacttccagcaccaccagctggccgaggccttcaagcagtacaacatcagctgggagctggacgtgctggaggtgagcaacagcagcctgagaagaagactgatcctggccaactgcgacatcagcaagatcggcgacgagaactgcgaccccgagtgcaaccacaccctgaccggccacgacggcggcgactgcagacacctgagacaccccgccttcgtgaagaagcagcacaacggcgtgtgcgacatggactgcaactacgagagattcaacttcgacggcggcgagtgctgcgaccccgagatcaccaacgtgacccagacctgcttcgaccccgacagcccccacagagcctacctggacgtgaacgagctgaagaacatcctgaagctggacggcagcacccacctgaacatcttcttcgccaagagcagcgaggaggagctggccggcgtggccacctggccctgggacaaggaggccctgatgcacctgggcggcatcgtgctgaaccccagcttctacggcatgcccggccacacccacaccatgatccacgagatcggccacagcctgggcctgtaccacgtgttcagaggcatcagcgagatccagagctgcagcgacccctgcatggagaccgagcccagcttcgagaccggcgacctgtgcaacgacaccaaccccgcccccaagcacaagagctgcggcgaccccggccccggcaacgacacctgcggcttccacagcttcttcaacaccccctacaacaacttcatgagctacgccgacgacgactgcaccgacagcttcacccccaaccaggtggccagaatgcactgctacctggacctggtgtaccagggctggcagcccagcagaaagcccgcccccgtggccctggccccccaggtgctgggccacaccaccgacagcgtgaccctggagtggttcccccccatcgacggccacttcttcgagagagagctgggcagcgcctgccacctgtgcctggagggcagaatcctggtgcagtacgccagcaacgccagcagccccatgccctgcagccccagcggccactggagccccagagaggccgagggccaccccgacgtggagcagccctgcaagagcagcgtgagaacctggagccccaacagcgccgtgaacccccacaccgtgccccccgcctgccccgagccccagggctgctacctggagctggagttcctgtaccccctggtgcccgagagcctgaccatctgggtgaccttcgtgagcaccgactgggacagcagcggcgccgtgaacgacatcaagctgctggccgtgagcggcaagaacatcagcctgggcccccagaacgtgttctgcgacgtgcccctgaccatcagactgtgggacgtgggcgaggaggtgtacggcatccagatctacaccctggacgagcacctggagatcgacgccgccatgctgaccagcaccgccgacacccccctgtgcctgcagtgcaagcccctgaagtacaaggtggtgagagacccccccctgcagatggacgtggccagcatcctgcacctgaacagaaagttcgtggacatggacctgaacctgggcagcgtgtaccagtactgggtgatcaccatcagcggcaccgaggagagcgagcccagccccgccgtgacctacatccacggcagcggctactgcggcgacggcatcatccagaaggaccagggcgagcagtgcgacgacatgaacaagatcaacggcgacggctgcagcctgttctgcagacaggaggtgagcttcaactgcatcgacgagcccagcagatgctacttccacgacggcgacggcgtgtgcgaggagttcgagcagaagaccagcatcaaggactgcggcgtgtacaccccccagggcttcctggaccagtgggccagcaacgccagcgtgagccaccaggaccagcagtgccccggctgggtgatcatcggccagcccgccgccagccaggtgtgcagaaccaaggtgatcgacctgagcgagggcatcagccagcacgcctggtacccctgcaccatcagctacccctacagccagctggcccagaccaccttctggctgagagcctacttcagccagcccatggtggccgccgccgtgatcgtgcacctggtgaccgacggcacctactacggcgaccagaagcaggagaccatcagcgtgcagctgctggacaccaaggaccagagccacgacctgggcctgcacgtgctgagctgcagaaacaaccccctgatcatccccgtggtgcacgacctgagccagcccttctaccacagccaggccgtgagagtgagcttcagcagccccctggtggccatcagcggcgtggccctgagaagcttcgacaacttcgaccccgtgaccctgagcagctgccagagaggcgagacctacagccccgccgagcagagctgcgtgcacttcgcctgcgagaagaccgactgccccgagctggccgtggagaacgccagcctgaactgcagcagcagcgacagataccacggcgcccagtgcaccgtgagctgcagaaccggctacgtgctgcagatcagaagagacgacgagctgatcaagagccagaccggccccagcgtgaccgtgacctgcaccgagggcaagtggaacaagcaggtggcctgcgagcccgtggactgcagcatccccgaccaccaccaggtgtacgccgccagcttcagctgccccgagggcaccaccttcggcagccagtgcagcttccagtgcagacaccccgcccagctgaagggcaacaacagcctgctgacctgcatggaggacggcctgtggagcttccccgaggccctgtgcgagctgatgtgcctggcccccccccccgtgcccaacgccgacctgcagaccgccagatgcagagagaacaagcacaaggtgggcagcttctgcaagtacaagtgcaagcccggctaccacgtgcccggcagcagcagaaagagcaagaagagagccttcaagacccagtgcacccaggacggcagctggcaggagggcgcctgcgtgcccgtgacctgcgacccccccccccccaagttccacggcctgtaccagtgcaccaacggcttccagttcaacagcgagtgcagaatcaagtgcgaggacagcgacgccagccagggcctgggcagcaacgtgatccactgcagaaaggacggcacctggaacggcagcttccacgtgtgccaggagatgcagggccagtgcagcgtgcccaacgagctgaacagcaacctgaagctgcagtgccccgacggctacgccatcggcagcgagtgcgccaccagctgcctggaccacaacagcgagagcatcatcctgcccatgaacgtgaccgtgagagacatcccccactggctgaaccccaccagagtggagagagtggtgtgcaccgccggcctgaagtggtacccccaccccgccctgatccactgcgtgaagggctgcgagcccttcatgggcgacaactactgcgacgccatcaacaacagagccttctgcaactacgacggcggcgactgctgcaccagcaccgtgaagaccaagaaggtgacccccttccccatgagctgcgacctgcagggcgactgcgcctgcagagacccccaggcccaggagcacagcagaaaggacctgagaggctacagccacggctag

SEQ ID NO: 129892 - DNA, 1701 bp, Artificial Sequence
  derived and/or modified sequence
atggactgcaactacgagagattcaacttcgacggcggcgagtgctgcgaccccgagatcaccaacgtgacccagacctgcttcgaccccgacagcccccacagagcctacctggacgtgaacgagctgaagaacatcctgaagctggacggcagcacccacctgaacatcttcttcgccaagagcagcgaggaggagctggccggcgtggccacctggccctgggacaaggaggccctgatgcacctggacgacgactgcaccgacagcttcacccccaaccaggtggccagaatgcactgctacctggacctggtgtaccagggctggcagcccagcagaaagcccgcccccgtggccctggccccccaggtgctgggccacaccaccgacagcgtgaccctggagtggttcccccccatcgacggccacttcttcgagagagagctgggcagcgcctgccacctgtgcctggagggcagaatcctggtgcagtacgccagcaacgccagcagccccatgccctgcagccccagcggccactggagccccagagaggccgagggccaccccgacgtggagcagccctgcaagagcagcgtgagaacctggagccccaacagcgccgtgaacccccacaccgtgccccccgcctgccccgagccccagggctgctacctggagctggagttcctgtaccccctggtgcccgagagcctgaccatctgggtgaccttcgtgagcaccgactgggacagcagcggcgccgtgaacgacatcaagctgctggccgtgagcggcaagaacatcagcctgggcccccagaacgtgttctgcgacgtgcccctgaccatcagactgtgggacgtgggcgaggaggtgtacggcatccagatctacaccctggacgagcacctggagatcgacgccgccatgctgaccagcaccgccgacacccccctgtgcctgcagtgcaagcccctgaagtacaaggtggtgagagacccccccctgcagatggacgtggccagcatcctgcacctgaacagaaagttcgtggacatggacctgaacctgggcagcgtgtaccagtactgggtgatcaccatcagcggcaccgaggagagcgagcccagccccgccgtgacctacatccacggcagcggctactgcggcgacggcatcatccagaaggaccagggcgagcagtgcgacgacatgaacaagatcaacggcgacggctgcagcctgttctgcagacaggaggtgagcttcaactgcatcgacgagcccagcagatgctacttccacgacggcgacggcgtgtgcgaggagttcgagcagaagaccagcatcaaggactgcggcgtgtacaccccccagggcttcctggaccagtgggccagcaacgccagcgtgagccaccaggaccagcagtgccccggctgggtgatcatcggccagcccgccgccagccaggtgtgcagaaccaaggtgatcgacctgagcgagggcatcagcgcctgcctggtgcccctgcaccaccagctgcccatcttccccgccggcagcgaccacttcctggcccccggcgtgttcttcagcaccaacggctgcagaagctgccactgcccccccggcgacggctgggacatcctgtggggccccaaggccggcgaccaccagagagccgccgcctag

SEQ ID NO: 129893 - DNA, 1998 bp, Artificial Sequence
  derived and/or modified sequence
atgaacaagatcaacggcgacggctgcagcctgttctgcagacaggaggtgagcttcaactgcatcgacgagcccagcagatgctacttccacgacggcgacggcgtgtgcgaggagttcgagcagaagaccagcatcaaggactgcggcgtgtacaccccccagggcttcctggaccagtgggccagcaacgccagcgtgagccaccaggaccagcagtgccccggctgggtgatcatcggccagcccgccgccagccaggtgtgcagaaccaaggtgatcgacctgagcgagggcatcagccagcacgcctggtacccctgcaccatcagctacccctacagccagctggcccagaccaccttctggctgagagcctacttcagccagcccatggtggccgccgccgtgatcgtgcacctggtgaccgacggcacctactacggcgaccagaagcaggagaccatcagcgtgcagctgctggacaccaaggaccagagccacgacctgggcctgcacgtgctgagctgcagaaacaaccccctgatcatccccgtggtgcacgacctgagccagcccttctaccacagccaggccgtgagagtgagcttcagcagccccctggtggccatcagcggcgtggccctgagaagcttcgacaacttcgaccccgtgaccctgagcagctgccagagaggcgagacctacagccccgccgagcagagctgcgtgcacttcgcctgcgagaagaccgactgccccgagctggccgtggagaacgccagcctgaactgcagcagcagcgacagataccacggcgcccagtgcaccgtgagctgcagaaccggctacgtgctgcagatcagaagagacgacgagctgatcaagagccagaccggccccagcgtgaccgtgacctgcaccgagggcaagtggaacaagcaggtggcctgcgagcccgtggactgcagcatccccgaccaccaccaggtgtacgccgccagcttcagctgccccgagggcaccaccttcggcagccagtgcagcttccagtgcagacaccccgcccagctgaagggcaacaacagcctgctgacctgcatggaggacggcctgtggagcttccccgaggccctgtgcgagctgatgtgcctggcccccccccccgtgcccaacgccgacctgcagaccgccagatgcagagagaacaagcacaaggtgggcagcttctgcaagtacaagtgcaagcccggctaccacgtgcccggcagcagcagaaagagcaagaagagagccttcaagacccagtgcacccaggacggcagctggcaggagggcgcctgcgtgcccgtgacctgcgacccccccccccccaagttccacggcctgtaccagtgcaccaacggcttccagttcaacagcgagtgcagaatcaagtgcgaggacagcgacgccagccagggcctgggcagcaacgtgatccactgcagaaaggacggcacctggaacggcagcttccacgtgtgccaggagatgcagggccagtgcagcgtgcccaacgagctgaacagcaacctgaagctgcagtgccccgacggctacgccatcggcagcgagtgcgccaccagctgcctggaccacaacagcgagagcatcatcctgcccatgaacgtgaccgtgagagacatcccccactggctgaaccccaccagagtggagagagtggtgtgcaccgccggcctgaagtggtacccccaccccgccctgatccactgcgtgaagggctgcgagcccttcatgggcgacaactactgcgacgccatcaacaacagagccttctgcaactacgacggcggcgactgctgcaccagcaccgtgaagaccaagaaggtgacccccttccccatgagctgcgacctgcagggcgactgcgcctgcagagacccccaggcccaggagcacagcagaaaggacctgagaggctacagccacggctag

SEQ ID NO: 129894 - protein, 578 aa, Artificial Sequence
  derived and/or modified sequence
MDFLLFQFGLCTFKYDYTDSKYITKSFNFYVFPKPFNRSSPDVKFVCQSSSIDFLASQGFDFNKVFRNGIPYLNQEEERQLREQYDEKRSQANGAGALSYVSPNTSKCPVTIPEDQKKFIDQVVEKIEDLLQSEENKNLDLEPCTGFQRKLIYQTLSWKYPKGIHVETLETEKKERYIVISKVDEEERKRREQQKHAKEQEELNDAVGFSRVIHAIANSGKLVIGHNMLLDVMHTVHQFYCPLPADLSEFKEMTTCVFPRLLDTKLMASTQPFKDIINNTSLAELEKRLKETPFNPPKVESAEGFPSYDTASEQLHEAGYDAYITGLCFISMANYLGSFLSPPKIHVSARSKLIEPFFNKLFLMRVMDIPYLNLEGPDLQPKRDHVLHVTFPKEWKTSDLYQLFSAFGNIQISWIDDTSAFVSLSQPEQVKIAVNTSKYAESYRIQTYAEYMGRKQEEKQIKRKWTEDSWKEADSKRLNPQCIPYTLQNHYYRNNSFTAPSTVGKRNLSPSQEEAGLEDGVSGEISDTELEQTDSCAEPLSEGRKKAKKLKRMKKELSPAGSISKNSPATLFEVPDTW

SEQ ID NO: 129895 - protein, 639 aa, Artificial Sequence
  derived and/or modified sequence
MEIIRSNFKSNLHKVYQAIEEADFFAIDGEFSGISDGPSVSALTNGFDTPEERYQKLKKHSMDFLLFQFGLCTFKYDYTDSKYITKSFNFYVFPKPFNRSSPDVKFVCQSSSIDFLASQGFDFNKVFRNGIPYLNQEEERQLREQYDEKRSQANGAGALSYVSPNTSKCPVTIPEDQKKFIDQVVEKIEDLLQSEENKNLDLEPCTGFQRKLIYQTLSWKYPKGIHVETLETEKKERYIVISKVDEEERKRREQQKHAKEQEELNDAVGFSRVIHAIANSGKLVIGHNMLLDVMHTVHQFYCPLPADLSEFKEMTTCVFPRLLDTKLMASTQPFKDIINNTSLAELEKRLKETPFNPPKVESAEGFPSYDTASEQLHEAGYDAYITGLCFISMANYLGSFLSPPKIHVSARSKLIEPFFNKLFLMRVMDIPYLNLEGPDLQPKRDHVLHVTFPKEWKTSDLYQLFSAFGNIQISWIDDTSAFVSLSQPEQVKIAVNTSKYAESYRIQTYAEYMGRKQEEKQIKRKWTEDSWKEADSKRLNPQCIPYTLQNHYYRNNSFTAPSTVGKRNLSPSQEEAGLEDGVSGEISDTELEQTDSCAEPLSEGRKKAKKLKRMKKELSPAGSISKNSPATLFEVPDTW

SEQ ID NO: 129896 - DNA, 1920 bp, Artificial Sequence
  derived and/or modified sequence
atggagattatcaggtccaatttcaagtccaacctccataaagtctatcaggccattgaagaggcggatttcttcgccattgacggtgagttctcaggtattagtgatggtccgagtgttagtgctttgaccaatggatttgacacaccggaagagaggtaccaaaagctgaaaaaacactcaatggactttcttctttttcagttcgggctttgcacttttaagtacgactatacagactccaaatatatcaccaaaagtttcaatttctacgtgtttcctaagccctttaaccgatcatcccccgatgtcaagttcgtctgtcagagtagctctatcgactttctcgcaagccagggctttgatttcaacaaggtttttagaaatggtatcccttatctgaatcaggaagaggaaagacagctcagagaacagtacgacgaaaaacggagccaggcaaatggggctggcgctctctcatatgtatctcccaataccagtaaatgtccagtgaccatcccagaggatcaaaagaagttcatcgaccaagtagtcgagaagattgaagatctgttgcagagtgaggagaataaaaacctcgatctggagccttgtacaggctttcaaaggaagctgatttaccagacgctgtcatggaagtatcctaaggggatacatgtcgagacactggagaccgaaaaaaaagagaggtatattgtgatttcaaaggtggacgaggaagaacgaaagaggagagaacagcagaaacatgccaaggaacaagaagagctgaacgatgctgtcggcttctctcgggtaatccacgcaattgccaactccggtaaacttgtcattggccacaatatgctgctggatgtgatgcacacagtccaccagttctattgtccgctcccagcagatctgtccgagttcaaggaaatgaccacatgcgtgttccctcgtctcctggatacaaaattgatggccagtactcagccgtttaaagatatcataaacaacactagcctggccgagctcgagaaacgacttaaagaaacgccttttaaccctcctaaggttgagagcgccgagggcttcccttcctatgatacggctagcgagcagttgcatgaagccgggtatgatgcgtatatcacagggctctgctttatctccatggccaactatttggggtctttcctgtcaccccctaagatccatgtcagtgcccgttctaagttgatagagcccttctttaataagcttttcctgatgcgcgtcatggacatcccatacctcaatctggagggacccgatctacagcctaaaagggaccacgttctgcacgtgactttcccaaaagaatggaagacgtctgatctctaccagctcttcagcgctttcggtaatattcagatttcttggatagacgatacatctgcgttcgtatcccttagccagcctgaacaggtcaagatcgccgttaatacatccaaatatgccgaaagttaccggattcaaacgtacgccgagtacatgggcagaaagcaggaggaaaaacaaattaaacggaaatggaccgaggacagttggaaagaagcggactctaagcggcttaacccccagtgtataccatatacactgcagaatcattactatagaaataactcatttacagcacccagcacagtgggaaagcgcaacctaagtccaagccaggaagaagccgggcttgaagatggcgtttccggggagatcagcgataccgaactcgagcagaccgatagttgtgcagaacctttgtctgaaggacgtaaaaaagcaaagaagctgaagcgtatgaaaaaggagctgtcaccagctggttcaattagcaagaattccccagccacccttttcgaggtgccagacacctggtag

SEQ ID NO: 129897 - DNA, 1920 bp, Artificial Sequence
  derived and/or modified sequence
atggagatcatccgcagcaacttcaagagcaacctgcacaaggtgtaccaggccatcgaggaggccgacttctttgccattgatggagagttcagcggcatcagtgatggccccagcgtgtctgccctgaccaatggatttgacaccccagaggagcgctaccagaagctgaagaagcacagcatggacttcctgctcttccagtttggcctgtgcaccttcaagtatgactacacagacagcaagtacatcaccaagagcttcaacttctacgtgttccccaagcccttcaacagaagcagcccagatgtgaagtttgtgtgccagagcagcagcattgacttcctggccagccagggctttgacttcaacaaggtgttcagaaatggcatcccctacctgaaccaggaggaggagcggcagctgcgggagcagtatgatgagaagaggagccaggccaacggggccggggccctgtcctatgtgagccccaacaccagcaagtgccctgtgaccatccctgaggaccagaagaagttcatcgaccaggtggtggagaagattgaggacctgctgcagagcgaggagaacaagaacctggacctggagccctgcaccggcttccagaggaagctgatctaccagaccctgtcctggaagtaccccaagggcatccacgtggagaccctggagacagagaagaaggagcgctacatcgtcatcagcaaggtggatgaggaggagaggaagagaagagagcagcagaagcacgccaaggagcaggaggagctgaatgatgctgtgggcttcagcagggtcatccacgccatcgccaacagcggcaagctggtgattggccacaacatgctgctggatgtgatgcacacagtgcaccagttctactgccccctgcctgctgacctgtctgagttcaaggagatgaccacctgtgtgttcccccggctgctggacaccaagctgatggccagcacccagcccttcaaggacatcatcaacaacaccagcctggccgagctggagaagaggctgaaggagacccccttcaacccccccaaggtggagagcgctgagggcttccccagctatgacacagccagcgagcagctgcatgaagctggctatgatgcctacatcaccggcctgtgcttcatctccatggccaactacctgggcagcttcctgagcccccccaagatccacgtgtctgcccggagcaagctgattgagcccttcttcaacaagctgttcctgatgagggtgatggacatcccctacctgaacctggagggccctgacctgcagcccaagagggaccacgtgctgcacgtgaccttccccaaggagtggaagaccagtgacctgtaccagctgttcagcgccttcggcaacatccagatctcctggattgatgacaccagcgcctttgtgtccctgagccagcctgagcaggtgaagattgctgtgaacaccagcaaatatgcagagagctaccgcatccagacctacgccgagtacatgggcaggaagcaggaggagaagcagatcaagaggaagtggacagaggacagctggaaggaggccgacagcaagaggctgaacccccagtgcatcccctacaccctgcagaaccactactacagaaacaacagcttcaccgcccccagcacagtgggcaagaggaacctgagccccagccaggaggaggccggcctggaggatggagtgtctggagagatcagtgacacagagctggagcagacagacagctgtgccgagcccctgtctgagggcaggaagaaggccaagaagctgaagaggatgaagaaggagctgagccctgctggcagcatcagcaagaacagccctgccaccctgtttgaggtgcctgacacctggtag

SEQ ID NO: 129898 - DNA, 1920 bp, Artificial Sequence
  derived and/or modified sequence
atggagatcatccggagcaacttcaagagcaacctgcacaaggtgtaccaggcgattgaggaagccgactttttcgccatcgatggtgagttttctggtattagtgatgggccctctgtgtccgctctgaccaatggctttgatactcccgaggagcggtaccagaagctgaagaaacatagtatggactttctgctgtttcagttcgggctgtgtacctttaagtacgattatacggacagcaagtacataactaagtcatttaacttttatgtgttcccaaaacctttcaatcgcagctcccccgatgttaagttcgtgtgtcagtcatcctctatagacttcctggccagtcagggtttcgacttcaataaagtgtttcgaaacggtatcccctaccttaatcaagaagaggagcggcaactgcgtgagcagtatgacgaaaagcgaagtcaggcgaatggcgccggcgcactgtcttatgttagtcccaataccagcaagtgcccagtcactattcccgaggaccagaaaaaatttatagaccaggtggtagagaagattgaggatttactgcagagtgaggagaacaagaacctggaccttgagccatgtactggattccagaggaaacttatataccagaccctgagctggaaatatcccaagggtatccacgtggaaactctggagactgagaagaaggaacgctacatcgtcatcagcaaggttgacgaggaagagagaaaacggcgggagcaacagaagcatgctaaggaacaagaggagctgaacgacgcggtaggcttctccagggtgattcatgccatagccaatagcggcaaattggtaatcggacacaatatgctgttggacgtgatgcacaccgtacaccaattttactgccctctccctgccgacttgagtgagtttaaggaaatgactacctgtgtcttccctcgtctcctcgacaccaagcttatggcaagcacccagccttttaaagacatcataaataatacctctttagccgagctcgagaaacggctgaaggagactcctttcaacccccctaaagtggagagcgccgaaggatttccaagctatgacaccgccagtgagcagctgcacgaggcgggctacgacgcctacattactggactttgtttcatctccatggccaactacctggggtcgtttctatccccacccaagattcatgtttcagcacgttccaaactgatcgagccttttttcaacaaactgttcctgatgcgggtgatggatattccgtatctgaatctggagggaccagacctacagcccaaaagggaccatgtgctgcacgtgacctttcccaaggaatggaagaccagtgacctatatcagctgttctccgctttcggtaatatccagatcagctggattgacgatacctccgccttcgtctccctatctcagcccgagcaggtgaagattgctgtgaacacatcgaaatacgctgagtcttacagaatacaaacttacgctgaatatatggggagaaagcaggaggagaagcaaataaagcgcaaatggacagaggactcttggaaggaggcggattcgaagaggctcaatccgcagtgcatcccctacaccctgcagaaccattactaccgtaataacagctttacagctccctctacggttggtaagcggaatctgagtccgagccaggaggaggcggggctagaggacggcgtttccggcgaaatcagtgacactgaacttgagcagacggactcatgcgccgagcctctttccgagggacggaaaaaggccaagaaacttaaacggatgaagaaagagctcagtccggcgggatctatctccaagaatagtccagcgaccctgtttgaggtgccagatacatggtag

SEQ ID NO: 129899 - DNA, 2990 bp, Artificial Sequence
  derived and/or modified sequence
gctgtttccggaagtcgcggccggcgtcaccgctgcggctgcctcagctactgccgcagtcgccgcggaattcgattttaagagtaatcttcacaaagtgtaccaggccatagaggaggccgacttcttcgccatcgatggggagttttcaggaatcagtgatggaccttcagtctctgcattaacaaatggttttgacactccagaagagaggtatcagaagcttaaaaagcattccatggactttttgctatttcagtttggcctttgcacttttaagtatgactacacagattcaaagtatataacgaagtcatttaacttctatgttttcccgaaacccttcaatagatcctcaccagatgtcaaatttgtttgtcagagctccagcattgactttctagcaagccagggatttgattttaataaagtttttcgaaatggaattccatatttaaatcaggaagaagaaagacagttaagagagcagtatgatgaaaaacgttcacaggcgaatggtgcaggagctctgtcctatgtatctcctaacacttcaaaatgtcctgtcacgattcctgaggatcaaaagaagtttattgaccaagtggtagagaaaatagaggatttattacaaagtgaagaaaacaagaacttggatttagagccatgtaccgggttccaaagaaaactaatttatcagactttgagctggaagtatccgaaaggcattcatgttgagactttagaaactgaaaagaaggagcgatatatagttatcagcaaagtagatgaagaagaacgcaaaagaagagagcagcagaaacatgccaaagaacaggaggagctgaatgatgctgtgggattttctagagtcattcacgccattgctaattcgggaaaacttgttattggacacaatatgctcttggacgtcatgcacacagttcatcagttctactgccctctgcctgcggacttaagtgagtttaaagagatgacaacatgtgttttccccagactcttggatactaaattgatggccagcacacaaccttttaaggatatcattaacaacacatcccttgcggaattggaaaagcggttaaaagagacacctttcaaccctcctaaagttgaaagtgccgaaggttttccaagttatgacacagcctctgaacaactccacgaggcaggctacgatgcctacatcacagggctgtgcttcatctccatggccaattacctaggttcttttctcagccctccaaaaattcatgtgtctgccagatcaaaactcattgaacctttttttaacaagttatttcttatgagggtcatggatatcccctatctaaacttggaaggaccagacttgcagcctaaacgtgatcatgttctccatgtgacattccccaaagaatggaaaaccagcgacctttaccagcttttcagtgcctttggtaacattcagatatcctggattgatgacacatcagcatttgtttcccttagccagcccgagcaagtaaagattgctgtcaataccagcaaatatgcagaaagctatcggatccaaacctatgctgaatatatggggagaaaacaggaagagaagcagatcaaaagaaagtggactgaagatagctggaaggaggctgacagcaaacggttaaacccccagtgcataccctacaccctgcagaatcactattaccgcaacaatagttttacagctcccagcacagtaggaaagagaaatttgagtcctagtcaagaggaagctggcctggaggacggagtgtcaggggagatttccgacactgagcttgagcagaccgattcctgtgcagagcccctctcagagggaaggaaaaaggccaagaaattaaaaagaatgaagaaggagctttctccagcaggaagcatctcgaagaacagccctgccacactctttgaagttcctgacacatggtaaccaagacctgagggcagcaaaccgctggtgctgtcgctgtgagcaagagccggctggcacatttggaagccgcactgtatttaacttaatcaaatgtggtatgggaggggttggaaaccaagttgtctcctgggggggagaaaacaggttttatttttgtggctgtggttttttcccctttttaatctaactgcctgttgacattgacactcatcacggttgtaggctgtcatgaatgtgtacgtgcttaaccagtgaattccgtgttgctcttgtgaggcctttcctgtcatgacccagtgtgcttaagaacctgcctgatggggagtgtcggctgtgaaatctgcaaaaagagctgacattccagctgctgtgatcatgaatttgggggtgtactgtcctgcctgtgcatcttctcgcactgagattttgaggcagttgcagccctcggttagtctcccagtggaaaaatcggttgtgcctccctgcttcccaccatagctgcctgaaaacatgacgctctcaagcttgtccttccttcaggaagatgtccactcatgcccacccatgagagggcttgccgtatgccctggcctttgggcatatttatgtagagttcctttctcctaagacgtgagtttctcatgggggatgtacgagtaaaaaggttaacttctgttcttatgcgtggcgctgtgttcactttccagagtctctgttcgtttgtttggatggcggtctcggggtacggcagcgtgtgtgcgtacgtgtctgtgtgtgtgtgtgtgtgtgtgtgtgtgtgtgtgtgtgtgtgtgtgtgaaatcgtgcaaatctacaacatgtcccagcccattctccgttgaaacagatcacagcaacgacaaacgctcatggcgctgctttgctccacccgcttcagatagatcattgttagatatttcacatttttgtatggtggaaataaaaatgaaaaatgtatttccaaaagatgaaaattaaaaacattttcatagg

SEQ ID NO: 129900 - DNA, 3077 bp, Artificial Sequence
  derived and/or modified sequence
gcgcgctgtttccggaagtcgcggccggcgtcaccgctgcggctgcctcagctactgccgcagtcgccgcggaattcggcgagtagaaccgctgaggcgggcgcgggcccgggtggggccaaggttccggccactctgcagaatggagataatcaggagcaattttaagagtaatcttcacaaagtgtaccaggccatagaggaggccgacttcttcgccatcgatggggagttttcaggaatcagtgatggaccttcagtctctgcattaacaaatggttttgacactccagaagagaggtatcagaagcttaaaaagcattccatggactttttgctatttcagtttggcctttgcacttttaagtatgactacacagattcaaagtatataacgaagtcatttaacttctatgttttcccgaaacccttcaatagatcctcaccagatgtcaaatttgtttgtcagagctccagcattgactttctagcaagccagggatttgattttaataaagtttttcgaaatggaattccatatttaaatcaggaagaagaaagacagttaagagagcagtatgatgaaaaacgttcacaggcgaatggtgcaggagctctgtcctatgtatctcctaacacttcaaaatgtcctgtcacgattcctgaggatcaaaagaagtttattgaccaagtggtagagaaaatagaggatttattacaaagtgaagaaaacaagaacttggatttagagccatgtaccgggttccaaagaaaactaatttatcagactttgagctggaagtatccgaaaggcattcatgttgagactttagaaactgaaaagaaggagcgatatatagttatcagcaaagtagatgaagaagaacgcaaaagaagagagcagcagaaacatgccaaagaacaggaggagctgaatgatgctgtgggattttctagagtcattcacgccattgctaattcgggaaaacttgttattggacacaatatgctcttggacgtcatgcacacagttcatcagttctactgccctctgcctgcggacttaagtgagtttaaagagatgacaacatgtgttttccccagactcttggatactaaattgatggccagcacacaaccttttaaggatatcattaacaacacatcccttgcggaattggaaaagcggttaaaagagacacctttcaaccctcctaaagttgaaagtgccgaaggttttccaagttatgacacagcctctgaacaactccacgaggcaggctacgatgcctacatcacagggctgtgcttcatctccatggccaattacctaggttcttttctcagccctccaaaaattcatgtgtctgccagatcaaaactcattgaacctttttttaacaagttatttcttatgagggtcatggatatcccctatctaaacttggaaggaccagacttgcagcctaaacgtgatcatgttctccatgtgacattccccaaagaatggaaaaccagcgacctttaccagcttttcagtgcctttggtaacattcagatatcctggattgatgacacatcagcatttgtttcccttagccagcccgagcaagtaaagattgctgtcaataccagcaaatatgcagaaagctatcggatccaaacctatgctgaatatatggggagaaaacaggaagagaagcagatcaaaagaaagtggactgaagatagctggaaggaggctgacagcaaacggttaaacccccagtgcataccctacaccctgcagaatcactattaccgcaacaatagttttacagctcccagcacagtaggaaagagaaatttgagtcctagtcaagaggaagctggcctggaggacggagtgtcaggggagatttccgacactgagcttgagcagaccgattcctgtgcagagcccctctcagagggaaggaaaaaggccaagaaattaaaaagaatgaagaaggagctttctccagcaggaagcatctcgaagaacagccctgccacactctttgaagttcctgacacatggtaaccaagacctgagggcagcaaaccgctggtgctgtcgctgtgagcaagagccggctggcacatttggaagccgcactgtatttaacttaatcaaatgtggtatgggaggggttggaaaccaagttgtctcctgggggggagaaaacaggttttatttttgtggctgtggttttttcccctttttaatctaactgcctgttgacattgacactcatcacggttgtaggctgtcatgaatgtgtacgtgcttaaccagtgaattccgtgttgctcttgtgaggcctttcctgtcatgacccagtgtgcttaagaacctgcctgatggggagtgtcggctgtgaaatctgcaaaaagagctgacattccagctgctgtgatcatgaatttgggggtgtactgtcctgcctgtgcatcttctcgcactgagattttgaggcagttgcagccctcggttagtctcccagtggaaaaatcggttgtgcctccctgcttcccaccatagctgcctgaaaacatgacgctctcaagcttgtccttccttcaggaagatgtccactcatgcccacccatgagagggcttgccgtatgccctggcctttgggcatatttatgtagagttcctttctcctaagacgtgagtttctcatgggggatgtacgagtaaaaaggttaacttctgttcttatgcgtggcgctgtgttcactttccagagtctctgttcgtttgtttggatggcggtctcggggtacggcagcgtgtgtgcgtacgtgtctgtgtgtgtgtgtgtgtgtgtgtgtgtgtgtgtgtgtgtgtgtgtgtgaaatcgtgcaaatctacaacatgtcccagcccattctccgttgaaacagatcacagcaacgacaaacgctcatggcgctgctttgctccacccgcttcagatagatcattgttagatatttcacatttttgtatggtggaaataaaaatgaaaaatgtatttccaaaagatgaaaattaaaaacattttcatagg

SEQ ID NO: 129901 - DNA, 1920 bp, Artificial Sequence
  derived and/or modified sequence
atggaaatcattcggagtaattttaaaagtaatcttcacaaagtttaccaggcgattgaagaggcagatttctttgccatcgacggagaattcagtggcatctcagatgggcctagcgtgagcgccctcacaaatggtttcgacacgcccgaagagaggtaccaaaagctgaaaaagcactcaatggattttttgctttttcaattcggtctatgtacgtttaaatatgattataccgacagcaaatatattaccaaatcttttaatttctatgtgttccctaagcctttcaacaggtcttcccctgatgtgaagtttgtgtgccagtcttcgtctattgacttcctggcctctcaggggttcgactttaataaggtcttccgcaacggcatcccttacctcaatcaagaggaagagcgccagttgcgggagcagtacgacgaaaaaaggagccaggctaatggcgctggcgctctgagttatgtgtcacccaatacgtccaaatgccccgtaacaatccctgaagatcaaaaaaagttcatagatcaggttgtcgaaaagatcgaggatctcctccaaagtgaggagaacaagaatctggacctcgagccttgcactggtttccagagaaaactgatttatcagactcttagctggaaatatccgaaagggatccatgttgagaccctcgagaccgaaaagaaggaaaggtatatcgtcatcagtaaagttgatgaagaagagcgcaaaaggcgcgagcagcagaagcacgccaaggaacaagaggaattgaacgatgcagtcggcttttcacgagtgatacacgccattgccaattctggcaagctagttatcggccacaacatgctgctggacgttatgcacactgtccatcagttctactgtcctttgcccgcagacctgtcagaattcaaggagatgaccacctgcgttttccctcgactgttggacaccaagcttatggctagcacacagccttttaaagacatcattaacaacactagcctggcggaactagagaagaggctcaaagaaacaccgtttaatcccccaaaagtagagagcgcggaagggttccccagctacgacactgccagcgaacaactgcacgaagctggttacgacgcttatataaccggcctctgtttcatcagcatggcaaactatcttggctcctttcttagccccccaaaaatccatgtctcggccaggtcaaagctaatagagccattctttaacaagttgttcctcatgcgtgtgatggacattccttacctgaatcttgaaggcccagacctgcagcccaaacgggatcatgtgctgcatgtgacatttcccaaagagtggaaaactagtgacctgtatcagctcttctccgcttttggtaatattcagattagttggatcgacgacactagcgctttcgtcagcctctcacagcctgagcaagttaaaatagctgttaatacaagtaaatacgcagagagctacagaatccagacctatgccgaatacatgggcagaaaacaggaagagaagcagattaaaagaaagtggaccgaagattcctggaaagaagctgactctaaaagactaaatcctcaatgcatcccttataccttgcaaaaccattattatcgcaataattccttcacagctcctagtacagtcggaaagcgcaatctcagtccaagtcaggaagaagccggactggaagacggcgtgtccggcgagattagcgataccgagctcgaacagacagattcttgtgccgagccactgtctgaagggcgaaagaaagccaagaagctgaaaaggatgaagaaagaactgagccccgctggttccatttcaaagaattcccctgctacattatttgaggtgccggatacctggtag

SEQ ID NO: 129902 - DNA, 1920 bp, Artificial Sequence
  derived and/or modified sequence
atggagatcatcagaagcaacttcaagagcaacctgcacaaggtgtaccaggccatcgaggaggccgacttcttcgccatcgacggcgagttcagcggcatcagcgacggccccagcgtgagcgccctgaccaacggcttcgacacccccgaggagagataccagaagctgaagaagcacagcatggacttcctgctgttccagttcggcctgtgcaccttcaagtacgactacaccgacagcaagtacatcaccaagagcttcaacttctacgtgttccccaagcccttcaacagaagcagccccgacgtgaagttcgtgtgccagagcagcagcatcgacttcctggccagccagggcttcgacttcaacaaggtgttcagaaacggcatcccctacctgaaccaggaggaggagagacagctgagagagcagtacgacgagaagagaagccaggccaacggcgccggcgccctgagctacgtgagccccaacaccagcaagtgccccgtgaccatccccgaggaccagaagaagttcatcgaccaggtggtggagaagatcgaggacctgctgcagagcgaggagaacaagaacctggacctggagccctgcaccggcttccagagaaagctgatctaccagaccctgagctggaagtaccccaagggcatccacgtggagaccctggagaccgagaagaaggagagatacatcgtgatcagcaaggtggacgaggaggagagaaagagaagagagcagcagaagcacgccaaggagcaggaggagctgaacgacgccgtgggcttcagcagagtgatccacgccatcgccaacagcggcaagctggtgatcggccacaacatgctgctggacgtgatgcacaccgtgcaccagttctactgccccctgcccgccgacctgagcgagttcaaggagatgaccacctgcgtgttccccagactgctggacaccaagctgatggccagcacccagcccttcaaggacatcatcaacaacaccagcctggccgagctggagaagagactgaaggagacccccttcaacccccccaaggtggagagcgccgagggcttccccagctacgacaccgccagcgagcagctgcacgaggccggctacgacgcctacatcaccggcctgtgcttcatcagcatggccaactacctgggcagcttcctgagcccccccaagatccacgtgagcgccagaagcaagctgatcgagcccttcttcaacaagctgttcctgatgagagtgatggacatcccctacctgaacctggagggccccgacctgcagcccaagagagaccacgtgctgcacgtgaccttccccaaggagtggaagaccagcgacctgtaccagctgttcagcgccttcggcaacatccagatcagctggatcgacgacaccagcgccttcgtgagcctgagccagcccgagcaggtgaagatcgccgtgaacaccagcaagtacgccgagagctacagaatccagacctacgccgagtacatgggcagaaagcaggaggagaagcagatcaagagaaagtggaccgaggacagctggaaggaggccgacagcaagagactgaacccccagtgcatcccctacaccctgcagaaccactactacagaaacaacagcttcaccgcccccagcaccgtgggcaagagaaacctgagccccagccaggaggaggccggcctggaggacggcgtgagcggcgagatcagcgacaccgagctggagcagaccgacagctgcgccgagcccctgagcgagggcagaaagaaggccaagaagctgaagagaatgaagaaggagctgagccccgccggcagcatcagcaagaacagccccgccaccctgttcgaggtgcccgacacctggtag

SEQ ID NO: 129903 - protein, 430 aa, Artificial Sequence
  derived and/or modified sequence
MDERLLGPPPPGGGRGGLGLVSGEPGGPGEPPGGGDPGGGSGGVPGGRGKQDIGDILQQIMTITDQSLDEAQAKKHALNCHRMKPALFSVLCEIKEKTGLSIRSSQEEEPVDPQLMRLDNMLLAEGVAGPEKGGGSAAAAAAAAASGGGVSPDNSIEHSDYRSKLAQIRHIYHSELEKYEQACNEFTTHVMNLLREQSRTRPVAPKEMERMVSIIHRKFSAIQMQLKQSTCEAVMILRSRFLDARRKRRNFSKQATEVLNEYFYSHLSNPYPSEEAKEELAKKCGITVSQVSNWFGNKRIRYKKNIGKFQEEANIYAVKTAVSVTQGGHSRTSSPTPPSSAGSGGSFNLSGSGDMFLGMPGLNGDSYSASQVESLRHSMGPGGYGDNLGGGQMYSPREMRANGSWQEAVTPSSVTSPTEGPGSVHSDTSN

SEQ ID NO: 129904 - protein, 463 aa, Artificial Sequence
  derived and/or modified sequence
MDERLLGPPPPGGGRGGLGLVSGEPGGPGEPPGGGDPGGGSGGVPGGRGKQDIGDILQQIMTITDQSLDEAQAKKHALNCHRMKPALFSVLCEIKEKTGLSIRSSQEEEPVDPQLMRLDNMLLAEGVAGPEKGGGSAAAAAAAAASGGGVSPDNSIEHSDYRSKLAQIRHIYHSELEKYEQACNEFTTHVMNLLREQSRTRPVAPKEMERMVSIIHRKFSAIQMQLKQSTCEAVMILRSRFLDARRKRRNFSKQATEVLNEYFYSHLSNPYPSEEAKEELAKKCGITVSQVLWRLREELSGKVHASQLGAVVSNWFGNKRIRYKKNIGKFQEEANIYAVKTAVIIAERGPFGVRGTELSLPSLPPQGSGGSFNLSGSGDMFLGMPGLNGDSYSASQVRCPSPLQVESLRHSMGPGGYGDNLGGGQMYSPREMRANGSWQEAVTPSSVTSPTEGPGSVHSDTSN

SEQ ID NO: 129905 - protein, 438 aa, Artificial Sequence
  derived and/or modified sequence
MDERLLGPPPPGGGRGGLGLVSGEPGGPGEPPGGGDPGGGSGGVPGGRGKQDIGDILQQIMTITDQSLDEAQAKKHALNCHRMKPALFSVLCEIKEKTGLSIRSSQEEEPVDPQLMRLDNMLLAEGVAGPEKGGGSAAAAAAAAASGGGVSPDNSIEHSDYRSKLAQIRHIYHSELEKYEQACNEFTTHVMNLLREQSRTRPVAPKEMERMVSIIHRKFSAIQMQLKQSTCEAVMILRSRFLDARRKRRNFSKQATEVLNEYFYSHLSNPYPSEEAKEELAKKCGITVSQVSNWFGNKRIRYKKNIGKFQEEANIYAVKTAVSVTQGGHSRTSSPTPPSSAGSGGSFNLSGSGDMFLGMPGLNGDSYSASQVRCPSPLQVESLRHSMGPGGYGDNLGGGQMYSPREMRANGSWQEAVTPSSVTSPTEGPGSVHSDTSN

SEQ ID NO: 129906 - protein, 443 aa, Artificial Sequence
  derived and/or modified sequence
GAEQGGGLRAPPQLWTNGYWGRPLQAGAGGLGLVSGEPGGPGEPPGGGDPGGGSGGVPGGRGKQDIGDILQQIMTITDQSLDEAQAKKHALNCHRMKPALFSVLCEIKEKTGLSIRSSQEEEPVDPQLMRLDNMLLAEGVAGPEKGGGSAAAAAAAAASGGGVSPDNSIEHSDYRSKLAQIRHIYHSELEKYEQACNEFTTHVMNLLREQSRTRPVAPKEMERMVSIIHRKFSAIQMQLKQSTCEAVMILRSRFLDARRKRRNFSKQATEVLNEYFYSHLSNPYPSEEAKEELAKKCGITVSQVSNWFGNKRIRYKKNIGKFQEEANIYAVKTAVSVTQGGHSRTSSPTPPSSAGSGGSFNLSGSGDMFLGMPGLNGDSYSASQVESLRHSMGPGGYGDNLGGGQMYSPREMRANGSWQEAVTPSSVTSPTEGPGSVHSDTSN

SEQ ID NO: 129907 - protein, 459 aa, Artificial Sequence
  derived and/or modified sequence
MDERLLGPPPPGGGRGGLGLVSGEPGGPGEPPGGGDPGGGSGGVPGGRGKQDIGDILQQIMTITDQSLDEAQAKKHALNCHRMKPALFSVLCEIKEKTGLSIRSSQEEEPVDPQLMRLDNMLLAEGVAGPEKGGGSAAAAAAAAASGGGVSPDNSIEHSDYRSKLAQIRHIYHSELEKYEQACNEFTTHVMNLLREQSRTRPVAPKEMERMVSIIHRKFSAIQMQLKQSTCEAVMILRSRFLDARRKRRNFSKQATEVLNEYFYSHLSNPYPSEEAKEELAKKCGITVSQVLWRLREELSGKVHASQLGAVVSNWFGNKRIRYKKNIGKFQEEANIYAVKTAVSVTQGGHSRTSSPTPPSSAGSGGSFNLSGSGDMFLGMPGLNGDSYSASQVRCPSPLQVESLRHSMGPGGYGDNLGGGQMYSPREMRANGSWQEAVTPSSVTSPTEGPGSVHSDTSN

SEQ ID NO: 129908 - DNA, 3231 bp, Artificial Sequence
  derived and/or modified sequence
ctctctcacacacacccccgcttgggcctcctctctctctccggctccattttctccgccgccgggggccggggtctcctgtggggggcccagccggtatcccaggtctcccttcagtgccggggtgaacccccgggggagccgggagccgggggcagacgggcgggggttggggcggagggagcagcggccccagcgagtttggggggagaagtaaccaggcggggggaggggcggagcagggagggggcctcagggcccccccccagctatggacgaacggctactggggccgccccctccaggcgggggccgggggggcctgggattggtgagtggggagcctgggggccctggcgagcctcccggtggcggagaccccggtgggggtagcgggggggtcccgggaggccgagggaagcaagacatcggggacattctgcagcagataatgaccatcaccgaccagagcctggacgaggcccaggccaagaaacacgccctaaactgccaccgaatgaagcctgctctctttagcgtcctgtgtgaaatcaaggagaaaactggcctcagcattcggagctcccaggaggaggagccggtggacccacagctgatgcgcttggacaacatgcttctggcagagggtgtggctgggcccgagaaagggggcggctcagcagcagcagctgcagccgctgcagcctctggtggtggtgtgtcccctgacaactccatcgaacactcggactatcgcagcaaacttgcccagatccgtcacatataccactcggagctggagaagtatgagcaggcatgtaatgagttcacgacccatgtcatgaacctgctgagggagcagagccgcaccaggcccgtggcccccaaagagatggaacgcatggtgagcatcatccatcgaaagttcagcgccatccagatgcagctgaagcagagcacctgcgaggctgtgatgatcctgcgctcccgtttcctggatgccagacgaaagcgccgtaacttcagcaaacaggccactgaggtcctaaatgagtatttctactcccacctgagtaacccatatcctagtgaggaggccaaggaggagcttgccaagaagtgtggcatcaccgtgtctcaggtctccaactggtttggcaacaagaggattcgctataagaaaaacatcggaaagttccaagaggaggcaaacatctatgctgtcaagaccgccgtgtcagtcacccaggggggccacagccgcaccagctccccgacacccccttcctctgcaggctctggcggctctttcaatctctcaggatctggagacatgtttctggggatgcctgggctcaacggagattcctattctgcttcccaggtggaatcactccgacactcgatggggccagggggctatggggataacctcgggggaggccagatgtacagcccacgggaaatgagggcaaatggcagctggcaagaggctgtgaccccctcttcagtgacatccccaacggagggaccagggagtgttcactctgatacctccaactgatcttgcccctcagggtcacaggggtgggggctctcacaaggcgacttgaagaggacgcaggcttccagaggacaaaccccaatacaggagaagcacaagacagagaagggccaatggggtcatcccctccctaacgagactctctgtgctgggggtgctaattacatggcaggaagaatggggcctctaaggggagtgtggggtctgtctctcccttttttccatctttttcctctctcgctttctttcttacacagaaacatacacataccgagaaacctatttctcagacccctttttctcctctgtctttctctctccctctcccacacctcacacacacatactcccacttgcaactattctgtttctctcctgggctcccccactttcccttccccaccccacttgtatgctctggaatctgtggagacgccagccctgcccaatcagagatgccaaaaatggggacatgacttctggacagaggacatgggccacgcccccatgcatccccacccccgcccctccggacggcttacttacctcatacgcagctcatcttaaaccaatagaatcgctcggtggacgagagtgtctgactcagatatctacctcggagggagtttctgctactttagggaattattgactgggctttggggttgaacttttttttttttaaagaaagaaaaagaaaccctgggatccatctgttttttttgttgttgttgttgtttttgttgttgttggtggtggtggtggtggtggttcttaatttttaatttagtttggggaagtagcttgtttttttttttataaatatgttgatttcttgtctttttttttttttatttcttactttcccatattaggggtgatagccaaaggggttctggtaagagaaagggggacaaacagaactggtaaagaggcccccctggctccaggcctgtccatcaggaagtaaattttacagggcaccaagctttgccccctaaaatcccttaggtgttctttgttcatgcaggcaggtttctgccgcatttgatgtggaggcagtgaagggcttgccctgctggcctctcatcccccttcttcccacaacccttgggcagggctggactcagtaattttgaggaaattgaagatgccatcttcccctgtgagtgacatgtctttaattttttaaaaaactactatttgaaaattggagggggaagaatgggaagggagttattgccaaatatgttaaatatgggttggggtgcttgtatatgtatcttcctcaatttccccataaatgaggtatctttttgtcacaccaaaatcaaggggtagggagagggaggaggttgcaaaaagccagatgtgggggaaaagtaacatcaacactgtcccatcctcagccctgaactagctaccatctgatcccctcagacattctcaggattttacaagactgtcagagtggggaacccctcccattaaagatccgggcaggactggggacaggttggaagtgtgatgggtgggggggtgggaggcatgggccgggggcagttctctcctcacttgtaaacttgtgtagtttcacagaaaaaaaacaaaatgcagttttaaataaagaaatttcttttttccctgggaaaaaaaaaaaaaaaaaa

SEQ ID NO: 129909 - DNA, 1293 bp, Artificial Sequence
  derived and/or modified sequence
atggacgagaggctgctgggaccaccacccccaggaggcggccgggggggtctgggtctggtgagtggcgagcctggaggaccaggtgaacctccagggggcggagacccgggaggggggtcaggcggggtccctgggggacggggtaaacaagacataggggacatcctgcagcaaatcatgacaatcactgaccagtcgctcgatgaggctcaggccaaaaagcatgccctcaattgtcaccggatgaagcccgcccttttctctgtgctatgcgagattaaggagaagactggcctcagtattaggtcatcccaagaggaggagcccgtggacccccagctgatgagactcgacaatatgttattggcggagggcgtcgccggtcccgaaaaaggcggtggctctgccgctgcagccgctgcagcagccgcatccgggggaggagtctctcccgataacagtatagagcattccgactaccgcagtaagctggctcagatccggcatatctaccactccgagctggagaagtatgagcaagcgtgtaacgagttcaccacccacgtcatgaatctcctgagagagcaaagccgcactcggcccgttgcccctaaggagatggagcgcatggtctcaataattcaccgaaagttctcagctatacagatgcagttgaagcagtctacctgcgaagccgtgatgatactgcgctccagatttctagatgcccgcagaaagcgtcgcaatttctcaaagcaggccacagaggtgctgaacgagtacttttacagtcatctgtccaacccttacccctccgaggaggcgaaagaagagctggccaaaaagtgcggtatcactgtgtctcaggtctctaattggttcggcaacaagaggatccgctataagaaaaacatcggaaaattccaagaggaagccaacatctacgctgttaaaactgcagtgagtgtgactcagggagggcactctagaacatcttccccaactccccctagctctgcaggaagtggcggctccttcaacctatctggaagtggcgatatgtttctgggtatgccgggcctgaatggcgatagctatagcgcatcgcaggtggagtctttgaggcattctatggggcctggcgggtacggcgacaatttaggcggcggccagatgtatagcccacgcgagatgcgggcaaacgggtcgtggcaagaagctgtcacaccctctagtgtcacaagtcccactgaaggcccggggagcgtgcactccgacacatctaactag

SEQ ID NO: 129910 - DNA, 1293 bp, Artificial Sequence
  derived and/or modified sequence
atggacgagcggctactgggtcctccacccccaggtggagggcgcggcggccttggactcgtgtcgggagagcccggaggccctggcgaaccacctggcggtggagacccgggcggcggaagcggtggcgtccccgggggcagaggcaagcaggacattggtgatattctgcagcagatcatgacaattacagatcagtccctggacgaggcccaagccaaaaagcatgctttgaactgtcataggatgaagcctgccttgttttccgtcttatgcgagattaaagaaaagactgggctctccatcaggtcgtctcaagaggaagaacccgtagatccccagttgatgaggctcgacaacatgctgttagctgagggagtcgccggcccagaaaagggcggcgggtccgcagctgccgcggctgctgccgcggctagcggagggggggttagcccagataacagcatagagcacagtgactaccgctcaaaactggcgcagatccgtcatatttatcactccgagctcgaaaagtacgagcaggcctgtaacgagtttactacccacgtgatgaatctcttgcgcgagcagagccgtacgcgccccgtcgcacctaaagaaatggagaggatggtgagcatcatacacagaaagtttagcgccattcagatgcagttgaagcagagcacttgtgaggctgtgatgatcttacgctcgcgctttttggatgcgcgtcgcaagaggagaaatttttctaaacaggccacagaagtgctgaatgagtacttctatagtcacttgagcaacccatacccctcagaagaggccaaggaggagctggccaaaaaatgtggtatcactgtctcacaggtgtccaattggtttggcaacaaacgcatccgctataagaaaaatattggcaagttccaagaggaggctaacatctatgcagtgaaaacagcggtcagcgtaacacagggagggcactcacgcactagctctccaacaccaccctcttcagcgggctctggaggaagctttaacttatccgggagcggtgacatgttccttggaatgccgggactgaatggagactcttactctgcctcccaggttgagagcctgaggcactcaatgggaccaggaggctacggagacaacctcgggggagggcagatgtattccccccgagaaatgcgagcaaacggatcttggcaagaggcagttacaccttcctctgtcacatctccgaccgagggcccaggctctgtgcactcagatacatccaattag

SEQ ID NO: 129911 - DNA, 1293 bp, Artificial Sequence
  derived and/or modified sequence
atggacgagcgcctactgggaccacctccccctggcggcgggcgtggtggactaggacttgtgtccggagagccaggcggtccaggcgagccgcccggaggtggcgacccaggaggaggctccgggggggtgccaggcggccgggggaaacaggacattggcgacatactccaacaaatcatgacaatcacggaccagagcctggacgaagcccaagcgaagaagcatgctctcaactgtcaccggatgaagccagcactgttttccgtgttatgtgaaattaaagagaagacggggctgtcaatccgcagttcccaggaggaagagcctgtcgacccacagctgatgaggctggacaacatgttgctggcggagggggtggcaggacccgaaaagggcgggggatcagcagcagctgctgcggccgccgccgcctccggcgggggcgtgtcccccgataactcaatcgaacattccgactatagatctaaactggcccagatccgccacatttaccattctgagctcgaaaagtatgaacaagcatgcaacgagtttaccacacacgtcatgaatttgctgcgcgagcaaagtagaacaaggcccgtggctcccaaggagatggaaagaatggtgagtattattcatcgtaagttttctgccattcagatgcagctcaaacaatcgacttgcgaagcagtgatgatcttgcggagtcggttcctggatgctaggcgtaaacggaggaacttcagcaagcaggctacagaggtgctaaacgagtatttttactcccaccttagtaacccatatccctccgaggaggccaaagaggagctggctaagaagtgtggaatcaccgtgtcacaggtcagcaactggttcggcaataagaggatcagatacaagaaaaacattgggaagtttcaggaggaagctaatatctatgctgtgaaaacggctgtttctgtcacacagggcggccacagtcgcaccagttccccgacccccccaagcagcgcaggttcaggaggaagtttcaacctctccggttctggagacatgttcctggggatgcctgggttaaacggcgatagttatagtgccagtcaagttgagagcctccgacactccatgggcccaggtggatatggcgacaatctgggaggaggccagatgtactcgcccagagagatgcgggctaatggaagttggcaagaggccgttactccatcaagtgtcacaagtcctacagagggacctggatcggtgcatagcgataccagcaattag

SEQ ID NO: 129912 - DNA, 1293 bp, Artificial Sequence
  derived and/or modified sequence
atggacgaaaggctattggggcccccaccaccgggcggaggtagagggggcctgggcctggtgagcggggagcctgggggaccaggagaaccccccgggggaggagatccgggtgggggcagcggaggggtgccaggtggacggggcaagcaggacatcggagatatacttcagcagatcatgaccatcactgatcagagtctggatgaggcccaggctaagaagcacgctttaaattgtcaccgaatgaaaccagccctattcagtgttctgtgcgaaatcaaagaaaaaacaggtctgtccatccggagttctcaggaggaggaacccgtggacccccagctcatgaggctggataacatgctcctcgcagagggcgtcgcgggccccgaaaaaggcggaggaagcgcagcggcagcggccgccgcagccgcttccggaggaggcgtgagccctgataactctatcgagcatagtgactataggtccaagttggcacagatacgccacatttaccattctgagttggagaaatacgaacaggcgtgcaacgaatttacgacacacgttatgaacctgttgcgggagcagagccggacccgcccggttgccccaaaggagatggagcgaatggtgtccataatccaccgcaaattcagcgctatccagatgcagctcaagcagagtacatgcgaagccgtcatgattttgagaagtcggttcctcgatgcccgacggaaacgccgtaacttctcgaagcaagctaccgaagtactcaacgagtatttctacagccacctgagtaatccatatccgagtgaagaggctaaagaggagttagcaaaaaaatgcggaattaccgtctcacaggtatccaattggttcggtaataagcgcatcaggtacaaaaagaacatagggaaattccaggaggaggctaatatttatgccgtgaagaccgccgtttcagtgacccagggaggccacagccggacgtctagcccaactcctccttcttctgccggctcaggcgggagtttcaatctgagcggatctggtgacatgttccttggcatgccagggctgaatggagatagctattccgcatctcaagtggagtctcttcggcacagcatgggaccaggcgggtatggggacaacctgggcggcggacagatgtactcgcctagagagatgagggccaatggatcttggcaagaggctgtcacgccatcatcggtgacatcgccgacagagggccccgggtcagtgcactctgatacatcaaactag

SEQ ID NO: 129913 - DNA, 1293 bp, Artificial Sequence
  derived and/or modified sequence
atggatgagagattgttaggtccacccccccccggcggcgggcgcggtggactgggattagtgtcaggcgagcctgggggacctggcgaacctcctggcgggggggatcccggaggagggtcgggtggcgtgcccggtgggagaggtaagcaggatattggcgacatcctgcagcagatcatgaccatcacagatcagtccttagacgaagcacaggctaaaaaacatgctcttaactgccacagaatgaaacctgcactattctccgtgctgtgcgagatcaaagaaaaaacaggcctgtcaatcagaagcagccaggaggaggaacccgtcgaccctcagctgatgcggttggacaatatgctgttggcggaaggggttgctgggcctgaaaaggggggcggtagcgccgctgccgccgctgctgcagctgcctccggcgggggcgtttccccagacaattcaatcgaacacagcgactatcgcagcaagttggcccagatccgtcatatttatcacagcgagctcgaaaaatacgagcaggcttgtaatgaattcacaacacacgttatgaatctcttacgcgaacaatccagaacaagacccgtggcaccgaaagagatggaaagaatggtctcgatcatacacaggaaattttccgcaattcagatgcaacttaagcagtccacttgtgaggccgtaatgatattgaggtccaggttcctggatgcgagacgcaagagacgtaacttttcgaaacaggccacagaagtgctgaacgagtacttttactcccacctcagcaacccttatccttctgaagaggctaaggaggagctggctaagaaatgtggtataactgtaagccaagtttccaactggtttggtaataagcggattcgctataaaaagaatatagggaagtttcaagaggaggccaacatctacgcagtgaagacggcagtatctgttacccagggtgggcattccagaacatctagcccaactcccccctcttcagcaggcagcggcggctcttttaacctgagtggaagcggcgatatgttcctcggtatgcccggcctgaatggagactcatacagcgcttcacaggttgagagtttgcgccactctatggggccagggggatatggcgacaacctgggcgggggccagatgtactcccctcgcgaaatgagagccaatggtagctggcaagaggccgtcaccccttcttctgtaacgtctcctactgaggggcccggctctgtgcattcagacacaagcaattag

SEQ ID NO: 129914 - DNA, 1293 bp, Artificial Sequence
  derived and/or modified sequence
atggatgaacgccttctggggcccccccctcctggtggcggcaggggaggactgggactggttagcggcgagcctggaggcccaggcgagcctcctggggggggcgatcccggtggtgggagcggcggggttccaggcggccgaggcaagcaagacataggagatatccttcagcagatcatgacaattaccgaccagagcttggatgaggctcaggccaaaaagcacgcactcaactgtcaccgcatgaagccagctcttttctctgtcctgtgtgagatcaaggagaagacgggactctcaataagatcgtctcaggaagaggaacccgtcgatccacagctcatgcgtctcgacaacatgttactggctgaaggagtggcaggacctgaaaagggcggtggcagcgccgctgccgctgcagccgctgctgcttcaggcggcggtgtgtcccctgacaactccatcgaacactccgactaccgtagcaagcttgcgcagattcgccatatctatcactcagaactggagaagtatgagcaggcttgcaatgagtttactacgcacgtgatgaaccttctaagggagcagagtagaacccggcctgtggcccctaaggagatggaacgaatggtgagcatcatccatcggaagttctccgcgatccagatgcagctgaaacagtccacatgcgaagccgtgatgatactgaggtctaggtttcttgacgccagacgcaaacggcgtaactttagtaagcaggctaccgaagtgctgaacgagtacttttacagtcacctttcgaatccttaccctagcgaagaggccaaagaggaactagccaagaagtgcggcatcacagtgagtcaggtatccaactggtttggcaataagcgcattcgctataaaaaaaatatcggcaaattccaagaggaagccaacatctacgccgtgaagactgccgtgagcgtcacccagggggggcactcgcgaacctctagccccaccccaccgagttctgctggaagtggcgggagcttcaacctatctgggtctggcgacatgttcctggggatgcccggtctgaatggggatagctactccgccagtcaagtggagtcgctcagacacagcatgggtccagggggctacggggataatctgggtggaggtcagatgtatagccccagggagatgcgtgccaacggatcttggcaagaagctgttactccatcaagtgtcacatcgcccactgagggcccaggatctgttcattccgacacttccaactag

SEQ ID NO: 129915 - DNA, 1293 bp, Artificial Sequence
  derived and/or modified sequence
atggacgaaaggctcctggggccgccacctcccggaggcggccgaggcggtctaggcctggtatctggagagcccggcggaccgggagaacccccaggcggtggcgatccagggggcggcagtggaggcgtccctggaggcagaggaaaacaggatatcggggatattttacaacaaataatgactattaccgatcaatcgcttgatgaggctcaggccaaaaagcacgccctgaactgccaccgcatgaagccagccctgtttagcgttctgtgcgaaatcaaggagaagaccggtctttcaattcggtcaagccaggaagaggagcccgtggatccccagctcatgcggctggataacatgctattagcagaaggggtggccggtccagagaaaggaggcggatccgccgccgccgcagcagccgcagccgcatcaggtgggggggtcagccctgataattccatagaacattctgactacagatctaaattagctcagatccgccatatctaccacagcgagctggagaagtacgagcaggcgtgtaacgagttcacaacacacgtgatgaacttactacgcgagcagtctaggaccaggcccgttgctcccaaagagatggagaggatggtctccatcattcatcgcaaatttagcgccatccaaatgcaactgaagcagtctacctgtgaggctgttatgattttaagaagccgctttctggatgcacgtcgaaagaggcgaaacttttctaagcaggcgaccgaagtgctgaacgaatacttctactctcacctcagtaacccatacccctccgaagaggcaaaggaagagctagcaaagaaatgtggcatcacagtaagccaggtcagcaactggtttggaaacaagcggatccgctacaaaaagaacatcggaaaatttcaggaagaggccaatatctatgcggtgaaaacagccgtgagcgtcactcagggcggccatagtcggactagctcccccacacccccctccagcgcggggtccggagggagctttaacctcagtggttctggcgatatgtttctcggcatgcctggcctgaatggagatagttactcagcctctcaggtggaatccctccggcactctatgggaccaggaggctacggggacaatttggggggtggacagatgtactcgccccgggagatgagggctaacggttcttggcaggaggccgtcaccccctccagcgtgacctctccaaccgaaggccctgggtcggttcacagcgatacctctaattag

SEQ ID NO: 129916 - DNA, 1392 bp, Artificial Sequence
  derived and/or modified sequence
atggacgagcgcctgctgggcccccccccaccagggggaggcaggggcggacttggactggtgtccggagaacctggtgggcccggggaacctcctggcggaggcgacccaggaggggggagcggaggggtgcctggtggcagaggaaagcaagacatcggtgacatccttcagcagatcatgacgatcactgatcaaagtctggatgaggctcaagcgaagaagcacgccttgaattgtcatcgtatgaagcctgcgctgttttccgttctgtgtgaaattaaggagaagacaggtctgtcgattaggagttcacaggaggaggaacctgttgacccccagctcatgagactcgacaacatgttactggctgagggggttgcaggccctgaaaagggcgggggatcggcagcagccgcagctgcagccgctgccagcggaggaggcgtgagccctgataattcaatcgaacatagtgactacagatcgaaactggctcaaatccgacacatctaccactctgagctggagaagtacgaacaggcttgtaacgaattcacaacacacgtgatgaacctcttgagagagcagtcccgcactcgacctgtggccccaaaagaaatggaacggatggtcagtatcattcatcgaaaattctctgcaattcagatgcagttgaagcagtctacatgcgaggccgtgatgatcttacgatcaagattcctcgatgcaaggagaaaacgtcggaatttctctaaacaggcaacagaggtgctcaacgagtacttttactcgcacttatccaatccctacccgagtgaggaggcaaaagaggagttggctaagaaatgtggcatcacggtttcccaggtcctctggcgactgagagaggagctctccggaaaagtgcatgcatctcaattgggcgcggtcgtttcaaactggttcggcaataagcgaatccgctataagaagaacatcggaaagtttcaggaggaagctaacatttatgccgtgaaaaccgccgtgatcatagccgagcgagggccttttggcgttcggggaacagaattaagtctgccttcgttacctcctcaaggctctgggggcagctttaacctgtccggttccggagacatgttcctgggcatgccaggcctgaatggcgactcctacagtgccagtcaagtcaggtgtcctagccctctgcaggtcgagtcccttaggcactctatgggacccggagggtatggcgataacttgggtggtggtcagatgtactcaccaagggagatgcgagctaatggctcctggcaggaggctgttacaccgtctagcgtcactagccccaccgagggcccaggcagcgtacatagcgacacatcgaattag

SEQ ID NO: 129917 - DNA, 1392 bp, Artificial Sequence
  derived and/or modified sequence
atggacgagaggttactcgggccacctcccccaggcgggggaaggggggggctggggttagtatctggggaacccggcggccctggggaacccccaggaggcggtgatcccggtggggggtccggaggcgttccaggtgggagggggaaacaggatattggcgacatcctccagcagattatgaccattaccgaccagtcactggacgaggcccaagcgaaaaagcatgcacttaattgccatcgtatgaaaccagccctcttctccgtactatgtgagattaaagagaagacaggtctgagcatccgaagctcgcaggaagaggagccggtggatccccaactaatgagattggataacatgcttctggcagaaggcgtggccgggccagaaaagggggggggaagcgctgccgccgccgctgcggcagccgcctcaggtggcggtgtctcgccagataatagcattgagcattcagattatcgctccaaactcgcccaaattagacatatatatcatagtgaactggagaagtatgagcaagcatgtaatgagttcaccacgcatgtgatgaatctgttgcgggagcagagccggacaagaccggtggctcccaaggagatggaaaggatggtcagcataatacaccgaaagttcagcgcgatccagatgcagcttaagcaaagtacatgcgaagccgtgatgatactgagatccagattcctagacgctcgacgaaagcgccgcaacttctctaaacaggccaccgaggttctgaatgagtatttttactcacatttatctaatccgtacccatctgaggaggccaaagaagagcttgcaaaaaagtgcggaatcactgtgagtcaagtgctttggagattaagagaagagctgtcaggaaaggtccacgccagtcaacttggcgccgtcgtgagcaattggttcggaaacaaacgaataagatacaagaaaaatatcggtaagttccaagaggaggccaacatttatgccgtgaagacagccgtcattattgcagaacgcggtcccttcggagtaagaggaactgagctgagcctcccaagtctacctccccagggctccggaggtagtttcaatctttctggttccggagatatgttcctgggaatgcccggccttaacggtgacagctactcagcctctcaggtgcggtgccccagcccgcttcaggtcgaatctctccgacatagcatgggcccaggtggctacggagataacctgggcggaggacagatgtactccccgcgcgagatgagagcaaacggcagttggcaggaagctgtcaccccttcctcagttacaagccctacagaaggacctgggagtgtgcactcagacacatcaaactag

SEQ ID NO: 129918 - DNA, 1317 bp, Artificial Sequence
  derived and/or modified sequence
atggatgaaaggctcctgggtccgcccccaccagggggggggagaggaggacttgggctcgtcagcggcgaacctggcgggccaggcgagccccctggcggcggggacccaggtggtggaagcgggggggtgccagggggaagaggcaagcaggatattggcgatatcctccaacagattatgactataactgatcagagtctggacgaggcacaggctaagaagcacgcacttaactgccaccgaatgaaacccgcgttgtttagcgtgttgtgcgagatcaaagaaaagaccggcctgagcatccggtcttcccaagaagaggagccggtcgacccgcagcttatgaggctggataatatgctgctagccgaaggagtggctgggcctgaaaagggaggtggcagtgccgcggcagcggccgccgcggctgcaagcggtggcggtgtatcccccgataactcgatcgaacattctgactacagaagcaagctcgcacagatcaggcacatctatcattccgagctggagaagtacgaacaagcttgtaatgagttcactacgcacgtgatgaacctgctgcgcgagcaatcgcgaacccggcctgtggcccctaaagaaatggagcgcatggtttccattatccatcgaaaattctccgccattcagatgcaactgaagcagagcacttgcgaggctgtgatgatcctccgcagtaggttcctggatgcccgcaggaagcgtaggaacttcagcaagcaggcaacagaggttcttaatgagtacttctactcccatcttagcaatccatatccctccgaggaggctaaggaagagctggccaagaagtgtggaataacagtgtctcaggtttccaactggttcgggaacaagcggatccgatacaagaaaaatattgggaagtttcaggaggaggctaacatatacgctgtaaagacagcagtctcggtcacacagggaggacactcccgtacttcgtcacccaccccaccttcatcagccggctccggcggctctttcaacctgtctgggtccggcgatatgttcctaggcatgcccggtctgaacggggacagctatagtgcctcccaagtccggtgccccagccctttacaggtggagtcccttcggcacagtatgggtccggggggatacggagataacctcggaggcggccagatgtattcacctcgcgagatgcgggccaatggatcttggcaggaggccgttacccccagcagtgtcacttctccaactgaaggtcccggttcggttcactccgataccagcaattag

SEQ ID NO: 129919 - DNA, 1317 bp, Artificial Sequence
  derived and/or modified sequence
atggacgaacgcctgctgggtccaccaccacccggcggaggccggggtggtttgggactggtctccggcgaacctgggggccccggagaacccccaggcggaggtgacccagggggcggatccggcggtgtgccagggggaaggggaaagcaggatattggagatatcctacaacagattatgactatcacagatcagtcactggacgaggctcaagccaaaaagcatgcattgaattgccacagaatgaagcccgctctgttttcagtactgtgcgaaattaaagaaaaaactggactgtcgattagatcctctcaagaagaggagcccgttgatcctcagttaatgaggctggacaacatgctgctggcggagggcgtggctggccctgagaaaggcggcggaagtgccgccgccgctgcagctgcggccgcaagtggaggaggcgtctctccggacaactctatcgaacattccgattaccgctctaaactggcccagatccgccatatttatcacagtgaactcgagaaatacgaacaagcatgcaatgaatttacaactcacgtaatgaacctgctgagggaacagagccgcactagaccagtcgcccctaaagaaatggaaaggatggtttctattatacatcggaagttcagcgccatccaaatgcagttgaagcagtcgacctgcgaggcagtgatgattttgcgttcacgcttccttgacgcccgaaggaagcgcaggaacttttctaagcaggccaccgaggtactgaacgaatacttttattctcatctaagcaatccgtatccgagtgaagaagcaaaggaagaattagccaaaaagtgtggtattacagtgtcccaagtcagcaattggttcgggaacaagcggatcagatacaaaaaaaacattgggaaatttcaagaggaggcaaacatttatgccgtgaagaccgcagtctccgtgactcagggcggacattctcggacctccagccccacgcctccatcttcagctggctctggcggttcctttaacctcagtgggagcggcgacatgttcctcggcatgcccgggctgaatggggattcctattcagcttcccaggtccgctgtccgtcgccgttgcaagtagagtcactgcggcattccatgggaccaggtggatacggggataatctaggaggcggccaaatgtactcccccagagaaatgagggccaatggcagttggcaggaggcagtgacaccttcttcggttacgagtcctaccgaaggtcccggctccgtccacagtgacactagcaattag

SEQ ID NO: 129920 - DNA, 1392 bp, Artificial Sequence
  derived and/or modified sequence
atggacgaacggctgctgggcccccctcccccgggaggcggtagaggaggactgggccttgtgtcaggcgaaccagggggtcctggcgaaccaccaggaggcggtgatccgggcggcgggtcaggcggtgtgcctggcggacgcggcaagcaggacattggagacatcctccagcaaattatgaccatcactgaccaatctctggacgaagcccaagctaagaaacatgcccttaactgccatagaatgaagcccgcccttttctctgttctctgtgaaatcaaggaaaaaacaggtcttagcattcgaagctcccaagaggaggagcctgtggatccacaactcatgcggctggacaacatgctattggcagaaggagtggcaggccccgagaagggcggtgggagtgccgccgcagcggctgccgcggctgcttctgggggaggagtgtctcccgacaactcaatcgagcatagcgattaccgatctaagttggctcagataagacatatctaccattcagaactcgagaagtacgaacaggcctgcaatgaatttaccacccatgtcatgaacctgctgcgagaacagtcccggacacgtcccgttgccccaaaggagatggagcggatggtctccatcatccaccggaagtttagcgccattcagatgcagctgaagcagtccacctgcgaagcggtcatgatcctccgctcaagattcctggacgcgagacgaaagcggcggaacttctcaaagcaagctactgaggttttaaatgagtacttttattcccacctgagcaacccttacccttccgaagaggccaaggaggaactggccaaaaagtgcggcataaccgtctcacaggtcctgtggcgtctgagggaggagctgagtggtaaggtgcacgccagtcaactgggtgctgtggtaagcaactggttcggaaacaagcgtatccgctataagaaaaatataggaaaatttcaggaagaagctaacatttacgccgttaagaccgccgtgataatagccgaaaggggtcctttcggggtcagaggaaccgagctgagtctgccaagcttgcctccacagggttctggtgggtcttttaacctgtcaggaagtggggatatgtttttgggcatgcccggccttaatggcgactcctatagcgcgagccaagttaggtgcccttctccactgcaggtggaaagcctgaggcactccatgggtcccggcggttacggagacaatctggggggaggccagatgtattcaccacgcgaaatgcgcgccaatggtagttggcaggaggcagtcaccccttcgtccgtcacttccccgacagagggtcctggaagtgtgcactccgacaccagcaattag

SEQ ID NO: 129921 - DNA, 1392 bp, Artificial Sequence
  derived and/or modified sequence
atggatgagagactgctgggtcctcctccccctggaggcgggcgcggaggactgggcctcgtctctggggagcccggtgggcccggggaacctcctggcggtggggaccccggcggtggatcagggggcgtgcctggagggagaggtaagcaggatattggcgatatcctgcagcaaatcatgacaattacagatcaaagcctggacgaggctcaggctaaaaagcacgccctgaattgtcaccggatgaaacccgcactgttctccgttttgtgtgaaattaaagagaagaccggcctctctataaggagctcacaggaggaagagccagttgatccccaactaatgcgcttagacaatatgctactggctgagggagtagcaggacctgagaagggcgggggcagcgctgccgctgccgccgcagccgcagccagtggcggcggggtttctcccgataatagtattgaacatagcgactatcggtccaagctggcccaaatcagacacatttatcattctgagctggaaaagtatgagcaggcttgtaatgagttcaccacccacgtcatgaacctgttacgtgagcaatccagaacccggcctgtggcgccaaaggaaatggagcggatggttagtattatacaccgcaaattctctgcgatccaaatgcagctgaaacagtccacctgtgaggcggtgatgatcctgcgtagccgctttctggacgcccggcggaagcgtaggaacttttcaaagcaggctacagaggtattgaatgaatacttctatagccacctctctaacccatacccgagcgaggaagctaaagaggagttggccaagaaatgcggcatcacagtttcacaggtcctttggagattacgggaggagcttagcggtaaagtacatgcctctcaactaggggctgttgtttccaactggtttggcaataagagaatccgatataagaagaacatcggaaagtttcaggaagaggccaatatttatgccgtgaagaccgccgttataattgcggagaggggcccttttggcgtgagaggcacagagctgtccctgccaagtctgcctccacagggaagcggcggttctttcaacctgtctggatctggcgacatgttccttgggatgcctggcctgaacggtgatagctatagcgcaagtcaggtccgctgtccgagtccactgcaggtcgagtccctgaggcactctatgggcccaggcggatatggagacaacctgggcggcggccagatgtacagtccaagggagatgagagccaatggctcatggcaggaggcggtgacgccgtcaagcgtaacatcacctaccgaggggccgggctcagtccatagcgatacgtcaaactag

SEQ ID NO: 129922 - DNA, 1332 bp, Artificial Sequence
  derived and/or modified sequence
ggggcggagcagggcggtgggctaagagctcccccccagctctggacaaatggctactggggaagacccctccaggccggggccggcggcttgggcttggtctcaggcgaacccgggggtccgggggaaccaccaggcggcggggaccccgggggaggttccggtggcgtgcccggaggcagaggcaagcaggatattggagatattttgcagcagattatgaccatcacagaccagagcctggacgaagcgcaggccaaaaagcacgctctgaactgtcatcggatgaaacccgccttgttcagcgtcctctgtgaaataaaggagaaaaccggactttcaatccgctctagccaggaagaggaaccggttgaccctcaactgatgagactcgataacatgctgctcgctgaaggcgtagcagggccagagaaaggaggaggatcagccgctgctgccgctgccgctgctgctagcggaggcggcgtgtcaccagacaatagcattgaacactcagattataggagtaagctagcgcaaatccggcacatttatcactctgagctggagaaatatgagcaggcgtgtaatgagttcactacacatgtaatgaatctgctccgagagcagtcgcggaccagacccgtggcgcctaaagagatggagcgcatggtgtccatcattcatagaaaattcagtgctatccagatgcagttgaaacagagtacctgtgaagcagtgatgatcctgcggtcacgctttctggatgctaggagaaagcgacgtaatttcagcaaacaggccacagaggtcctcaacgaatacttttactcacacttgtccaacccataccctagcgaagaggctaaagaggaactggccaaaaaatgtggtataacagtgagtcaggtgagtaactggtttggcaataagcgaatccggtacaaaaagaacattggtaagttccaagaggaggccaatatatacgcggtcaaaacggcggtgagcgtaacccaggggggacactcacggacatccagtccaacgcctccttcatctgcgggttcaggcgggtcattcaacctaagcggatctggggatatgttccttgggatgcctggcctcaacggagacagctattctgctagtcaggtggagtcactgcgacactccatggggcctgggggatatggggacaacctaggtgggggccagatgtattcccccagagaaatgagggcgaacgggtcctggcaggaagctgtgacaccaagctccgtgacatctccaaccgaagggccagggagcgtgcatagcgacacaagcaactag

SEQ ID NO: 129923 - DNA, 1332 bp, Artificial Sequence
  derived and/or modified sequence
ggggctgagcaaggcggagggctccgcgccccccctcaattgtggacaaatggttactggggccgtccccttcaagcaggagcaggtggattgggcctggtctccggggaaccagggggtccgggggagccgcctggcggcggggatccaggcggagggtcaggcggggtgcccggagggagaggaaaacaggatatcggggatatcttgcaacagattatgacgataaccgaccaatccctagatgaggcacaggctaaaaaacacgccctgaattgtcacaggatgaaacccgcattattcagtgtgttatgtgagattaaggagaagacggggttgtccatcaggagctcacaggaggaggaacctgttgatccccagctcatgcgtctggataacatgctcctggcagaaggagtcgctggccctgagaaggggggaggcagcgccgccgcagccgccgccgccgctgcctcaggtggcggcgtctctcccgacaattccatcgaacactctgactatcggtcaaagcttgcacagatcaggcacatctaccatagtgagctggagaaatacgaacaggcctgcaatgagtttactacacacgtcatgaacttgctacgagaacagtcccgaacccggcccgtggcacctaaagagatggagaggatggttagcattatccacaggaaattcagcgcaattcagatgcagttgaaacaaagcacgtgcgaagctgtgatgattttgcgttcccgcttcttggacgccaggcgcaaacgtcggaattttagcaagcaagccactgaagtgctgaacgagtacttctatagtcacctgtcaaatccctatccaagcgaggaggcaaaagaggaactagctaaaaaatgtggcatcacagtatctcaggtgagcaactggtttggtaataagagaatcaggtacaagaagaatataggcaagttccaggaggaggctaatatatacgcagtaaaaaccgcagtatccgtgactcagggcggacactcacgtacgtccagtccgactcctccttcttctgcggggtcaggtggctccttcaatttaagcggtagcggagacatgtttctcggtatgcccggactgaatggcgattcttactctgcctctcaggtggaaagtctgcgccattccatgggacccggaggctacggcgataatctcggcggggggcagatgtactcacctagggagatgagagctaacggatcctggcaagaagcagtcacccccagcagtgtgacttcaccaactgagggccctggcagcgtgcatagcgatacaagtaactag

SEQ ID NO: 129924 - DNA, 1317 bp, Artificial Sequence
  derived and/or modified sequence
atggatgagaggctgttgggacctcctcccccgggaggaggtcggggaggcctgggactggtgagtggcgaaccgggcggacctggggaaccaccaggtggcggtgaccctgggggaggttctgggggggtgccaggagggaggggaaagcaggatatcggggacatcctgcaacagattatgactatcacggatcagagccttgatgaagcgcaggcaaaaaagcacgcgctgaattgtcatcgcatgaagcccgcccttttcagtgtactgtgcgaaataaaggagaagaccggtctgagtatacggtcatctcaggaggaagaacccgtggatcctcagctgatgaggctggataacatgttgctggcggagggagtggcaggaccggagaagggaggtggatctgcggccgctgctgctgccgctgcggcaagcggagggggagtgtcccctgataactcaatagaacactcagactataggagcaagctggcacaaatacggcatatttaccactccgaacttgagaagtatgagcaagcatgcaacgaattcacaacccatgtcatgaatcttttgcgggagcagtcacgtactcggcccgtggctcccaaggaaatggagcggatggttagtataattcatcggaaatttagcgccatccagatgcaacttaagcagtctacgtgcgaggcagtgatgatcctgcggagccgcttcctggacgccaggcggaagaggaggaatttcagcaaacaggcaacggaggtcctcaatgaatatttctacagccatctctctaatccataccctagcgaggaggcaaaggaagaactggccaaaaaatgcggaattactgtctctcaggtatccaactggtttggcaataaaagaatcagatataagaagaacatcggaaaattccaggaagaggcgaatatctacgccgttaaaactgccgtctccgtgacccagggcggccactcccgcacctcctcaccaactcctccatcatccgcaggctcgggcggatcgtttaacctgagcggatctggggatatgttcctggggatgcccgggctgaacggagactcttactctgccagtcaggtgcgatgtccgagcccactccaggttgaaagtttgagacattctatggggccggggggctacggggacaaccttggggggggccagatgtactcaccgcgagaaatgagggccaatgggagctggcaggaagctgtcacacccagttccgtgaccagtccaacagaaggcccaggttccgtgcattctgatacctccaattag

SEQ ID NO: 129925 - DNA, 1380 bp, Artificial Sequence
  derived and/or modified sequence
atggacgagcgtttactaggccccccccctccaggaggtggtagaggaggacttggactggtgtctggcgaacccggcggccctggtgagccccccggcggcggcgatcctgggggcggctcaggaggcgtaccaggcggtcgagggaaacaggatataggcgatatattacagcagattatgactataactgaccagagcctggacgaggcacaggcaaagaagcatgcactgaactgccaccgaatgaagcctgcactctttagtgtgctctgcgaaattaaggagaagacgggcttgagtatccgctcgtcccaggaggaggagccagttgacccccagttgatgcgtctggataatatgctgctggctgagggggtagcaggtccggagaagggtggaggttcagctgctgcggccgctgccgccgccgcctctggtggaggcgtgagccctgacaactcaattgaacactccgactacaggtctaagctggctcagattagacacatttaccatagtgagctcgagaagtacgaacaggcttgcaacgagtttaccacacatgtgatgaatctgttgagggagcaatcacgtactagaccggttgccccgaaagagatggagcggatggtgtctatcattcacagaaaattcagcgctattcagatgcaacttaagcagagtacttgtgaagccgtaatgatcctgagaagccggttccttgacgcgaggagaaaaagaagaaacttcagcaagcaggcaacggaggtgctgaacgagtacttctattcccacctctccaatccatacccatcagaagaggcgaaggaagagctcgcaaaaaagtgtggtatcacagtctcccaagtgttatggcggctgagagaggaactgtctgggaaagtgcatgcctctcagctgggtgcggtagtgagtaattggttcggcaataaacgcattagatacaaaaaaaacatcgggaagttccaggaggaggctaatatttatgcagtgaagaccgctgtgagcgtgacacagggtggccacagcagaacatcatcgcctacacctccatccagtgcgggctcgggaggcagctttaacctgtctggttccggtgacatgttccttgggatgccgggattaaatggggactcatactcagctagccaagtgaggtgtcccagtcctctgcaagtagagtctctgcggcacagcatggggcctggtgggtatggagacaacctgggagggggacagatgtactccccacgagaaatgagagcgaacgggtcgtggcaggaagcagtcacccctagcagcgtgacatctcctacagaggggcctgggtcagttcattccgatacctctaattag

SEQ ID NO: 129926 - DNA, 1332 bp, Artificial Sequence
  derived and/or modified sequence
ggggctgagcagggcggcggacttcgagctcctcctcagctttggactaacggatactgggggagaccactgcaggctggcgctggtggcctgggattggtgtccggtgagccaggggggcccggtgaaccccccggtgggggggacccaggtggtggttcaggcggagtgcccggagggaggggaaaacaggatataggggacatcttacagcaaatcatgacaattaccgatcaatcactggatgaggcacaggccaagaagcatgcgttgaattgtcacaggatgaagcccgcccttttttccgtgctgtgcgagataaaagagaagaccgggctgtctatccggtcctctcaggaggaagagcctgtggatccccaactcatgagactggataatatgcttttggcagagggagtagctgggcccgaaaagggaggtgggagcgccgcggccgctgccgccgctgctgccagcggaggtggcgtctcacccgataacagtatagagcattccgactaccgcagtaaactggctcagatccgccacatatatcactcggagctggaaaaatatgagcaagcctgtaacgagtttaccacgcatgtgatgaacctgttaagggagcagtctcggacaagaccagtggcacccaaggagatggaacgcatggtgtcaattattcaccgaaagttcagcgctatccagatgcagttaaagcagtccacatgtgaggccgtaatgatccttaggagcagattccttgatgcaagacgcaaacggcggaatttcagcaagcaggcgactgaagtactaaacgagtacttttactcacacctgagcaatccttatccttcagaggaggctaaggaggaactggcaaagaagtgtggaatcacagtatcacaggtctccaactggtttgggaacaagcgaatcaggtataaaaaaaacattggaaagtttcaggaagaggctaacatctacgccgtcaagacagcggtgagcgtcactcagggagggcacagccgtaccagttcacccaccccaccctcctctgcagggagcggtggctcattcaatctcagcggatccggcgatatgtttctgggcatgcccggacttaacggcgactcctatagtgcaagtcaggttgaatcactgcggcactcaatgggacctggaggctacggagataacctgggagggggtcagatgtattcaccgagagagatgcgagcaaacggttcctggcaggaagccgtcactccgagttcggtcacatctccaactgagggaccggggtctgtccacagcgatacctccaattag

SEQ ID NO: 129927 - DNA, 1317 bp, Artificial Sequence
  derived and/or modified sequence
atggatgaaaggctcctagggccgccaccaccaggcggaggtcgcggcggcctaggcctagtgagcggagagcctggcggtccaggcgagccccccgggggcggggacccaggagggggttccgggggtgtcccaggaggacggggtaaacaggacatcggggatatactacaacaaatcatgaccatcaccgatcagtcactggacgaggcacaagccaaaaaacacgccctcaactgtcatcgaatgaaaccagccctgttctctgtgctgtgtgaaattaaggagaagaccgggctatcaatccggtcaagccaggaggaggagccagtagatccccagctgatgagactggacaacatgcttttggccgaaggggtggccgggccagagaagggcggcggatctgcggcagcagccgcagcagcggcagccagcgggggtggtgtgagtcccgataatagcattgaacacagcgactaccgctccaaattagcccagataaggcatatttaccacagtgagctcgaaaaatacgaacaggcttgcaacgagtttactacgcacgtcatgaacctacttagggaacaatctaggactcggcctgtggcgcccaaggaaatggagcgaatggtaagtatcatccaccggaaattcagtgctatccagatgcagctgaaacaatcaacctgtgaggcagtgatgatcctgcgttcccgatttctggatgcccggcggaagcggaggaacttcagtaagcaggctacggaagtgctgaatgagtatttctactctcacctgagtaatccttacccttccgaagaagcaaaagaggagctcgctaaaaagtgtggcattaccgtctctcaggtctctaattggtttggaaataaacgcatccgatataagaaaaacataggaaaatttcaagaagaggcgaatatctatgctgtgaagacggccgtgagcgtgacccaaggaggccacagccgtactagctcccccacccccccgtcgtcagctggcagcggaggatcattcaacctgtctggatcaggggacatgttccttggcatgccaggcctgaatggggacagttattccgcaagccaggttcgctgcccctctccactccaggtcgaatccttgagacatagtatgggccctggaggatatggtgataacctcggaggggggcagatgtactcgccacgcgagatgagagccaatggctcctggcaggaggccgttactccctcttctgtcacaagtcctaccgagggccccggtagtgtccattctgatacgtccaattag

SEQ ID NO: 129928 - DNA, 1317 bp, Artificial Sequence
  derived and/or modified sequence
atggatgaaagactcctcggccctccacctcccggtggcggacgtgggggcctgggactggtgagcggcgagcccgggggcccaggagagccccccggcggtggcgatcccggggggggctcaggaggggtgccaggaggacggggaaagcaggacattggggacatcctccagcaaatcatgacaatcaccgaccagagcctggacgaggctcaggctaaaaagcatgccctgaactgccacagaatgaaacctgccctgttctctgtcctttgcgagattaaggaaaaaacggggctcagcatcaggagttcacaggaggaggagcccgtggacccccagctcatgagactggataatatgctcctggctgaaggtgtcgctggccccgagaaaggcggaggttccgccgcagccgccgcggctgccgccgcctccggagggggtgtgagcccagataactctattgagcactcagattacagaagtaagctcgcccagatccgacacatataccattctgaactggaaaaatatgagcaggcatgcaacgagttcacgactcatgttatgaatctgctgagggagcagtccaggactcggcccgtcgcgcccaaagagatggagagaatggtctcgattattcaccgcaaatttagtgccatccagatgcaacttaaacaaagcacttgtgaggccgtcatgattcttcgcagtagattcctcgacgctagacggaagcgccgtaacttcagtaaacaggctaccgaagtgctcaatgaatatttctattcacacctatccaacccatacccgagcgaggaagcaaaggaggagctggccaaaaaatgcggtatcacagtgagtcaggttagcaactggttcggcaacaaaagaatccgatataagaaaaacatcggaaaatttcaggaggaagccaatatctacgcagttaagacagcggtcagcgtcacccagggcgggcatagtcgtacgagctctcccacccctccctcctccgccggttccggaggaagtttcaacctctcggggagtggtgatatgtttctcggcatgcctggcctgaacggtgacagttatagcgccagtcaggtgaggtgtccgtctcccctgcaggtggagtctttgcgtcactctatgggccccggaggatacggtgacaaccttggaggcggacagatgtacagcccacgcgaaatgagggccaacggatcatggcaggaggccgtgacgcccagcagtgtgacgtcgcctaccgagggccccggcagtgtgcacagcgatacctcaaactag

SEQ ID NO: 129929 - DNA, 1332 bp, Artificial Sequence
  derived and/or modified sequence
ggggccgaacagggagggggcttgcgcgcaccaccccagctctggacgaatggatactggggcaggccgctccaagctggggctggtggcctaggactagtgtccggagaacctggcggcccgggtgagcctccgggcgggggagacccaggcggcgggagcggaggtgtacccggcggccgtggcaagcaggacataggagatattctgcagcaaataatgacaatcacagatcagagcctggatgaagcccaggccaaaaagcacgccctgaattgtcataggatgaagcccgccctcttttccgtgctttgcgagatcaaggagaagacaggcctcagcatcagaagttcgcaagaagaagaacctgtggatcctcagctgatgaggcttgacaacatgctgctggcggagggcgtcgccggtccggaaaaggggggaggctccgccgctgcagctgcggcagcagccgcaagtggggggggcgttagtcccgataactccatagagcacagcgattaccgatctaaactggcccaaattaggcatatttatcattctgagctggaaaaatacgagcaggcctgtaacgaattcaccactcacgtgatgaacctgctaagagagcagagtcggacccgacccgttgctccaaaagaaatggagcggatggtgagtattattcatcgaaaattctccgccatacagatgcagctcaagcagtcgacgtgcgaggccgtgatgatcctgcgctcgcgcttccttgacgccaggcgcaagcgccggaactttagcaagcaagcgaccgaggtgctgaatgaatacttctattcacacctgagcaatccatacccttccgaggaggccaaagaagagctggccaaaaaatgtggcatcacagtgtctcaggtgtcaaattggtttggcaataagcgaatacgctacaaaaagaatatcggaaagtttcaggaagaagccaatatttatgctgtgaagaccgccgtgtccgtgacgcagggggggcactctagaacctcctcaccgactccaccttcctccgccggatccggagggagtttcaacctgtctggctcaggagatatgttcctggggatgcccggtctcaacggggattcgtacagcgcctctcaagttgagtcgcttcggcactcaatgggtccggggggttacggggataacctgggtgggggacaaatgtactccccccgcgagatgagagccaatgggtcttggcaggaggcagtgaccccaagtagcgtgacttcccccacagagggtccaggttcagtgcactccgacactagtaactag

SEQ ID NO: 129930 - DNA, 1392 bp, Artificial Sequence
  derived and/or modified sequence
atggatgaacgactcctcggcccccccccaccaggaggcggacgtggcggcttggggcttgtctccggtgagcctggcggtcccggagaacctccagggggaggagatccgggggggggttcagggggtgtaccaggaggtcggggtaaacaggacataggcgacattctgcagcagattatgaccattactgatcagtctctcgacgaggcacaggctaaaaaacatgccttaaattgtcatcgcatgaaacccgctcttttcagcgtactatgtgaaattaaggagaagaccgggctttcaataaggtccagtcaggaagaggaacctgttgatcctcaacttatgcgcttagataacatgctcctcgctgagggagtcgctggtccagagaagggtgggggaagtgctgcagcagctgcagccgctgcagctagtggtggaggtgtatcaccagataactctatagagcatagtgattaccgctctaagctggcccagatacgtcatatctatcactccgaactggagaagtatgagcaggcatgcaatgaattcacaacacacgttatgaacctcttgagagaacagtcaagaacccgtcccgtggcaccaaaggagatggaacgcatggtgtctattatccacagaaagttctccgccatccaaatgcagctgaagcaatcgacctgcgaggctgtgatgatccttagaagccgcttcctggacgcccgcaggaagagaagaaacttcagtaagcaggccactgaggtgctgaacgagtatttttactctcatctgtcgaacccttaccccagcgaagaagctaaggaggaattggccaagaagtgcgggatcaccgtgtcacaggttctttggcggctacgcgaagaactgagtggtaaggttcacgcttcgcaactgggggccgtcgtgtccaattggttcggcaacaaacgcattcggtataaaaagaacattggaaagtttcaggaagaagccaatatctacgctgtgaagacagccgtaatcatcgctgagagggggccctttggggttaggggcactgaactgtcactgccgtctctccctccccaggggagcggtggaagctttaatctgtccggtagcggagatatgttcctcggaatgcctgggctcaatggagatagttacagcgcatcccaagtgcgctgcccctccccgctccaggtggagagcctccgacattccatgggtcccgggggctatggggacaatttgggcggaggacaaatgtactccccgcgcgagatgcgcgcaaacggcagctggcaggaagctgtaaccccaagcagcgtgacttctccaaccgaagggcctgggtctgtgcattcagacaccagcaattag

SEQ ID NO: 129931 - DNA, 1332 bp, Artificial Sequence
  derived and/or modified sequence
ggcgctgagcaaggtggcggcttgagggcacctccacagctgtggaccaacggctactggggcagaccccttcaggcaggcgccggtggactcggccttgtgtcaggcgagcctggtgggccaggagagcccccaggcggtggggatcctgggggcggcagcggcggcgttcccggcggccgaggtaaacaagatattggagatattctgcaacaaataatgacaataaccgatcaatcattggacgaagcacaggccaagaagcatgcccttaactgccatcgcatgaaacctgcactgttctccgtgctgtgcgagataaaggaaaagaccggactgagtatccgctcaagccaggaagaagaaccagtcgaccctcaactgatgaggttggacaacatgcttttggctgaaggcgtggctgggcctgaaaaaggtggcgggagcgccgctgccgcagcagcagctgccgcatctggcggcggcgttagcccagacaactcaatcgagcacagcgactatcgctcaaagctggctcagatacgacatatttaccacagcgagctagagaagtatgaacaggcatgcaatgagttcacaactcacgtcatgaacttattacgtgaacagtcccgcacaaggccagtggctccgaaggaaatggagaggatggtgagcattatccacagaaaattttcggctatacaaatgcagctcaagcagtctacatgcgaggcagtcatgattctgcgaagcaggtttctcgatgctcgtcggaagaggcgcaactttagcaagcaggccaccgaagtcctgaacgagtacttctactctcatttgagcaacccgtacccctctgaggaagctaaggaagagttagccaaaaagtgtggcatcacagtcagccaggtgtcgaattggttcggcaataagaggattagatacaaaaagaacatcggcaagttccaggaggaggcaaacatctacgctgtcaagactgccgtctctgtgactcaagggggacattccagaacaagcagcccaacaccgccgtcatctgcaggcagcggaggctcctttaatctgagcggatctggcgacatgttcctggggatgccaggattaaatggtgacagttacagtgcatcgcaagtggaatccctccgacactcaatgggcccggggggctatggcgacaacctgggaggagggcagatgtattctcctagggaaatgagagcaaacgggagttggcaggaggccgtgactcccagctccgtcacatcacccactgaaggaccagggtctgtccactcagatacgagtaactag

SEQ ID NO: 129932 - DNA, 1332 bp, Artificial Sequence
  derived and/or modified sequence
ggagctgaacaggggggcggcctgcgcgccccaccacagctgtggacaaatggctactgggggcgaccactccaagcgggggctggcggcttgggtttggtcagcggtgagcctggtggtccgggcgaacccccaggtgggggcgatcctgggggcggctctggaggcgtccccggggggagagggaagcaggatattggggacatcttgcagcaaataatgacgatcaccgatcagtccttagatgaggcacaggccaaaaaacacgctcttaattgccaccgaatgaagcctgcccttttcagcgtcctgtgcgaaattaaagagaaaacaggactgtcgattcgatcatcgcaggaggaagagcccgtagatccacaattgatgcggctcgataacatgctcctggcagagggggtggccggcccggaaaaaggagggggttcagctgcagccgctgctgctgctgccgcgtcggggggtggagtgagtccagataactcgatcgagcacagtgactaccgaagcaaattggcccagattaggcatatataccactcagagctggaaaagtacgagcaggcatgtaatgagttcactacacacgtgatgaatctcctgagagagcagtccagaacccggcctgtggctccaaaggagatggagaggatggtatctataatccaccgcaaattctctgcaattcagatgcagttgaagcagagtacttgcgaggccgtgatgattctgagaagtcgcttcctggacgcaaggagaaagaggaggaatttcagcaagcaagcaaccgaggtcttgaatgaatacttctattcgcatctgagcaatccctatccatctgaggaggctaaggaagaacttgccaagaaatgtggtatcactgtcagccaggtgtccaattggttcggcaataaacgcattcggtacaagaaaaatattgggaagtttcaagaggaggcaaacatatatgccgtgaagacagcggttagcgtcacacagggagggcatagtcggacaagttccccgacgccacccagcagtgctgggagcggcggctctttcaacctgtcgggcagcggcgacatgtttctgggcatgcctggcctgaatggagatagttactcagcaagtcaggtggaatccctgaggcactccatgggccctggcggctacggcgataacctgggaggcggacaaatgtacagccccagggaaatgagagccaatggaagttggcaagaggcagtgactccttcatccgtaacgagccccaccgagggacccggctcagtgcattccgatacttccaattag

SEQ ID NO: 129933 - DNA, 1293 bp, Artificial Sequence
  derived and/or modified sequence
atggatgagcggctgctgggccccccacctcctgggggcggccggggcggcctgggcctggtgtctggagagcccggcggccctggagagcccccaggcggcggggaccccggcggcggcagcggaggagtgcctgggggccggggcaagcaggacattggagacatcctgcagcagatcatgaccatcacagaccagagcctggatgaggcccaggccaagaagcacgccctgaactgccacaggatgaagccagccctcttctctgtgctgtgtgagatcaaggagaagacaggcctgagcatccgcagcagccaggaggaggagcctgtggacccccagctgatgaggctggacaacatgctgctggccgagggcgtggccggccctgagaagggcggcggcagcgctgctgctgctgctgctgctgctgccagcggcggcggcgtgtccccagacaacagcattgagcacagcgactaccgcagcaagctggcccagatccgccacatctaccacagcgagctggagaagtatgagcaggcctgcaatgagttcaccacccacgtgatgaacctgctgcgggagcagagcaggaccaggcctgtggcccccaaggagatggagaggatggtgtccatcatccacaggaagttcagcgccatccagatgcagctgaagcagagcacctgtgaggccgtgatgatcctgcggagccgcttcctggatgcccggaggaagagaagaaacttcagcaagcaggccacagaggtgctgaatgagtacttctacagccacctgagcaacccctaccccagcgaggaggccaaggaggagctggccaagaagtgtggcatcaccgtgtcccaggtgagcaactggtttggaaacaagaggatccgctacaagaagaacatcggcaagttccaggaggaggccaacatctatgctgtgaagacagctgtgtctgtgacccagggcggccacagcaggaccagcagccccaccccacccagcagcgctggcagcggcggcagcttcaacctgagcggcagcggggacatgttcctgggcatgcctggcctgaatggagacagctacagcgccagccaggtggagagcctgcggcacagcatgggccctgggggctacggggacaacctgggcggcggccagatgtacagcccccgggagatgagggccaacggctcctggcaggaggccgtgacccccagctctgtgaccagccccacagagggccctggctctgtgcacagcgacaccagcaactag

SEQ ID NO: 129934 - DNA, 1392 bp, Artificial Sequence
  derived and/or modified sequence
atggatgagcggctgctgggccccccacctcctgggggcggccggggcggcctgggcctggtgtctggagagcccggcggccctggagagcccccaggcggcggggaccccggcggcggcagcggaggagtgcctgggggccggggcaagcaggacattggagacatcctgcagcagatcatgaccatcacagaccagagcctggatgaggcccaggccaagaagcacgccctgaactgccacaggatgaagccagccctcttctctgtgctgtgtgagatcaaggagaagacaggcctgagcatccgcagcagccaggaggaggagcctgtggacccccagctgatgaggctggacaacatgctgctggccgagggcgtggccggccctgagaagggcggcggcagcgctgctgctgctgctgctgctgctgccagcggcggcggcgtgtccccagacaacagcattgagcacagcgactaccgcagcaagctggcccagatccgccacatctaccacagcgagctggagaagtatgagcaggcctgcaatgagttcaccacccacgtgatgaacctgctgcgggagcagagcaggaccaggcctgtggcccccaaggagatggagaggatggtgtccatcatccacaggaagttcagcgccatccagatgcagctgaagcagagcacctgtgaggccgtgatgatcctgcggagccgcttcctggatgcccggaggaagagaagaaacttcagcaagcaggccacagaggtgctgaatgagtacttctacagccacctgagcaacccctaccccagcgaggaggccaaggaggagctggccaagaagtgtggcatcaccgtgtcccaggtgctgtggaggctgcgggaggagctgagcggcaaggtgcacgccagccagctgggcgctgtggtgagcaactggtttggaaacaagaggatccgctacaagaagaacatcggcaagttccaggaggaggccaacatctatgctgtgaagacagctgtgatcatcgccgagcggggcccctttggagtgcggggcacagagctgagcctgcccagcctgcccccccagggcagcggcggcagcttcaacctgagcggcagcggggacatgttcctgggcatgcctggcctgaatggagacagctacagcgccagccaggtgcgctgccccagccccctgcaggtggagagcctgcggcacagcatgggccctgggggctatggagacaacctgggcggcggccagatgtacagcccccgggagatgagggccaacggctcctggcaggaggccgtgacccccagctctgtgaccagccccacagagggccctggctctgtgcacagcgacaccagcaactag

SEQ ID NO: 129935 - DNA, 1317 bp, Artificial Sequence
  derived and/or modified sequence
atggatgagcggctgctgggccccccacctcctgggggcggccggggcggcctgggcctggtgtctggagagcccggcggccctggagagcccccaggcggcggggaccccggcggcggcagcggaggagtgcctgggggccggggcaagcaggacattggagacatcctgcagcagatcatgaccatcacagaccagagcctggatgaggcccaggccaagaagcacgccctgaactgccacaggatgaagccagccctcttctctgtgctgtgtgagatcaaggagaagacaggcctgagcatccgcagcagccaggaggaggagcctgtggacccccagctgatgaggctggacaacatgctgctggccgagggcgtggccggccctgagaagggcggcggcagcgctgctgctgctgctgctgctgctgccagcggcggcggcgtgtccccagacaacagcattgagcacagcgactaccgcagcaagctggcccagatccgccacatctaccacagcgagctggagaagtatgagcaggcctgcaatgagttcaccacccacgtgatgaacctgctgcgggagcagagcaggaccaggcctgtggcccccaaggagatggagaggatggtgtccatcatccacaggaagttcagcgccatccagatgcagctgaagcagagcacctgtgaggccgtgatgatcctgcggagccgcttcctggatgcccggaggaagagaagaaacttcagcaagcaggccacagaggtgctgaatgagtacttctacagccacctgagcaacccctaccccagcgaggaggccaaggaggagctggccaagaagtgtggcatcaccgtgtcccaggtgagcaactggtttggaaacaagaggatccgctacaagaagaacatcggcaagttccaggaggaggccaacatctatgctgtgaagacagctgtgtctgtgacccagggcggccacagcaggaccagcagccccaccccacccagcagcgctggcagcggcggcagcttcaacctgagcggcagcggggacatgttcctgggcatgcctggcctgaatggagacagctacagcgccagccaggtgcgctgccccagccccctgcaggtggagagcctgcggcacagcatgggccctgggggctacggggacaacctgggcggcggccagatgtacagcccccgggagatgagggccaacggctcctggcaggaggccgtgacccccagctctgtgaccagccccacagagggccctggctctgtgcacagcgacaccagcaactag

SEQ ID NO: 129936 - DNA, 1332 bp, Artificial Sequence
  derived and/or modified sequence
ggggctgagcagggcggcggcctgcgggccccaccccagctgtggaccaacggctactggggccggcccctgcaggccggggccggcggcctgggcctggtgtctggagagcccggcggccctggagagcccccaggcggcggggaccccggcggcggcagcggcggcgtgcctgggggccggggcaagcaggacatcggggacatcctgcagcagatcatgaccatcacagaccagagcctggatgaggcccaggccaagaagcacgccctgaactgccacaggatgaagccagccctcttctctgtgctgtgtgagatcaaggagaagacaggcctgagcatccgcagcagccaggaggaggagcctgtggacccccagctgatgaggctggacaacatgctgctggccgagggcgtggccggccctgagaagggcggcggcagcgctgctgctgctgctgctgctgctgccagcggcggcggcgtgtccccagacaacagcattgagcacagcgactaccgcagcaagctggcccagatccgccacatctaccacagcgagctggagaagtatgagcaggcctgcaatgagttcaccacccacgtgatgaacctgctgcgggagcagagcaggaccaggcctgtggcccccaaggagatggagaggatggtgtccatcatccacaggaagttcagcgccatccagatgcagctgaagcagagcacctgtgaggccgtgatgatcctgcggagccgcttcctggatgcccggaggaagagaagaaacttcagcaagcaggccacagaggtgctgaatgagtacttctacagccacctgagcaacccctaccccagcgaggaggccaaggaggagctggccaagaagtgtggcatcaccgtgtcccaggtgagcaactggtttggaaacaagaggatccgctacaagaagaacatcggcaagttccaggaggaggccaacatctatgctgtgaagacagctgtgtctgtgacccagggcggccacagcaggaccagcagccccaccccacccagcagcgctggcagcggcggcagcttcaacctgagcggcagcggggacatgttcctgggcatgcctggcctgaatggagacagctacagcgccagccaggtggagagcctgcggcacagcatgggccctgggggctatggagacaacctgggcggcggccagatgtacagcccccgggagatgagggccaacggctcctggcaggaggccgtgacccccagctctgtgaccagccccacagagggccctggctctgtgcacagcgacaccagcaactag

SEQ ID NO: 129937 - DNA, 1380 bp, Artificial Sequence
  derived and/or modified sequence
atggatgagcggctgctgggccccccacctcctgggggcggccggggcggcctgggcctggtgtctggagagcccggcggccctggagagcccccaggcggcggggaccccggcggcggcagcggaggagtgcctgggggccggggcaagcaggacattggagacatcctgcagcagatcatgaccatcacagaccagagcctggatgaggcccaggccaagaagcacgccctgaactgccacaggatgaagccagccctcttctctgtgctgtgtgagatcaaggagaagacaggcctgagcatccgcagcagccaggaggaggagcctgtggacccccagctgatgaggctggacaacatgctgctggccgagggcgtggccggccctgagaagggcggcggcagcgctgctgctgctgctgctgctgctgccagcggcggcggcgtgtccccagacaacagcattgagcacagcgactaccgcagcaagctggcccagatccgccacatctaccacagcgagctggagaagtatgagcaggcctgcaatgagttcaccacccacgtgatgaacctgctgcgggagcagagcaggaccaggcctgtggcccccaaggagatggagaggatggtgtccatcatccacaggaagttcagcgccatccagatgcagctgaagcagagcacctgtgaggccgtgatgatcctgcggagccgcttcctggatgcccggaggaagagaagaaacttcagcaagcaggccacagaggtgctgaatgagtacttctacagccacctgagcaacccctaccccagcgaggaggccaaggaggagctggccaagaagtgtggcatcaccgtgtcccaggtgctgtggaggctgcgggaggagctgagcggcaaggtgcacgccagccagctgggcgctgtggtgagcaactggtttggaaacaagaggatccgctacaagaagaacatcggcaagttccaggaggaggccaacatctatgctgtgaagacagctgtgtctgtgacccagggcggccacagcaggaccagcagccccaccccacccagcagcgctggcagcggcggcagcttcaacctgagcggcagcggggacatgttcctgggcatgcctggcctgaatggagacagctacagcgccagccaggtgcgctgccccagccccctgcaggtggagagcctgcggcacagcatgggccctgggggctatggagacaacctgggcggcggccagatgtacagcccccgggagatgagggccaacggctcctggcaggaggccgtgacccccagctctgtgaccagccccacagagggccctggctctgtgcacagcgacaccagcaactag

SEQ ID NO: 129938 - DNA, 1293 bp, Artificial Sequence
  derived and/or modified sequence
atggacgagcggctgctgggcccccccccccccggcggcggccggggagggctcggcttggtctccggggaaccaggtggcccaggtgaaccccccggcgggggtgatccaggagggggtagtgggggtgtcccaggaggacggggcaagcaagacatcggcgatattctccagcagattatgactatcaccgatcaaagcctcgatgaagcccaagcaaaaaagcatgccctgaactgccacaggatgaaacccgccctgttttccgtgctctgcgagataaaggagaagacaggactcagtatccggagcagtcaggaggaggagccagtggatcctcagcttatgcggctggacaatatgctgctggcggagggggttgcagggccagaaaaaggggggggtagtgccgctgcagcagccgccgccgccgccagcgggggcggagtgtcacccgataactccatcgagcatagcgactatcggagcaagcttgcgcaaatccgtcatatctaccactcagaactagaaaagtacgaacaagcctgtaatgagttcaccacacacgtcatgaatcttctgagggaacagagcagaacccggccagtagccccaaaggaaatggagcggatggtcagtatcattcataggaagttctctgccattcagatgcagctgaagcaatccacgtgtgaagccgtcatgatccttcgcagtcgctttttagatgctcgtaggaagcgcaggaacttctcaaaacaggctactgaagtcttgaatgagtacttttattctcacctatcgaacccgtatccatccgaggaagcgaaggaggaactagctaagaagtgcgggatcacagtgtctcaagtttctaactggttcggcaataaacgcattagatataaaaagaacatcggtaagtttcaggaagaggccaacatctacgcagtgaaaacagctgtgagcgtgacacagggcggacacagcagaacttcaagtcctaccccaccatcgtccgcgggcagtggaggctcctttaacttgtcgggcagcggagacatgttccttggtatgcccggccttaacggcgattcctacagcgccagccaggtcgaaagcctgcgccactctatggggcccggaggttacggcgacaacctaggtgggggccaaatgtactctccaagggaaatgcgcgccaatggatcatggcaggaggcagtgaccccgtccagtgttacctctccaaccgaggggcccggctcggtgcacagcgacaccagtaactag

SEQ ID NO: 129939 - DNA, 1293 bp, Artificial Sequence
  derived and/or modified sequence
atggacgagcggctgctgggcccccccccccccggcggcggccggggtggtctcgggttggtatccggggaacccgggggcccaggcgagcctccaggcgggggagatcctggtggcggttcaggaggagtccctggaggccggggaaaacaagatatcggggacatactccagcagataatgaccatcactgaccaaagcctcgacgaggcgcaggccaaaaaacacgcactcaattgccatcggatgaaacctgcgctattctctgtactttgtgaaataaaggagaaaactggcctctctatccggtcgagccaggaggaggagccagttgatccacagttgatgcggctggataatatgctgctcgccgaaggagtggccggcccagagaaaggcggcgggagcgcagccgcagccgccgctgcagccgctagtggaggaggcgtgagccctgataattccatcgagcacagcgactatagatccaagctggcccagatccggcatatttatcatagtgagctcgagaaatacgagcaagcctgcaacgaatttactacccatgtgatgaatcttctgcgtgaacaatctaggacacgacctgtagcaccgaaggagatggagaggatggtgagcataatacatcggaagttcagcgccattcagatgcagttgaaacagagcacctgtgaggccgtaatgatccttaggtcccgattcctggatgcacggagaaagcggaggaacttcagcaaacaggccactgaggtcctgaatgaatatttctatagccatctgagcaatccctacccgtctgaggaggcaaaggaagaacttgccaagaagtgtgggattaccgtgtcccaggtgtccaattggttcggcaacaaaagaattcgctacaaaaagaatattggcaagttccaggaggaagcaaatatctatgctgtcaagacggcagtcagcgtcacacaaggcggacatagcagaacatcatcacccactccaccatctagtgcaggctctggcggaagctttaatttatcaggctcaggcgatatgtttttaggcatgcctggattgaacggagactcgtacagcgctagccaggtcgagtcattgaggcattcaatgggcccaggcggttacggcgacaatctcggaggaggacaaatgtattctcctcgagaaatgagagccaacgggtcatggcaggaagcggtgacacctagcagcgtcacaagcccgactgaggggcctgggtctgtacattccgatacaagtaattag

SEQ ID NO: 129940 - DNA, 1293 bp, Artificial Sequence
  derived and/or modified sequence
atggacgagcggctgctgggcccccccccccccggcggcggccggggcggtctcggtctggtttccggcgagcctggtggtcctggtgagcctccgggcggtggagatcccggtggcgggagcggaggagtccccgggggacgcggtaagcaggacatcggcgacatcctgcaacaaatcatgacaataactgatcagtcacttgacgaagcacaagccaagaagcacgcactgaactgtcatagaatgaaaccagccctgttttcagttctgtgcgagattaaggaaaaaacaggcctctcaatcaggtcaagccaggaggaggagcccgtggacccacagctgatgaggctggataacatgctgcttgccgagggggtggccgggccagaaaagggcggaggctctgccgccgccgctgctgctgctgcggcctccggcggcggggtgtcccccgacaacagtatagagcactccgactataggtcgaagttagcacagatccggcatatttatcactcagaactggaaaagtatgagcaggcctgcaatgagtttaccacccacgtgatgaatctgttgcgtgagcagtcccgtacccgcccggtggcaccaaaagaaatggaaaggatggtgtccataattcataggaagttctctgccatccagatgcagctgaagcagtcgacctgtgaggcagtgatgatcctgcgctcgcgcttcctggatgccaggcggaaacggagaaatttttctaagcaagctacggaggtgctgaacgagtacttttatagtcacctttctaacccctatccctccgaagaagcgaaggaagagttggccaaaaagtgcggtataactgtcagccaagtgagtaattggttcgggaacaagcgcatccgttacaagaaaaacatcggaaagttccaagaagaggctaatatttatgcagtgaagactgccgtgagtgtaacacagggcggtcactctaggacctcctctcccaccccaccaagcagcgccggctcgggtggctcctttaacttgtccggaagcggcgacatgtttctgggaatgccaggactgaacggagattcctattcggcctcccaggtggaaagtttgcgccactctatgggacccggaggctacggcgacaacctggggggtggccagatgtatagccctagagaaatgcgagcaaatggcagctggcaggaggccgttactccgtcatcagtgacctcacccacagaaggtccgggctcagtacacagcgatacaagcaattag

SEQ ID NO: 129941 - DNA, 1293 bp, Artificial Sequence
  derived and/or modified sequence
atggacgagcggctgctgggcccccccccccccggcggcggccggggcggcctggggcttgttagcggcgagccagggggacctggcgagcctcctggcgggggtgaccccggcggcggttccggtggcgtacccggtggaaggggaaagcaggatatcggcgacatcctgcagcaaattatgaccataaccgatcagtccctcgatgaggcccaggctaaaaaacacgccctaaattgccacaggatgaaacccgccctgttctcggtgctctgcgagattaaagaaaagaccggactcagcatcagatcctcacaggaggaggaacccgtggaccctcaacttatgagactagataatatgcttcttgccgagggggtcgcagggcccgaaaaaggcggagggtctgccgcggcggccgctgcagctgccgcttccggcggaggcgtatccccagataactccatagaacactcagactatcggtcgaaactcgcccagattaggcatatctatcattcagagttggagaagtatgaacaagcatgtaatgagttcactacacatgtaatgaacctgctgagggaacagagtcggactagaccagtggcgcctaaagagatggagaggatggtgtccattatccacagaaaatttagcgctatccaaatgcagctcaagcagtctacctgtgaagctgttatgatactaagaagccggttcctggatgcacgccgcaaacggaggaatttcagcaaacaggccaccgaagttttgaacgagtacttctactcacacctttcaaatccctacccttcagaggaagcaaaagaagaactcgcgaagaagtgcgggattacagtcagccaagtgagtaattggttcggtaataagaggatcagatacaagaaaaacatcggtaaattccaggaagaggccaatatatatgcggtaaagactgcagtgagcgtcacccagggcggacatagccgcacgagttctcctaccccaccctctagtgccggtagtggaggatcttttaatttgtcgggcagcggcgacatgttcctcggcatgcccggcctgaacggtgactcatatagcgcttctcaggtagagtcactccgtcattcaatggggcccgggggatatggggacaatctgggtggcggccagatgtattcaccccgggagatgcgggcaaatgggagttggcaggaggccgtcactcccagcagcgtcaccagccctaccgagggccccggctccgtgcatagtgatacctccaactag

SEQ ID NO: 129942 - DNA, 1293 bp, Artificial Sequence
  derived and/or modified sequence
atggacgagcggctgctgggcccccccccccccggcggcggccggggcggtctgggtctcgtcagcggggaacccgggggacctggcgagcctcctgggggtggcgaccccggtgggggctccggcggcgtgccaggcggtcggggaaagcaggatatcggggatatactgcagcaaattatgaccatcacggatcaatccttagatgaagctcaagccaaaaagcacgctctcaattgccatcggatgaagcctgctctgttctctgtgctgtgtgagattaaggagaagactgggctgagcattcgcagttcacaggaggaagagccagtcgatccgcagttgatgagactagacaacatgctgttggctgaaggcgtcgcaggacccgagaaggggggagggagcgccgcagctgccgcagcagctgcggcctccgggggaggcgtctccccggataacagcattgaacatagcgattatagatccaaactggctcagataaggcacatctaccattcagaattggaaaaatacgaacaggcctgcaacgagtttactacacatgtgatgaatctcctgcgggagcagtcgagaacaaggcctgtcgcacctaaggagatggaacggatggtctcaatcattcatcggaagtttagtgcgatccaaatgcaactgaagcagtccacctgtgaagccgtaatgattctccgatcccggtttctcgatgctagaaggaaaagaaggaactttagcaaacaggcgacggaggtcttaaatgaatacttctattctcacctttcgaatccttacccgtccgaggaggccaaagaagagctggcaaagaagtgtggcatcaccgtgagccaggtgtccaattggtttggcaacaagcggattaggtacaagaaaaacattggaaagtttcaggaggaggcgaacatttatgctgtaaagactgcggtgtccgtgacccagggaggccattcacgaacgtcaagcccgactcctcctagctctgccggtagcggcggctccttcaacctcagtgggtctggagacatgtttctgggtatgcctgggctgaacggggactcatactcagctagccaggttgagtcgcttcgccattccatggggccaggaggctatggagataacctaggggggggtcagatgtattctccccgcgagatgcgggctaatgggtcatggcaggaggcagtcacaccctctagcgttactagcccaactgaaggacccgggtctgtgcacagtgatacctccaattag

SEQ ID NO: 129943 - DNA, 1293 bp, Artificial Sequence
  derived and/or modified sequence
atggacgagcggctgctgggcccccccccccccggcggcggccggggggggcttggtttggtctctggagagcccggtggacccggagagccgcctggagggggggacccaggaggcgggagtggcggcgttccgggcggcagggggaaacaggacatcggcgatatcctacagcaaataatgacaatcacagatcagagcctggatgaagcccaagccaagaagcatgcgctgaactgtcacagaatgaaaccagccttattctctgtactctgcgaaatcaaggaaaagacagggctaagcatcaggtcttcacaggaggaggagccagtggatccccagctcatgcgcctggataatatgctcctggcagagggggtggccggacccgagaaaggtggaggaagcgcggccgccgctgccgctgctgcagcctccggcgggggcgttagcccagataacagtattgagcacagtgattaccgctcaaaactggcccagattagacatatttaccactccgagctggaaaaatacgagcaggcctgtaacgagtttactacacatgtcatgaatctcttgagagaacagagccgtacccggcccgtcgcccctaaagagatggaacgaatggtctctatcattcatagaaaattcagtgcaatacagatgcagctcaaacaatccacctgtgaggcagtgatgatactgcgaagcaggttcctcgacgctaggcgtaaaaggcgaaacttcagcaagcaggcaacagaagtcctgaatgagtacttctactctcatttgtctaacccatacccttctgaggaggccaaggaagaactcgccaaaaagtgtgggataacagtatcgcaggtcagtaattggttcgggaataagcggatccgatacaaaaaaaacatcggcaagttccaggaagaagccaatatttacgccgtcaaaacggcagtttccgtgacgcagggcgggcatagcaggacgtcttcaccaacccctccaagctctgcgggcagcggagggagcttcaatctgagcggttctggagacatgttcctcggtatgccaggccttaatggcgacagctattctgcatcccaggtggagtccctaagacacagcatgggtcccggaggttatggggataatttggggggcggccagatgtactcaccgcgcgagatgcgggcaaacggaagctggcaggaggcagtcaccccctccagcgtcacatctccaaccgaagggccgggttctgtgcactctgatacgtccaattag

SEQ ID NO: 129944 - DNA, 1293 bp, Artificial Sequence
  derived and/or modified sequence
atggacgagcggctgctgggcccccccccccccggcggcggccggggcgggttaggactcgttagtggagagcctggcggccctggggagccgcctggaggtggtgacccaggcggcggatcagggggggtccctggggggagggggaagcaggatataggcgacatcctacagcaaattatgaccattacagaccagagcttggacgaggcgcaggccaagaaacacgctctgaactgccatcggatgaaacctgcacttttttctgtcctgtgcgaaataaaagagaaaaccggcctctcgatccggtctagtcaggaagaggaaccagtcgatcctcagcttatgaggcttgataatatgttgttagcagagggcgtggcgggccctgagaaaggaggcggatctgcagcagccgccgctgctgcggccgcgagcggaggcggggttagccctgataactcaatcgaacattccgactatcgaagcaagctggctcagatcagacacatataccactccgagcttgagaagtacgaacaagcctgtaacgagtttacaactcacgtaatgaacttattgcgtgagcagtcccgcacacgacctgtggcacctaaggagatggaaaggatggtgtcgattatccaccgcaaattcagtgccatacagatgcagctaaaacagagcacctgtgaggcggtgatgattctacgaagtagattcctggacgctcggaggaagaggagaaacttctctaagcaagcaacagaggtcctgaatgagtatttctacagccatctgtcaaatccgtaccctagcgaggaagccaaggaggaattggccaagaaatgcggaattactgtgtcacaggtgtcaaactggttcggcaataagagaatacggtacaagaagaacatcgggaagtttcaggaagaggcaaacatctacgctgtgaagaccgctgttagcgtcacacaaggcggccactcacggacctcttctccaacccccccaagttccgctggatccgggggctcattcaatttaagcgggtcaggagacatgttcctgggcatgcctgggttgaatggcgactcctactccgcctcccaggtggagtcactacggcactccatgggacccgggggctatggggataatcttggtgggggccagatgtattcgccaagggagatgcgagctaatggatcatggcaagaggctgtgaccccaagctctgttacatcacctaccgaaggcccaggtagcgtccacagcgacacgtcgaattag

SEQ ID NO: 129945 - DNA, 1392 bp, Artificial Sequence
  derived and/or modified sequence
atggacgagcggctgctgggcccccccccccccggcggcggccgggggggcctaggtttagtttccggtgaacccggcggaccaggagagccgcccggggggggcgatcctggcggcggaagtggaggtgtgccaggaggaagggggaagcaagacatcggagacatcctccagcaaataatgaccatcactgatcagtccctggatgaggcgcaggcaaagaagcacgccctgaactgtcatcgaatgaagcctgctttgttcagcgtgctctgcgaaattaaagaaaaaacagggctgtcgatccggtccagtcaggaagaagagccagttgatcctcagttgatgcgactggataacatgctacttgccgaaggggttgccggccccgagaagggcggaggctccgcagccgccgccgccgccgctgcagcgagtggtggtggcgtctccccagacaactcaattgaacacagcgattataggtctaagttagcccaaattagacatatctatcacagcgaattggaaaaatacgaacaagcatgcaacgagtttacaacccatgtgatgaatctgttgagggaacagtcccgcacgcgaccagtggcccccaaggaaatggagcgaatggtgtccattatacataggaagttctccgctattcagatgcagttgaagcagagtacatgtgaggccgtgatgattctcagatcccgctttctcgatgccaggcgcaaacggcgcaacttctccaagcaggccacagaagtgcttaatgagtacttttactcgcatttatcgaatccgtacccgtcagaggaggcgaaggaggaactcgctaagaaatgtggcattaccgtgagtcaggtcctctggagattaagggaagaactgagcggcaaggtccatgcatcccagctcggagccgtggtgagtaactggttcggcaataagcggatcaggtacaagaagaatatagggaagttccaagaagaggctaacatttacgcagtaaagaccgctgttatcatcgccgagagagggccttttggcgtgaggggcactgagttgagccttccatctctcccaccccagggatcaggaggttcattcaatctgtcagggtccggagatatgtttctgggcatgcccggactcaatggtgacagctatagtgcgtcccaggtaagatgcccaagtcccttgcaggtagagagtctcagacatagtatggggccaggcgggtacggggacaacctcggaggcggacagatgtacagtccaagagagatgcgagccaacggttcatggcaggaagcagtaactccatcgtcagtaactagccccacagaagggcctgggagtgtgcactctgatacctcaaactag

SEQ ID NO: 129946 - DNA, 1392 bp, Artificial Sequence
  derived and/or modified sequence
atggacgagcggctgctgggcccccccccccccggcggcggccggggaggtctgggcctcgtctcaggcgaacccggcgggccgggggagccgcccggtggcggggaccccggtggaggctcaggcggtgtgcccggcggtcgcgggaagcaggatattggagacatcctgcagcagatcatgaccattaccgaccaaagtttggacgaggcacaggcgaagaagcatgccctgaactgtcaccgtatgaagccagcattgttctcggtgctgtgtgagatcaaggaaaagacgggattgagtatcagaagttctcaggaagaggagcccgtggatccccagctcatgcgcctggataatatgcttctcgccgaaggtgtcgccgggccagagaagggaggcgggagtgccgcagccgccgccgccgcagccgccagcggcggtggagtttccccagacaactctattgagcattccgactaccggtcaaagctagcccaaatccgacacatttaccacagcgagctggaaaaatacgagcaggcgtgtaacgagttcaccacacatgttatgaatctgctccgggagcagagtcgaactaggcccgtcgcgccaaaggagatggaaagaatggtgtccataatacaccgaaagtttagcgctatccagatgcagttgaaacaaagcacttgcgaggccgtcatgatcctgaggtctaggttcctggatgctcgaagaaagcgacggaatttcagtaaacaagccacagaggtcctcaatgagtatttctactctcatctgtcaaatccatatcccagtgaagaggctaaggaggagctagctaaaaagtgcgggattacagtctcccaagtcctctggcgactgcgagaggagttgtctgggaaagtccacgcttcacagctgggtgcggtcgtctccaactggttcgggaataagaggataaggtacaaaaaaaacataggtaagtttcaagaagaggccaatatttacgcagtaaagactgcagttataatcgccgagcgaggcccattcggcgtaagaggtacggaattgagcctgcctagtctgccccctcagggctccggagggtcctttaatctgtccgggtctggggacatgtttcttggaatgccaggcctcaatggtgatagctacagcgcttcacaggtgagatgcccatctccattacaggtggagagcctgcgccatagcatgggccctgggggctacggagataatcttggaggcggccagatgtatagtccccgtgaaatgagagccaatggaagttggcaggaggccgtgactccctcctccgtcactagcccaaccgaaggcccgggatctgtgcactctgacacttcgaactag

SEQ ID NO: 129947 - DNA, 1317 bp, Artificial Sequence
  derived and/or modified sequence
atggacgagcggctgctgggcccccccccccccggcggcggccgggggggactggggctcgtgtccggagaacctggcggacctggggagcccccagggggcggcgatcccggggggggcagcgggggggtgcccggagggaggggcaaacaggatattggtgacattctgcagcagattatgacaatcaccgaccaatccttggatgaggctcaagccaagaaacacgcattaaattgtcatcgtatgaaaccggccctgttttccgttttgtgtgagattaaagagaagaccggcctctccattcggtcctcacaggaagaggagccagtggatccccagctgatgaggcttgataacatgctccttgctgagggagtggccggccctgaaaagggggggggtagcgcagcagcagcagctgccgcggctgcttccggaggcggtgtgtccccggacaattctatcgagcacagtgactaccggtctaaactggctcaaattagacatatctatcattccgaattggagaaatacgagcaagcatgtaacgaattcactacacacgtgatgaacctgctcagggagcaatccagaacccgtcctgtcgcccccaaagagatggaaagaatggtcagtataattcaccgaaagttttccgccatacaaatgcaactgaaacaatcaacctgcgaagcagtaatgattctcagatcacggttcctagacgcccgccggaagcgcagaaacttttccaagcaagcgaccgaagtactgaacgagtacttctattcccacctgagcaacccgtatcctagtgaagaggccaaggaggaactggccaaaaagtgcgggataacagtgtcacaagtgtccaattggttcggaaataagcgcatccggtacaagaaaaacatcggtaagttccaggaggaggctaacatttacgcggtgaaaaccgccgtgtccgtaactcaagggggtcattcccgcaccagtagcccaacacccccttcctccgccggttctgggggcagtttcaacctctcaggatcgggagacatgtttctggggatgccaggcttgaatggcgacagttatagcgcctcccaggtgcggtgcccaagtcctctgcaggtcgaatcactgcgtcatagcatgggccctggaggctacggagacaatttgggcgggggacagatgtactccccaagagaaatgagagcgaacggttcctggcaggaggctgtcaccccctcttccgtgacatcccccacagagggccccggctccgtgcactcggacactagcaattag

SEQ ID NO: 129948 - DNA, 1317 bp, Artificial Sequence
  derived and/or modified sequence
atggacgagcggctgctgggcccccccccccccggcggcggccggggagggttgggcctagtcagtggcgagcccggcggtcccggagaaccgcccggtggtggggacccgggaggaggctctggaggggtccccgggggcagaggaaagcaggatatcggagatattctccagcagatcatgacaattactgatcagagtctcgatgaagcccaggccaagaaacatgccttgaattgccacagaatgaaacccgcgttattttccgtgctgtgcgaaatcaaagagaaaaccggactcagcattagatccagccaggaagaggagccagttgatcctcagctaatgcggctggacaacatgttactagcagagggcgtggctggcccagaaaaggggggtggctccgccgctgcggcagcagcagctgccgcaagtggcgggggcgtctccccagacaacagtatagagcacagcgactacagatcaaagttagcccagatccgccacatttaccactctgaactggagaaatacgagcaggcatgcaacgagtttacaacacacgtgatgaatctgctgcgcgaacaatcgagaactcggccagtggctccgaaggagatggagcggatggtctctatcatccacagaaagttctcggcaattcagatgcagctaaagcaaagcacctgcgaagctgttatgatcctcaggagccggtttctggatgcccgaaggaaaaggcgcaacttctccaaacaggctaccgaagtgctgaatgagtacttctattcccacctgagtaatccgtatccatcagaagaggctaaagaagaactagctaagaaatgtggcatcacggtgtcccaggtgagcaattggttcgggaataagcgcatcagatataagaaaaacattggaaagtttcaagaggaggcaaacatttacgccgtgaaaaccgccgtttctgtgactcaagggggacattcacggacctcctcaccaactccccccagctcagctgggagtgggggaagctttaacctgagcggcagcggcgacatgttcctggggatgcctggtcttaacggtgactcatactccgcaagtcaggtgcggtgcccatctcctttgcaagtcgaaagcttacgacactccatgggaccgggcgggtatggagacaacctgggcggcggacagatgtactcaccgcgtgagatgcgggccaatggcagctggcaagaggctgtcactcccagcagtgtcacgtcacctaccgaagggcctggatcagtccacagtgatacaagcaattag

SEQ ID NO: 129949 - DNA, 1392 bp, Artificial Sequence
  derived and/or modified sequence
atggacgagcggctgctgggcccccccccccccggcggcggccgggggggcttaggactagtgtctggggagcctggtggtccaggcgaacccccggggggcggagatcctggtggaggcagtgggggggttccaggcggccgcggtaaacaggacataggcgacatcctgcagcaaataatgacaattaccgaccagagcctagatgaggctcaggctaagaaacacgcactgaattgccaccgtatgaaacccgctctgtttagcgtgctgtgcgaaataaaggaaaaaaccggcctctccattcggtctagccaggaagaggagccagttgacccgcaattaatgcggttagacaatatgctcctggcggaaggagtggcgggccccgaaaaaggtgggggctctgccgccgccgccgccgcagccgccgcaagcggcggcggcgtctctcccgataacagcatagagcatagcgactataggtcaaagctggcacagatccgccatatctaccattctgaattggaaaagtatgagcaggcctgtaatgaattcactacacacgttatgaacctgcttcgagaacagtctaggacccgtccggttgcccctaaggagatggaacgcatggtctctattatccaccggaagttcagcgctatacagatgcagcttaaacaatctacctgcgaagccgtcatgatcctcagatctcgctttctagacgcccgccgaaaacggcggaatttttcaaaacaagccacagaggtgctgaatgagtacttctactcccacctctctaacccttaccccagcgaagaagctaaggaggagttagcaaaaaagtgtgggattacagtctcccaggtcctttggcgattaagggaggagctctctggcaaagttcatgcatcccagctaggagccgtggtctctaactggtttggaaacaagaggatccggtacaagaaaaatattgggaaattccaggaggaggccaatatatacgccgtcaaaacagccgtcattatcgctgagcgtgggccattcggagtgcggggaaccgagctgagcctgccgagcttgcctccccagggatccggcggtagttttaacctaagtgggagcggtgacatgtttctcggaatgcctggactgaacggagattcttatagcgccagtcaggtgagatgcccttccccactccaggtcgaaagcctgcgccactccatgggtccgggaggctacggagacaaccttggcggagggcaaatgtatagccctcgcgaaatgcgagccaatggatcgtggcaggaagccgtgactccaagcagtgttacttcccctacagaggggcccggaagcgtacacagtgatacttctaactag

SEQ ID NO: 129950 - DNA, 1392 bp, Artificial Sequence
  derived and/or modified sequence
atggacgagcggctgctgggcccccccccccccggcggcggccggggcgggttggggctggtttctggcgagccagggggcccaggggagccgcctgggggaggtgaccctggtggtggctctggtggcgtgccgggtgggcgcggcaagcaggatattggcgacattttgcagcaaattatgacaatcacggatcaatccttggatgaagcccaggccaaaaaacatgcacttaattgtcatagaatgaaacctgccctgttctcggtgctgtgcgagatcaaagaaaagactggactgtcgatcagaagctcccaagaggaagaacccgtcgacccccaactcatgaggttggacaatatgcttctcgcagaaggtgtggccgggcccgaaaagggcggggggtctgcggccgccgctgcggcggccgcggcttctgggggtggagtgagtcctgataattcgatcgagcactctgattatcggtctaagctggcccaaattagacatatctaccatagtgaattggagaagtatgaacaggcatgcaacgagttcaccacccacgtgatgaatctcctgcgcgagcagagccgaacgcggcctgtggcacccaaagaaatggaaaggatggtaagcattatccacagaaagttttccgctatccaaatgcagctgaagcagtctacctgtgaagccgtaatgattctgcggtcccgctttctcgacgctagacgcaagagacggaatttcagcaagcaggcgaccgaggtcctcaacgaatacttctactctcatctgtccaatccatacccaagcgaggaagccaaagaggaactagcaaagaagtgcggcattactgtgagtcaggtactgtggcgcctgcgagaggaactcagcggtaaggtgcatgcttcacaacttggcgctgttgtgagtaattggttcggaaataagagaatacggtacaagaaaaacatcggaaaatttcaagaggaggccaatatctacgcagtgaagaccgcagtcataatcgccgagcgaggtccgttcggggtgagagggaccgagctgtccctgcctagtcttcctccacagggttctgggggttcatttaatctctctggttcaggggacatgttcttgggtatgcctgggttgaatggagacagttacagtgccagccaggtacgatgcccctctccccttcaggtcgaatctctcaggcacagcatggggcctggcggctacggagacaatctgggaggcggacaaatgtattcccctcgtgaaatgagggcaaatgggagctggcaagaggctgttactccttcaagcgtgacatctccaactgaaggaccaggatctgtgcactcagacacctcaaattag

SEQ ID NO: 129951 - DNA, 1332 bp, Artificial Sequence
  derived and/or modified sequence
ggcgccgagcagggcggcggcctgcgggcccccccccagctgtggactaacggatactggggcaggcctctccaggctggggccggaggactgggcttggtgtctggcgaacccggcggacccggggagccaccgggaggaggagaccccgggggcggctccggaggagtgccagggggacggggtaaacaagatattggggacatcctacagcagatcatgacaattacggaccaaagcctcgatgaagcacaagccaaaaaacatgctctgaactgccatagaatgaagcccgcgcttttcagtgtgctatgcgagatcaaggagaaaaccgggctctcaataagatcaagccaagaggaagaacctgtggacccccagttaatgcgcctcgacaatatgctgctagcggagggtgttgctggtcctgagaaaggcgggggctctgccgcggctgctgcagccgctgccgcgtccgggggcggtgtgagccctgataattcgattgaacatagcgattacaggtcaaagctagcccaaatccggcacatttaccactcagaattagagaagtacgagcaggcgtgcaacgagttcaccacccacgtgatgaacctgctgcgcgaacaatctcggacgcgtcctgtcgccccaaaagaaatggagagaatggtgtcaattattcaccggaaattctcggctatccagatgcagctgaagcagtcaacatgcgaggccgtgatgattctgcgctctaggttcctggatgcacgaaggaaacgacgaaacttttccaaacaagcaactgaggttctgaacgaatatttttattctcacctgagcaacccatatccgtccgaggaggccaaggaggagcttgcgaaaaaatgtggtatcaccgtgtctcaagtgtctaactggtttggcaataaaagaatcagatataagaaaaatatcggaaagtttcaagaagaagccaacatatatgccgtgaaaactgccgtgagcgtaacccagggggggcactccaggacgtctagcccgacgcctcccagcagtgctgggtcgggcggatctttcaacctgagcggctccggggatatgtttctggggatgcccggacttaatggcgacagctatagcgccagtcaagtagaatctctcaggcacagtatggggccgggagggtacggggataatctaggaggtggccagatgtacagcccaagagagatgagagccaatggatcttggcaggaagctgtaaccccgtcaagcgtcacatcaccgacagaaggccctggttcagttcatagtgacacctctaattag

SEQ ID NO: 129952 - DNA, 1332 bp, Artificial Sequence
  derived and/or modified sequence
ggcgccgagcagggcggcggcctgcgggcccccccccagctgtggacaaacgggtactggggccgacccctccaggctggcgctggcgggctgggcttagtctctggagaaccaggggggcctggcgaacccccggggggcggtgaccccggtggtgggtcagggggagtgcccgggggcagaggcaagcaggacattggtgatattttacaacagatcatgaccattaccgaccaaagcctggatgaggcacaagctaaaaagcacgctctgaattgccaccggatgaagccggctttgttcagcgtcttgtgcgagatcaaagaaaagacgggactgagcattcggtcctctcaggaagaggagccagtcgaccctcagctgatgcggctggacaatatgctcctggccgagggtgtcgccggcccggagaagggtggcgggtccgcagcggccgcggcagcagccgcagcctcaggcggcggcgtatcccctgataatagcattgagcactcagactaccgctctaaacttgcacagatacgccacatttatcactccgaattggaaaagtacgagcaagcctgtaacgaattcacaactcatgtgatgaatttacttcgagaacaatctcgcacgcggccggttgctccaaaagagatggagcgaatggtgagcataattcaccggaagttcagcgccatccaaatgcaacttaagcagtccacttgcgaagccgttatgatcttacgaagccggtttctggacgccaggcggaaacggaggaatttcagtaagcaggcaacggaggtgctgaatgagtacttctacagccatctaagcaacccatatccgagcgaggaggcgaaagaagaactcgcaaagaagtgcgggataactgtctcccaagtgtccaactggttcggtaataagagaatcaggtacaaaaagaacattggtaaatttcaggaagaggccaacatctacgctgtgaagacagcagttagcgtcacacagggaggccacagccgtacttcatccccaacacctccctcctcagccggtagcggcggatctttcaacctatctggtagcggcgacatgttcctgggcatgcctggcctcaacggggattcatacagcgcctcccaggtggagtctcttcgccacagtatgggacctggcggatatggagacaatttggggggcggacagatgtactccccacgagaaatgcgagctaacggatcctggcaggaggccgtgaccccgtcaagtgtcacttcccccactgagggccccggctcagtacattctgatacatccaactag

SEQ ID NO: 129953 - DNA, 1317 bp, Artificial Sequence
  derived and/or modified sequence
atggacgagcggctgctgggcccccccccccccggcggcggccggggcgggctgggtctggttagtggcgagcccggcgggccaggcgagccccccggaggtggcgaccccggcggcggctccggcggcgtgcccgggggacgggggaaacaggacattggagacatactccaacagatcatgaccattaccgatcaaagcctggatgaagcccaagccaagaagcacgcccttaattgtcacagaatgaaaccagcgctattctccgtcttatgcgaaatcaaggaaaaaacaggactcagcataagatcatcacaggaggaagagcctgttgatccccagctcatgaggctggataatatgctcctcgcagagggggtcgccggccccgaaaaagggggagggagtgccgccgctgcagccgccgcggcagctagcggtggtggcgtaagtcccgacaatagtatcgagcatagtgactacagaagtaaactggcccagattagacatatatatcacagcgaactggagaaatacgagcaagcctgtaatgaattcaccacccatgtcatgaacctgctcagggagcagagccggacacgcccagtagctcccaaggaaatggagagaatggtctcaattatccacaggaagttctctgccatccagatgcagctgaagcagtctacctgcgaggcagttatgatccttcgatctcgatttctggatgctcggcgtaagcggagaaatttttccaaacaggccaccgaggtgctgaatgaatacttttattcacatttgagtaacccctatccttctgaagaggcaaaggaagagctcgcaaaaaaatgtggaattacagtgtcccaggtatctaactggttcggaaacaaacgaatacgctacaagaagaatatcggcaaattccaggaagaggccaacatttacgcagtgaaaactgcggttagtgtgacccagggcggacactcacgcacatcctctcctacacctccgtcctctgctgggtcaggcggaagtttcaacctctcaggatcaggggacatgtttttgggtatgccagggctgaacggggattcttacagtgcctctcaggtcagatgtccatcgcctttgcaggttgaatctctccgccattcaatggggcccgggggatacggcgacaacctagggggcggccagatgtattcaccaagggagatgagggccaatggatcctggcaggaggccgtgacgccttcttccgtgacttcgcccactgaagggccaggatctgttcactcagatactagcaactag

SEQ ID NO: 129954 - DNA, 1380 bp, Artificial Sequence
  derived and/or modified sequence
atggacgagcggctgctgggcccccccccccccggcggcggccggggtggcctaggtctggtttccggcgagcccggggggccgggggaaccccctggaggtggggacccaggcggagggagcggcggggtacctggtggccgaggcaagcaggacataggcgatattctgcagcagattatgacaattacagatcaatcactggatgaagcacaggccaaaaaacacgccctgaactgtcatcgcatgaagcctgcactgttcagtgtcctgtgtgagatcaaagaaaagactggcctgagtatccggagttctcaggaggaagagccggtggacccccagctgatgcgcctggacaatatgctgctggccgagggcgtggcaggcccagaaaagggcgggggaagcgctgctgccgcagcggccgccgccgcatccggaggaggtgtgagccccgacaattccatcgaacactctgattacaggtcaaagttagcccagatacgtcacatctaccactccgaactggaaaaatatgagcaagcctgcaacgagttcaccacgcacgtcatgaatcttctccgtgaacaaagccgtacccgccccgtggcgccaaaggagatggagagaatggtctcaattattcaccgtaagttctccgcaatccagatgcaattaaaacagtccacgtgtgaggccgtgatgattctccgctccaggttcctggatgccaggcggaagcggcgaaacttcagcaagcaggctaccgaagtgctgaacgaatacttttattcccacctatcaaacccttacccaagtgaagaggccaaggaggaactggcgaagaagtgtggaatcacggtgagccaggtgctgtggaggctcagggaggaactgtccggcaaggtacacgcatctcagctgggagctgtggtgagtaattggttcggaaataaacgtattcgctacaagaaaaacatcgggaagtttcaggaggaggccaacatttacgccgtgaaaacagcggtgtccgtgactcagggaggacactcgaggacctcaagcccaacccctccaagcagtgcgggctcaggcggcagcttcaatctcagcggttccggcgatatgttcctggggatgccagggctaaatggcgacagctactccgcatcacaggtgcgttgccccagcccccttcaggtcgagagcttgcgccactccatgggccctggcgggtatggtgacaatttaggtgggggccagatgtatagcccacgggagatgcgcgcaaacggatcttggcaggaggcagtaactccatccagtgtcacttcccctaccgaaggtcctggatctgtccattctgatacatcaaattag

SEQ ID NO: 129955 - DNA, 1332 bp, Artificial Sequence
  derived and/or modified sequence
ggcgccgagcagggcggcggcctgcgggcccccccccagctgtggacaaacgggtactggggccgcccacttcaagccggagccgggggacttggcctggtgtcaggcgagcccggcggacccggcgaaccacccggcggtggcgatcccggcggtggctctgggggagtgcccggggggcgggggaagcaagatatcggagacatactgcagcagattatgaccatcacagaccagtctcttgacgaggcccaggccaaaaagcacgctctgaattgccacaggatgaaaccagcgcttttcagtgtgctctgtgaaatcaaagaaaagacggggctgtccattaggtccagccaggaagaggaacctgtcgaccctcagctcatgcgtttagataatatgcttttagcagaaggagtagcggggcctgagaagggaggcgggtctgctgctgccgccgccgccgctgctgcttccggcggcggggtgtctcctgacaattcgatagagcattcagattatagatccaaacttgctcagatccgtcacatctaccactccgaacttgagaaatacgagcaggcctgtaacgagttcacaacccacgtcatgaatctacttcgagagcaatcaaggacaagaccagtggcgccaaaagagatggagcggatggtctccattatccaccggaagttctcagccattcaaatgcaactgaaacaaagtacatgcgaggccgtcatgatccttcgatcccgattcctagacgcacgtagaaaaagacgaaacttttctaagcaagctactgaagtgctaaatgagtacttttatagtcatctctctaatccctatccttccgaagaggccaaggaggaactggccaagaaatgcggtattaccgtctctcaagtcagtaactggtttggaaataagagaattcggtacaaaaagaatataggtaagtttcaagaagaagctaacatatacgctgtaaagaccgcagtctccgtgactcagggcggccacagccgtacttcgtctcctactcccccctcttctgccggaagcggcggctctttcaatctctcaggaagcggtgacatgttcctcgggatgccaggccttaatggggactcctactcagcctctcaggttgagtctctccgacattctatggggcctggaggctacggggacaacctgggcggaggtcagatgtatagtccccgagaaatgagagctaacggatcttggcaggaagcagtgaccccatcttccgtcacttcgccaactgaggggcctggctcagtgcactctgacactagcaattag

SEQ ID NO: 129956 - DNA, 1317 bp, Artificial Sequence
  derived and/or modified sequence
atggacgagcggctgctgggcccccccccccccggcggcggccggggcggacttggcttggtcagcggggagcctggaggacccggagagccaccgggcggcggagatcccggcggtggctccgggggcgttcccggagggcgcggcaaacaggatatcggggacattttacagcaaattatgaccatcactgaccagtctcttgatgaagctcaggccaaaaagcatgctctcaactgccaccggatgaagcccgctctcttctctgtcttgtgcgaaatcaaagagaaaaccgggctgtcaatcagaagtagtcaggaagaagaaccagttgacccccaactgatgagattggacaatatgctcttggctgagggggttgccggccccgagaagggaggtggaagtgcagcagcagcagccgctgctgctgctagcggaggtggagtgagtcctgataattccatcgagcattctgactaccgaagcaaattagcccagattcggcatatctaccatagcgagcttgaaaagtacgagcaggcatgcaacgaatttacaactcacgtcatgaacctcctgagggagcagtcacgcactagaccagtcgcccccaaggagatggaaaggatggtaagcatcatacaccgcaaattctctgccattcagatgcagctgaagcagtccacctgcgaggcagtcatgattctcaggtcccggtttctggacgcccggagaaagaggagaaacttcagcaagcaggctactgaagtgttaaatgagtacttttatagtcacctctctaatccttatccttctgaagaagcgaaagaggaattagcaaagaaatgtggcattacagtctcacaggtaagtaactggtttggcaacaagcggatcaggtacaagaagaatataggcaagttccaggaggaggctaacatctatgctgtgaagactgccgtgagtgtgacgcagggggggcattctcgaacttcatctccgacccccccctcctcagcagggagtggcggcagcttcaatctgtccgggtctggggacatgtttcttggcatgccaggtctaaacggggattcttattccgcttcccaggtgaggtgcccatcgcctctgcaagttgagtcactgcgacactccatgggacccggaggctatggggataacctgggggggggacagatgtattccccaagggaaatgcgcgcgaatgggtcttggcaggaagccgttacaccttcctcagtgacatcccctacagagggtccagggtcagtacattccgatacaagcaattag

SEQ ID NO: 129957 - DNA, 1317 bp, Artificial Sequence
  derived and/or modified sequence
atggacgagcggctgctgggcccccccccccccggcggcggccggggcggcctcggactggtctctggagagcccggcggacccggcgagccacctgggggcggggaccctggtggaggaagtggcggcgtgcccggagggagagggaaacaggacattggagatattcttcagcaaattatgacaatcaccgatcaatcgttagacgaggcacaagctaaaaaacatgcactcaactgccatagaatgaagcccgcccttttctccgtcttgtgcgaaataaaggaaaagactggactctcgattcggtcaagccaggaggaggagcccgttgacccccagcttatgcggctggacaatatgttgctggccgagggcgtcgccggccccgaaaagggggggggctccgctgcagcagcggcagccgccgctgcctctgggggtggcgtctcccctgataactcgatcgagcactcagattaccggagcaaacttgcccagatcagacatatctaccatagtgagttggaaaaatacgagcaggcctgcaatgagttcacaactcacgtgatgaaccttcttagggagcagtcacgcacaagacctgtggcgcccaaggagatggagagaatggtcagcattatccatcgcaagttttccgccattcagatgcagttaaaacagagcacctgtgaagccgtaatgatactccgctcccggttcttagatgcgagacggaaaaggagaaatttttcaaaacaggccacagaagtgctgaatgagtacttctacagtcatctgagcaatccatacccaagtgaagaggcaaaggaggagcttgccaagaaatgcgggatcaccgtaagtcaagtttcaaactggttcggcaacaagaggatacgatacaaaaaaaatattggcaagttccaggaagaagccaatatttacgctgtgaagaccgcagttagcgtgacccagggcggacactctagaacttccagcccaacccccccctccagcgccgggtccggaggcagcttcaatttgagtggctccggtgacatgtttctcggcatgcccggcttaaacggggacagttacagcgcaagtcaagtacggtgtccctctcctttacaagtggagagcctcagacacagtatgggtccgggcgggtacggagataacctggggggcggtcagatgtactcaccccgcgaaatgcgggccaacggcagttggcaggaggctgttacgccctcctcagtgacttccccaaccgaaggtcccggctccgttcactccgatactagcaactag

SEQ ID NO: 129958 - DNA, 1332 bp, Artificial Sequence
  derived and/or modified sequence
ggcgccgagcagggcggcggcctgcgggcccccccccagctgtggactaatggatactggggtagaccactgcaggcaggcgccggcggactaggcctggtgagcggtgagccaggcggacctggtgagcctccgggcggtggtgaccctgggggcgggtctggaggtgtgccaggaggcagaggcaaacaggacattggagatattttacagcagatcatgaccatcaccgatcagagccttgacgaggcacaggccaaaaaacacgcactgaactgccaccgtatgaaaccggccctcttctcagtgctgtgcgaaattaaagaaaagaccgggttgagtattaggtcttcccaggaggaagaaccggtagaccctcagctgatgagactggacaacatgctgctcgccgagggggtggccgggccggagaaaggagggggcagcgccgcagctgcggcagctgccgccgcttctggggggggggtgtccccagataactcaatcgaacacagcgattaccgaagtaaactcgcccaaatacgacatatttatcactctgagttggaaaagtacgaacaagcatgtaacgagttcaccactcatgtgatgaacctgctgcgggagcagtctagaactagaccggttgccccaaaagagatggagagaatggtttccataattcacagaaaattctcagccatccagatgcaacttaaacagtccacctgtgaagcggttatgattctgagatcgagatttctagatgcgcgtcggaagcggaggaacttcagcaaacaggctacggaagtgctgaatgagtacttttacagccatctttccaacccataccccagcgaagaagcaaaagaagagctggccaagaagtgtggcattacagtgtcccaagtaagcaactggtttggtaacaagcgcatccgctacaagaaaaacatcggtaagtttcaagaggaagccaacatttatgcagtgaaaacagcagtatcagtcacacagggtggacatagccggacttcatcacccacaccccccagctcggccggctccggtggatcattcaatttgtctgggtcaggcgacatgttcttagggatgcctggattgaatggcgattcttattctgcttctcaagtggagtctctgcgccacagcatggggcccggcggctatggcgataatcttgggggaggccaaatgtactcccctcgtgaaatgcgagcaaatggctcctggcaggaggctgtgacgcccagctcagttacgtctcctacagaaggacctggttccgttcactccgatacctccaactag

SEQ ID NO: 129959 - DNA, 1392 bp, Artificial Sequence
  derived and/or modified sequence
atggacgagcggctgctgggcccccccccccccggcggcggccggggaggattaggccttgtgagcggcgagccagggggacccggggagccacccggtgggggggaccccggcggcggcagcggaggcgtgccaggaggccgtggaaaacaggacattggcgatatcttgcagcagattatgactattaccgaccagtccctagacgaagcccaagccaaaaagcacgccttgaattgtcacagaatgaagccagctttgttcagcgtcctgtgtgaaatcaaagagaagaccgggctgtcaattcggagttcccaggaagaagagcctgtcgatccacagctgatgagattggacaatatgttgctggctgagggcgtggctggcccagagaagggtggcggatcagccgcggccgccgccgccgcggccgcctctggtggcggcgtcagcccagacaactctattgagcattccgattatagatccaagttagcccaaatacggcacatttatcactccgaactggagaagtatgaacaagcatgcaatgaatttaccactcatgtcatgaatttactgagagaacagagccgcaccagacctgtggctccaaaagagatggaacggatggtaagcatcatacacagaaaattttcagcaatccagatgcaactaaaacagtcaacctgcgaggccgtcatgatcttgagaagcaggttcctagacgctagacggaagcggagaaacttttccaagcaagctaccgaagtgctgaacgaatacttttacagccaccttagcaatccctacccgagcgaggaggctaaggaagagctggccaagaaatgtggtataaccgtatctcaggtcctttggagactgagagaagaattgtccggcaaggtccacgcgtcacagctgggggccgttgtctctaactggttcggtaataagcggatccggtacaagaagaacatcggcaaatttcaagaggaggccaacatttacgctgtgaaaacagcagtcattattgctgaacgcgggcccttcggggttcggggcacggaactttctctacctagcctgccgccgcagggcagcggaggcagtttcaatctaagtggctccggcgacatgtttctcggtatgcctggcctgaatggtgatagctatagcgcctcgcaggttagatgcccaagtccacttcaggtggagtcactgaggcactctatgggccccggaggttatggcgacaatctcgggggcggtcagatgtactctcccagggagatgagggcaaatggcagctggcaggaggccgttaccccatctagtgtgacttccccaaccgagggccccggaagcgtccactctgataccagcaattag

SEQ ID NO: 129960 - DNA, 1332 bp, Artificial Sequence
  derived and/or modified sequence
ggcgccgagcagggcggcggcctgcgggcccccccccagctgtggacgaacggctactgggggcgccccctccaggctggggccggagggctgggacttgtgtcaggagaaccaggagggcccggcgaacctcctggagggggcgaccccggcggcgggagtgggggtgttcccggtgggaggggcaaacaggacatcggtgatatcctgcaacagatcatgaccatcactgaccagtctctggacgaggcacaggctaagaagcatgccctcaattgccaccgcatgaagcctgccctcttttcagtgctttgtgagattaaggagaaaacgggcctatccatccggtcctctcaggaggaggagcccgttgacccgcagctgatgagattggataatatgctgctggctgaaggggtcgccggcccggagaaaggcggggggagcgcagcggccgctgcagcagctgctgctagcgggggcggggtgagtccagataatagcatcgagcactcagactacaggagcaaactggctcagattaggcacatttatcactccgagctcgaaaagtatgagcaggcttgcaacgagttcactacccatgtgatgaacctgctgagggagcagagtagaacacggccagtggccccaaaagagatggagaggatggtctcaatcatccatcgcaagttctcagctatccaaatgcagctcaagcaaagcacatgcgaagcagtgatgatactgcgcagtcgttttctcgatgcaagaagaaaacggaggaatttttcgaagcaggcaacggaggtacttaatgaatacttctattcacacttatccaatccttaccccagcgaggaggccaaagaggagctcgcgaagaaatgcggaataacagtgtcccaggtctcaaattggttcggcaataagagaatccgatacaagaagaatataggaaagttccaggaggaagcaaatatctacgccgtaaagaccgcagtatctgtcacccagggaggacactcacggacatcatccccaactccaccttcctctgccgggagcggcgggtctttcaatttgtccggatccggcgatatgttcctgggaatgcccggcttaaatggagattcctacagtgccagtcaggtggagtccctgagacattccatgggaccaggaggttatggggataaccttggcggcggccagatgtactccccaagagagatgagggctaatggttcctggcaagaggctgttactcccagcagcgtgacttctcctacagaaggacctggctccgtacattccgacacctctaactag

SEQ ID NO: 129961 - DNA, 1332 bp, Artificial Sequence
  derived and/or modified sequence
ggcgccgagcagggcggcggcctgcgggcccccccccagctgtggacgaatgggtactggggaaggccactgcaagcaggagctggggggctaggacttgtctctggcgaacccggcgggccaggggagccacccgggggcggcgaccccgggggtgggagtgggggcgttcccgggggtcggggtaagcaggacatcggggacattctacagcagatcatgacaatcacagaccaaagcctggatgaggctcaagcaaagaagcacgcactaaactgtcatcgtatgaaaccagcacttttctcggtgttgtgcgaaataaaagagaaaacgggtctgtccatacgcagttcacaggaagaagagccggtggatcctcagctgatgcggctggataacatgctactcgccgagggagtggctggacccgagaaaggcggcggatcagcggctgcagctgccgctgccgctgctagcggcggtggagtctcacccgataacagtatcgagcactcggactaccgctctaaattggctcagatacggcacatttaccatagcgaactcgaaaagtatgaacaggcgtgcaacgagtttaccacccatgtgatgaacctgctaagagagcagagtagaactcggccagttgcacccaaggaaatggagaggatggtgagtatcatacatagaaagttctccgctatccagatgcagttgaaacaatccacatgtgaggcagtgatgatcctgagatcgaggtttcttgatgcaagacgcaagagacgcaatttttccaagcaggctaccgaagtgctgaatgagtacttttatagtcacctgagtaacccatacccaagcgaagaggctaaggaggagctggccaagaagtgcggaattacagtgtcacaggtgagcaattggttcggtaacaagcgcattagatacaagaaaaacatcgggaagtttcaagaggaggcaaacatctacgctgtgaaaactgccgtgtcagtgacacaaggagggcacagtcgcaccagttcccctacacctccctcctccgctggtagcggcggttcattcaacctctctggcagtggtgatatgtttcttggaatgcctggtctcaatggagattcttattctgctagccaagtagagtccctccgccacagcatggggcctggcggatacggcgacaatctgggtggtgggcaaatgtactcaccacgcgaaatgagagcaaatgggtcctggcaggaggccgtaacccccagctccgtgacatcccccactgagggcccgggtagtgtgcatagtgatacaagcaactag

SEQ ID NO: 129962 - DNA, 3757 bp, Artificial Sequence
  derived and/or modified sequence
ctctctcacacacacccccgcttgggcctcctctctctctccggctccattttctccgccgccgggggccggggtctcctgtggggggcccagccggtatcccaggtctcccttcagtgccggggtgaacccccgggggagccgggagccgggggcagacgggcgggggttggggcggagggagcagcggccccagcgagtttggggggagaagtaaccaggcggggggaggggcggagcagggagggggcctcagggcccccccccagctatggacgaacggctactggggccgccccctccaggcgggggccgggggggcctgggattggtgagtggggagcctgggggccctggcgagcctcccggtggcggagaccccggtgggggtagcgggggggtcccgggaggccgagggaagcaagacatcggggacattctgcagcagataatgaccatcaccgaccagagcctggacgaggcccaggccaagaaacacgccctaaactgccaccgaatgaagcctgctctctttagcgtcctgtgtgaaatcaaggagaaaactggcctcagcattcggagctcccaggaggaggagccggtggacccacagctgatgcgcttggacaacatgcttctggcagagggtgtggctgggcccgagaaagggggcggctcagcagcagcagctgcagccgctgcagcctctggtggtggtgtgtcccctgacaactccatcgaacactcggactatcgcagcaaacttgcccagatccgtcacatataccactcggagctggagaagtatgagcaggcatgtaatgagttcacgacccatgtcatgaacctgctgagggagcagagccgcaccaggcccgtggcccccaaagagatggaacgcatggtgagcatcatccatcgaaagttcagcgccatccagatgcagctgaagcagagcacctgcgaggctgtgatgatcctgcgctcccgtttcctggatgccagacgaaagcgccgtaacttcagcaaacaggccactgaggtcctaaatgagtatttctactcccacctgagtaacccatatcctagtgaggaggccaaggaggagcttgccaagaagtgtggcatcaccgtgtctcaggtctccaactggtttggcaacaagaggattcgctataagaaaaacatcggaaagttccaagaggaggcaaacatctatgctgtcaagaccgccgtgtcagtcacccaggggggccacagccgcaccagctccccgacacccccttcctctgcaggctctggcggctctttcaatctctcaggatctggagacatgtttctggggatgcctgggctcaacggagattcctattctgcttcccaggtggaatcactccgacactcgatggggccagggggctatggggataacctcgggggaggccagatgtacagcccacgggaaatgagggcaaatggcagctggcaagaggctgtgaccccctcttcagtgacatccccaacggagggaccagggagtgttcactctgatacctccaactgatcttgcccctcagggtcacaggggtgggggctctcacaaggcgacttgaagaggacgcaggcttccagaggacaaaccccaatacaggagaagcacaagacagagaagggccaatggggtcatcccctccctaacgagactctctgtgctgggggtgctaattacatggcaggaagaatggggcctctaaggggagtgtggggtctgtctctcccttttttccatctttttcctctctcgctttctttcttacacagaaacatacacataccgagaaacctatttctcagacccctttttctcctctgtctttctctctccctctcccacacctcacacacacatactcccacttgcaactattctgtttctctcctgggctcccccactttcccttccccaccccacttgtatgctctggaatctgtggagacgccagccctgcccaatcagagatgccaaaaatggggacatgacttctggacagaggacatgggccacgcccccatgcatccccacccccgcccctccggacggcttacttacctcatacgcagctcatcttaaaccaatagaatcgctcggtggacgagagtgtctgactcagatatctacctcggagggagtttctgctactttagggaattattgactgggctttggggttgaacttttttttttttaaagaaagaaaaagaaaccctgggatccatctgttttttttgttgttgttgttgtttttgttgttgttggtggtggtggtggtggtggttcttaatttttaatttagtttggggaagtagcttgtttttttttttataaatatgttgatttcttgtctttttttttttttatttcttactttcccatattaggggtgatagccaaaggggttctggtaagagaaagggggacaaacagaactggtaaagaggcccccctggctccaggcctgtccatcaggaagtaaattttacagggcaccaagctttgccccctaaaatcccttaggtgttctttgttcatgcaggcaggtttctgccgcatttgatgtggaggcagtgaagggcttgccctgctggcctctcatcccccttcttcccacaacccttgggcagggctggactcagtaattttgaggaaattgaagatgccatcttcccctgtgagtgacatgtctttaattttttaaaaaactactatttgaaaattggagggggaagaatgggaagggagttattgccaaatatgttaaatatgggttggggtgcttgtatatgtatcttcctcaatttccccataaatgaggtatctttttgtcacaccaaaatcaaggggtagggagagggaggaggttgcaaaaagccagatgtgggggaaaagtaacatcaacactgtcccatcctcagccctgaactagctaccatctgatcccctcagacattctcaggattttacaagactgtcagagtggggaacccctcccattaaagatccgggcaggactggggacaggttggaagtgtgatgggtgggggggtgggaggcatgggccgggggcagttctctcctcacttgtaaacttgtgtagtttcacagaaaaaaaacaaaatgcagttttaaataaagaaatttcttttttccctgggtttagttgagaatttttttcaaaaaacatgagaaaccccagaaaaaaaatgattttctttcacgaagttccaaacaggtttctctcctgttccccagccttgccttcatgatgcaggcccaattgcacccttgcagacaacagtctggcctgaaccctattgatgcaactttgcgcaatcaagatggggctccagtgggtcaccaggcagccctgatggactgatggaataaataggatcgggggctctgagggaatgagaccctagagggtacactccccatcccccagggaagtgactgtacccagaggctggtagtacccaggggtggggtgataattatttctctagtacctgaaggactcttgtcccaaaggcatgaattcctagcattccctgtgacaagacgactgaaagatgggggctggagagagggtgcaggccccacctagggcggaggccacagcagggagaggggcagacagagccaggaccctggaaggaagcaggatggctgccggaacagcagttggagcctgggtgc

SEQ ID NO: 129963 - DNA, 3210 bp, Artificial Sequence
  derived and/or modified sequence
ctctctcacacacacccccgcttgggcctcctctctctctccggctccattttctccgccgccgggggccggggtctcctgtggggggcccagccggtatcccaggtctcccttcagtgccggggtgaacccccgggggagccgggagccgggggcagacgggcgggggttggggcggagggagcagcggccccagcgagtttggggggagaagtaaccaggcggggggaggggcggagcagggagggggcctcagggcccccccccagctatggacgaacggctactggggccgccccctccaggcgggggccgggggggcctaggattggtgagtggggagcctgggggccctggcgagcctcccggtggcggagaccccggtgggggtagcgggggggtcccgggaggccgagggaagcaagacatcggggacattctgcagcagataatgaccatcaccgaccagagcctggacgaggcccaggccaagaaacacgccctaaactgccaccgaatgaagcctgctctctttagcgtcctgtgtgaaatcaaggagaaaactggcctcagcattcggagctcccaggaggaggagccggtggacccacagctgatgcgcttggacaacatgcttctggcagagggtgtggctgggcccgagaaagggggcggctcagcagcagcagctgcagccgctgcagcctctggtggtggtgtgtcccctgacaactccatcgaacactcggactatcgcagcaaacttgcccagatccgtcacatataccactcggagctggagaagtatgagcaggcatgtaatgagttcacgacccatgtcatgaacctgctgagggagcagagccgcaccaggcccgtggcccccaaagagatggaacgcatggtgagcatcatccatcgaaagttcagcgccatccagatgcagctgaagcagagcacctgcgaggctgtgatgatcctgcgctcccgtttcctggatgccagacgaaagcgccgtaacttcagcaaacaggccactgaggtcctaaatgagtatttctactcccacctgagtaacccatatcctagtgaggaggccaaggaggagcttgccaagaagtgtggcatcaccgtgtctcaggtctccaactggtttggcaacaagaggattcgctataagaaaaacatcggaaagttccaagaggaggcaaacatctatgctgtcaagaccgccgtgtcagtcacccaggggggccacagccgcaccagctccccgacacccccttcctctgcaggctctggcggctctttcaatctctcaggatctggagacatgtttctggggatgcctgggctcaacggagattcctattctgcttcccaggtggaatcactccgacactcgatggggccagggggctatggggataacctcgggggaggccagatgtacagcccacgggaaatgagggcaaatggcagctggcaagaggctgtgaccccctcttcagtgacatccccaacggagggaccagggagtgttcactctgatacctccaactgatcttgcccctcagggtcacaggggtgggggctctcacaaggcgacttgaagaggacgcaggcttccagaggacaaaccccaatacaggagaagcacaagacagagaagggccaatggggtcatcccctccctaacgagactctctgtgctgggggtgctaattacatggcaggaagaatggggcctctaaggggagtgtggggtctgtctctcccttttttccatctttttcctctctcgctttctttcttacacagaaacatacacataccgagaaacctatttctcagacccctttttctcctctgtctttctctctccctctcccacacctcacacacacatactcccacttgcaactattctgtttctctcctgggctcccccactttcccttccccaccccacttgtatgctctggaatctgtggagacgccagccctgcccaatcagagatgccaaaaatggggacatgacttctggacagaggacatgggccacgcccccatgcatccccacccccgcccctccggacggcttacttacctcatacgcagctcatcttaaaccaatagaatcgctcggtggacgagagtgtctgactcagatatctacctcggagggagtttctgctactttagggaattattgactgggctttggggttgaacttttttttttttaaagaaagaaaaagaaaccctgggatccatctgttttttttgttgttgttgttgtttttgttgttgttgttggtggtggtggtggtggttcttaatttttaatttagtttggggaagtagcttgtttttttttttataaatatgttgatttcttgtcttttttttttatttcttactttcccatattaggggtgatagccaaaggggttctggtaagagaaagggggacaaacagaactggtaaagaggcccccctggctccaggcctgtccatcaggaagtaaattttacagggcaccaagctttgccccctaaaatcccttaggtgttctttgttcatgcaggcaggtttctgccgcatttgatgtggaggcagtgaagggcttgccctgctggcctctcatcccccttcttcccacaacccttgggcagggctggactcagtaattttgaggaaattgaagatgccatcttcccctgtgagtgacatgtctttaattttttaaaaaactactatttgaaaattggagggggaagaatgggaagggagttattgccaaatatgttaaatatgggttggggtgcttgtatatgtatcttcctcaatttccccataaatgaggtatctttttgtcacaccaaaatcaaggggtagggagagggaggaggttgcaaaaagccagatgtgggggaaaagtaacatcaacactgtcccatcctcagccctgaactagctaccatctgatcccctcagacattctcaggattttacaagactgtcagagtggggaacccctcccattaaagatccgggcaggactggggacaggttggaagtgtgatgggtgggggggtgggaggcatgggccgggggcagttctctcctcacttgtaaacttgtgtagtttcacagaaaaaaaacaaaatgcagttttaaataaagaaatttcttttttccctggg

SEQ ID NO: 129964 - DNA, 3202 bp, Artificial Sequence
  derived and/or modified sequence
ctctctcacacacacccccgcttgggcctcctctctctctccggctccattttctccgccgccgggggccggggtctcctgtggggggcccagccggtatcccaggtctcccttcagtgccggggtgaacccccgggggagccgggagccgggggcagacgggcgggggttggggcggagggagcagcggccccagcgagtttggggggagaagtaaccaggcggggggaggggcggagcagggagggggcctcagggcccccccccagctatggacgaacggctactggggccgccccctccaggcgggggccgggggggcctgggattggtgagtggggagcctgggggccctggcgagcctcccggtggcggagaccccggtgggggtagcgggggggtcccgggaggccgagggaagcaagacatcggggacattctgcagcagataatgaccatcaccgaccagagcctggacgaggcccaggccaagaaacacgccctaaactgccaccgaatgaagcctgctctctttagcgtcctgtgtgaaatcaaggagaaaactggcctcagcattcggagctcccaggaggaggagccggtggacccacagctgatgcgcttggacaacatgcttctggcagagggtgtggctgggcccgagaaagggggcggctcagcagcagcagctgcagccgctgcagcctctggtggtggtgtgtcccctgacaactccatcgaacactcggactatcgcagcaaacttgcccagatccgtcacatataccactcggagctggagaagtatgagcaggcatgtaatgagttcacgacccatgtcatgaacctgctgagggagcagagccgcaccaggcccgtggcccccaaagagatggaacgcatggtgagcatcatccatcgaaagttcagcgccatccagatgcagctgaagcagagcacctgcgaggctgtgatgatcctgcgctcccgtttcctggatgccagacgaaagcgccgtaacttcagcaaacaggccactgaggtcctaaatgagtatttctactcccacctgagtaacccatatcctagtgaggaggccaaggaggagcttgccaagaagtgtggcatcaccgtgtctcaggtctccaactggtttggcaacaagaggattcgctataagaaaaacatcggaaagttccaagaggaggcaaacatctatgctgtcaagaccgccgtgtcagtcacccaggggggccacagccgcaccagctccccgacacccccttcctctgcaggctctggcggctctttcaatctctcaggatctggagacatgtttctggggatgcctgggctcaacggagattcctattctgcttcccaggtggaatcactccgacactcgatggggccagggggctatggggataacctcgggggaggccagatgtacagcccacgggaaatgagggcaaatggcagctggcaagaggctgtgaccccctcttcagtgacatccccaacggagggaccagggagtgttcactctgatacctccaactgatcttgcccctcagggtcacaggggtgggggctctcacaaggcgacttgaagaggacgcaggcttccagaggacaaaccccaatacaggagaagcacaagacagagaagggccaatggggtcatcccctccctaacgagactctctgtgctgggggtgctaattacatggcaggaagaatggggcctctaaggggagtgtggggtctgtctctcccttttttccatctttttcctctctcgctttctttcttacacagaaacatacacataccgagaaacctatttctcagacccctttttctcctctgtctttctctctccctctcccacacctcacacacacatactcccacttgcaactattctgtttctctcctgggctcccccactttcccttccccaccccacttgtatgctctggaatctgtggagacgccagccctgcccaatcagagatgccaaaaatggggacatgacttctggacagaggacatgggccacgcccccatgcatccccacccccgcccctccggacggcttacttacctcatacgcagctcatcttaaaccaatagaatcgctcggtggacgagagtgtctgactcagatatctacctcggagggagtttctgctactttagggaattattgactgggctttggggttgaacttttttttttttaaagaaagaaaaagaaaccctgggatccatctgttttttttgttgttgttgttgtttttgttgttggtggtggtggtggtggtggtggttcttaatttttaatttagtttggggaagtagcttgtttttttttttataaatatgttgatttcttgtcttttttttttatttcttactttcccatattaggggtgatagccaaaggggttctggtaagagaaagggggacaaacagaactggtaaagaggcccccctggctccaggcctgtccatcaggaagtaaattttacagggcaccaagctttgccccctaaaatcccttaggtgttctttgttcatgcaggcaggtttctgccgcatttgatgtggaggcagtgaagggcttgccctgctggcctctcatcccccttcttcccacaacccttgggcagggctggactcagtaattttgaggaaattgaagatgccatcttcccctgtgagtgacatgtctttaattttttaaaaaactactatttgaaaattggagggggaagaatgggaagggagttattgccaaatatgttaaatatgggttggggtgcttgtatatgtatcttcctcaatttccccataaatgaggtatctttttgtcacaccaaaatcaaggggtagggagagggaggaggttgcaaaaagccagatgtgggggaaaagtaacatcaacactgtcccatcctcagccctgaactagctaccatctgatcccctcagacattctcaggattttacaagactgtcagagtggggaacccctcccattaaagatccgggcaggactggggacaggttggaagtgtgatgggtgggggggtgggaggcatgggccgggggcagttctctcctcacttgtaaacttgtgtagtttcacagaaaaaaaacaaaatgcagttttaaataaagaaatttcttttt

SEQ ID NO: 129965 - DNA, 3202 bp, Artificial Sequence
  derived and/or modified sequence
ctctctcacacacacccccgcttgggcctcctctctctctccggctccattttctccgccgccgggggccggggtctcctgtggggggcccagccggtatcccaggtctcccttcagtgccggggtgaacccccgggggagccgggagccgggggcagacgggcgggggttggggcggagggagcagcggccccagcgagtttggggggagaagtaaccaggcggggggaggggcggagcagggagggggcctcagggcccccccccagctatggacgaacggctactggggccgccccctccaggcgggggccgggggggcctgggattggtgagtggggagcctgggggccctggcgagcctcccggtggcggagaccccggtgggggtagcgggggggtcccgggaggccgagggaagcaagacatcggggacattctgcagcagataatgaccatcaccgaccagagcctggacgaggcccaggccaagaaacacgccctaaactgccaccgaatgaagcctgctctctttagcgtcctgtgtgaaatcaaggagaaaactggcctcagcattcggagctcccaggaggaggagccggtggacccacagctgatgcgcttggacaacatgcttctggcagagggtgtggctgggcccgagaaagggggcggctcagcagcagcagctgcagccgctgcagcctctggtggtggtgtgtcccctgacaactccatcgaacactcggactatcgcagcaaacttgcccagatccgtcacatataccactcggagctggagaagtatgagcaggcatgtaatgagttcacgacccatgtcatgaacctgctgagggagcagagccgcaccaggcccgtggcccccaaagagatggaacgcatggtgagcatcatccatcgaaagttcagcgccatccagatgcagctgaagcagagcacctgcgaggctgtgatgatcctgcgctcccgtttcctggatgccagacgaaagcgccgtaacttcagcaaacaggccactgaggtcctaaatgagtatttctactcccacctgagtaacccatatcctagtgaggaggccaaggaggagcttgccaagaagtgtggcatcaccgtgtctcaggtctccaactggtttggcaacaagaggattcgctataagaaaaacatcggaaagttccaagaggaggcaaacatctatgctgtcaagaccgccgtgtcagtcacccaggggggccacagccgcaccagctccccgacacccccttcctctgcaggctctggcggctctttcaatctctcaggatctggagacatgtttctggggatgcctgggctcaacggagattcctattctgcttcccaggtggaatcactccgacactcgatggggccagggggctatggggataacctcgggggaggccagatgtacagcccacgggaaatgagggcaaatggcagctggcaagaggctgtgaccccctcttcagtgacatccccaacggagggaccagggagtgttcactctgatacctccaactgatcttgcccctcagggtcacaggggtgggggctctcacaaggcgacttgaagaggacgcaggcttccagaggacaaaccccaatacaggagaagcacaagacagagaagggccaatggggtcatcccctccctaacgagactctctgtgctgggggtgctaattacatggcaggaagaatggggcctctaaggggagtgtggggtctgtctctcccttttttccatctttttcctctctcgctttctttcttacacagaaacatacacataccgagaaacctatttctcagacccctttttctcctctgtctttctctctccctctcccacacctcacacacacatactcccacttgcaactattctgtttctctcctgggctcccccactttcccttccccaccccacttgtatgctctggaatctgtggagacgccagccctgcccaatcagagatgccaaaaatggggacatgacttctggacagaggacatgggccacgcccccatgcatccccacccccgcccctccggacggcttacttacctcatacgcagctcatcttaaaccaatagaatcgctcggtggacgagagtgtctgactcagatatctacctcggagggagtttctgctactttagggaattattgactgggctttggggttgaacttttttttttttaaagaaagaaaaagaaaccctgggatccatctgttttttttgttgttgttgttgtttttgttgttgttggtggtggtggtggtggtggttcttaatttttaatttagtttggggaagtagcttgtttttttttttataaatatgttgatttcttgtcttttttttttatttcttactttcccatattaggggtgatagccaaaggggttctggtaagagaaagggggacaaacagaactggtaaagaggcccccctggctccaggcctgtccatcaggaagtaaattttacagggcaccaagctttgccccctaaaatcccttaggtgttctttgttcatgcaggcaggtttctgccgcatttgatgtggaggcagtgaagggcttgccctgctggcctctcatcccccttcttcccacaacccttgggcagggctggactcagtaattttgaggaaattgaagatgccatcttcccctgtgagtgacatgtctttaattttttaaaaaactactatttgaaaattggagggggaagaatgggaagggagttattgccaaatatgttaaatatgggttggggtgcttgtatatgtatcttcctcaatttccccataaatgaggtatctttttgtcacaccaaaatcaaggggtagggagagggaggaggttgcaaaaagccagatgtgggggaaaagtaacatcaacactgtcccatcctcagccctgaactagctaccatctgatcccctcagacattctcaggattttacaagactgtcagagtggggaacccctcccattaaagatccgggcaggactggggacaggttggaagtgtgatgggtgggggggtgggaggcatgggccgggggcagttctctcctcacttgtaaacttgtgtagtttcacagaaaaaaaacaaaatgcagttttaaataaagaaatttcttttt

SEQ ID NO: 129966 - DNA, 3211 bp, Artificial Sequence
  derived and/or modified sequence
ctctctcacacacacccccgcttgggcctcctctctctctccggctccattttctccgccgccgggggccggggtctcctgtggggggcccagccggtatcccaggtctcccttcagtgccggggtgaacccccgggggagccgggagccgggggcagacgggcgggggttggggcggagggagcagcggccccagcgagtttggggggagaagtaaccaggcggggggaggggcggagcagggagggggcctcagggcccccccccagctatggacgaacggctactggggccgccccctccaggcgggggccgggggggcctgggattggtgagtggggagcctgggggccctggcgagcctcccggtggcggagaccccggtgggggtagcgggggggtcccgggaggccgagggaagcaagacatcggggacattctgcagcagataatgaccatcaccgaccagagcctggacgaggcccaggccaagaaacacgccctaaactgccaccgaatgaagcctgctctctttagcgtcctgtgtgaaatcaaggagaaaactggcctcagcattcggagctcccaggaggaggagccggtggacccacagctgatgcgcttggacaacatgcttctggcagagggtgtggctgggcccgagaaagggggcggctcagcagcagcagctgcagccgctgcagcctctggtggtggtgtgtcccctgacaactccatcgaacactcggactatcgcagcaaacttgcccagatccgtcacatataccactcggagctggagaagtatgagcaggcatgtaatgagttcacgacccatgtcatgaacctgctgagggagcagagccgcaccaggcccgtggcccccaaagagatggaacgcatggtgagcatcatccatcgaaagttcagcgccatccagatgcagctgaagcagagcacctgcgaggctgtgatgatcctgcgctcccgtttcctggatgccagacgaaagcgccgtaacttcagcaaacaggccactgaggtcctaaatgagtatttctactcccacctgagtaacccatatcctagtgaggaggccaaggaggagcttgccaagaagtgtggcatcaccgtgtctcaggtctccaactggtttggcaacaagaggattcgctataagaaaaacatcggaaagttccaagaggaggcaaacatctatgctgtcaagaccgccgtgtcagtcacccaggggggccacagccgcaccagctccccgacacccccttcctctgcaggctctggcggctctttcaatctctcaggatctggagacatgtttctggggatgcctgggctcaacggagattcctattctgcttcccaggtggaatcactccgacactcgatggggccagggggctatggggataacctcgggggaggccagatgtacagcccacgggaaatgagggcaaatggcagctggcaagaggctgtgaccccctcttcagtgacatccccaacggagggaccagggagtgttcactctgatacctccaactgatcttgcccctcagggtcacaggggtgggggctctcacaaggcgacttgaagaggacgcaggcttccagaggacaaaccccaatacaggagaagcacaagacagagaagggccaatggggtcatcccctccctaacgagactctctgtgctgggggtgctaattacatggcaggaagaatggggcctctaaggggagtgtggggtctgtctctcccttttttccatctttttcctctctcgctttctttcttacacagaaacatacacataccgagaaacctatttctcagacccctttttctcctctgtctttctctctccctctcccacacctcacacacacatactcccacttgcaactattctgtttctctcctgggctcccccactttcccttccccaccccacttgtatgctctggaatctgtggagacgccagccctgcccaatcagagatgccaaaaatggggacatgacttctggacagaggacatgggccacgcccccatgcatccccacccccgcccctccggacggcttacttacctcatacgcagctcatcttaaaccaatagaatcgctcggtggacgagagtgtctgactcagatatctacctcggagggagtttctgctactttagggaattattgactgggctttggggttgaactttttttttttttaaagaaagaaaaagaaaccctgggatccatctgttttttttgttgttgttgttgtttttgttgttggtggtggtggtggtggtggtggttcttaatttttaatttagtttggggaagtagcttgtttttttttttataaatatgttgatttcttgtcttttttttttatttcttactttcccatattaggggtgatagccaaaggggttctggtaagagaaagggggacaaacagaactggtaaagaggcccccctggctccaggcctgtccatcaggaagtaaattttacagggcaccaagctttgccccctaaaatcccttaggtgttctttgttcatgcaggcaggtttctgccgcatttgatgtggaggcagtgaagggcttgccctgctggcctctcatcccccttcttcccacaacccttgggcagggctggactcagtaattttgaggaaattgaagatgccatcttcccctgtgagtgacatgtctttaattttttaaaaaactactatttgaaaattggagggggaagaatgggaagggagttattgccaaatatgttaaatatgggttggggtgcttgtatatgtatcttcctcaatttccccataaatgaggtatctttttgtcacaccaaaatcaaggggtagggagagggaggaggttgcaaaaagccagatgtgggggaaaagtaacatcaacactgtcccatcctcagccctgaactagctaccatctgatcccctcagacattctcaggattttacaagactgtcagagtggggaacccctcccattaaagatccgggcaggactggggacaggttggaagtgtgatgggtgggggggtgggaggcatgggccgggggcagttctctcctcacttgtaaacttgtgtagtttcacagaaaaaaaacaaaatgcagttttaaataaagaaatttcttttttccctggg

SEQ ID NO: 129967 - DNA, 3210 bp, Artificial Sequence
  derived and/or modified sequence
ctctctcacacacacccccgcttgggcctcctctctctctccggctccattttctccgccgccgggggccggggtctcctgtggggggcccagccggtatcccaggtctcccttcagtgccggggtgaacccccgggggagccgggagccgggggcagacgggcgggggttggggcggagggagcagcggccccagcgagtttggggggagaagtaaccaggcggggggaggggcggagcagggagggggcctcagggcccccccccagctatggacgaacggctactggggccgccccctccaggcgggggccgggggggcctgggattggtgagtggggagcctgggggccctggcgagcctcccggtggcggagaccccggtgggggtagcgggggggtcccgggaggccgagggaagcaagacatcggggacattctgcagcagataatgaccatcaccgaccagagcctggacgaggcccaggccaagaaacacgccctaaactgccaccgaatgaagcctgctctctttagcgtcctgtgtgaaatcaaggagaaaactggcctcagcattcggagctcccaggaggaggagccggtggacccacagctgatgcgcttggacaacatgcttctggcagagggtgtggctgggcccgagaaagggggcggctcagcagcagcagctgcagccgctgcagcctctggtggtggtgtgtcccctgacaactccatcgaacactcggactatcgcagcaaacttgcccagatccgtcacatataccactcggagctggagaagtatgagcaggcatgtaatgagttcacgacccatgtcatgaacctgctgagggagcagagccgcaccaggcccgtggcccccaaagagatggaacgcatggtgagcatcatccatcgaaagttcagcgccatccagatgcagctgaagcagagcacctgcgaggctgtgatgatcctgcgctcccgtttcctggatgccagacgaaagcgccgtaacttcagcaaacaggccactgaggtcctaaatgagtatttctactcccacctgagtaacccatatcctagtgaggaggccaaggaggagcttgccaagaagtgtggcatcaccgtgtctcaggtctccaactggtttggcaacaagaggattcgctataagaaaaacatcggaaagttccaagaggaggcaaacatctatgctgtcaagaccgccgtgtcagtcacccaggggggccacagccgcaccagctccccgacacccccttcctctgcaggctctggcggctctttcaatctctcaggatctggagacatgtttctggggatgcctgggctcaacggagattcctattctgcttcccaggtggaatcactccgacactcgatggggccagggggctatggggataacctcgggggaggccagatgtacagcccacgggaaatgagggcaaatggcagctggcaagaggctgtgaccccctcttcagtgacatccccaacggagggaccagggagtgttcactctgatacctccaactgatcttgcccctcagggtcacaggggtgggggctctcacaaggcgacttgaagaggacgcaggcttccagaggacaaaccccaatacaggagaagcacaagacagagaagggccaatggggtcatcccctccctaacgagactctctgtgctgggggtgctaattacatggcaggaagaatggggcctctaaggggagtgtggggtctgtctctcccttttttccatctttttcctctctcgctttctttcttacacagaaacatacacataccgagaaacctatttctcagacccctttttctcctctgtctttctctctccctctcccacacctcacacacacatactcccacttgcaactattctgtttctctcctgggctcccccactttcccttccccaccccacttgtatgctctggaatctgtggagacgccagccctgcccaatcagagatgccaaaaatggggacatgacttctggacagaggacatgggccacgcccccatgcatccccacccccgcccctccggacggcttacttacctcatacgcagctcatcttaaaccaatagaatcgctcggtggacgagagtgtctgactcagatatctacctcggagggagtttctgctactttagggaattattgactgggctttggggttgaacttttttttttttaaagaaagaaaaagaaaccctgggatccatctgttttttttgttgttgttgttgtttttgttgttggtggtggtggtggtggtggtggttcttaatttttaatttagtttggggaagtagcttgtttttttttttataaatatgttgatttcttgtcttttttttttatttcttactttcccatattaggggtgatagccaaaggggttctggtaagagaaagggggacaaacagaactggtaaagaggcccccctggctccaggcctgtccatcaggaagtaaattttacagggcaccaagctttgccccctaaaatcccttaggtgttctttgttcatgcaggcaggtttctgccgcatttgatgtggaggcagtgaagggcttgccctgctggcctctcatcccccttcttcccacaacccttgggcagggctggactcagtaattttgaggaaattgaagatgccatcttcccctgtgagtgacatgtctttaattttttaaaaaactactatttgaaaattggagggggaagaatgggaagggagttattgccaaatatgttaaatatgggttggggtgcttgtatatgtatcttcctcaatttccccataaatgaggtatctttttgtcacaccaaaatcaaggggtagggagagggaggaggttgcaaaaagccagatgtgggggaaaagtaacatcaacactgtcccatcctcagccctgaactagctaccatctgatcccctcagacattctcaggattttacaagactgtcagagtggggaacccctcccattaaagatccgggcaggactggggacaggttggaagtgtgatgggtgggggggtgggaggcatgggccgggggcagttctctcctcacttgtaaacttgtgtagtttcacagaaaaaaatcaaaatgcagttttaaataaagaaatttcttttttccctggg

SEQ ID NO: 129968 - DNA, 3210 bp, Artificial Sequence
  derived and/or modified sequence
ctctctcacacacacccccgcttgggcctcctctctctctccggctccattttctccgccgccgggggccggggtctcctgtggggggcccagccggtatcccaggtctcccttcagtgccggggtgaacccccgggggagccgggagccgggggcagacgggcgggggttggggcggagggagcagcggccccagcgagtttggggggagaagtaaccaggcggggggaggggcggagcagggagggggcctcagggcccccccccagctatggacgaacggctactggggccgccccctccaggcgggggccgggggggcctgggattggtgagtggggagcctgggggccctggcgagcctcccggtggcggagaccccggtgggggtagcgggggggtcccgggaggccgagggaagcaagacatcggggacattctgcagcagataatgaccatcaccgaccagagcctggacgaggcccaggccaagaaacacgccctaaactgccaccgaatgaagcctgctctctttagcgtcctgtgtgaaatcaaggagaaaactggcctcagcattcggagctcccaggaggaggagccggtggacccacagctgatgcgcttggacaacatgcttctggcagagggtgtggctgggcccgagaaagggggcggctcagcagcagcagctgcagccgctgcagcctctggtggtggtgtgtcccctgacaactccatcgaacactcggactatcgcagcaaacttgcccagatccgtcacatataccactcggagctggagaagtatgagcaggcatgtaatgagttcacgacccatgtcatgaacctgctgagggagcagagccgcaccaggcccgtggcccccaaagagatggaacgcatggtgagcatcatccatcgaaagttcagcgccatccagatgcagctgaagcagagcacctgcgaggctgtgatgatcctgcgctcccgtttcctggatgccagacgaaagcgccgtaacttcagcaaacaggccactgaggtcctaaatgagtatttctactcccacctgagtaacccatatcctagtgaggaggccaaggaggagcttgccaagaagtgtggcatcaccgtgtctcaggtctccaactggtttggcaacaagaggattcgctataagaaaaacatcggaaagttccaagaggaggcaaacatctatgctgtcaagaccgccgtgtcagtcacccaggggggccacagccgcaccagctccccgacacccccttcctctgcaggctctggcggctctttcaatctctcaggatctggagacatgtttctggggatgcctgggctcaacggagattcctattctgcttcccaggtggaatcactccgacactcgatggggccagggggctatggggataacctcgggggaggccagatgtacagcccacgggaaatgagggcaaatggcagctggcaagaggctgtgaccccctcttcagtgacatccccaacggagggaccagggagtgttcactctgatacctccaactgatcttgcccctcagggtcacaggggtgggggctctcacaaggcgacttgaagaggacgcaggcttccagaggacaaaccccaatacaggagaagcacaagacagagaagggccaatggggtcatcccctccctaacgagactctctgtgctgggggtgctaattacatggcaggaagaatggggcctctaaggggagtgtggggtctgtctctcccttttttccatctttttcctctctcgctttctttcttacacagaaacatacacataccgagaaacctatttctcagacccctttttctcctctgtctttctctctccctctcccacacctcacacacacatactcccacttgcaactattctgtttctctcctgggctcccccactttcccttccccaccccacttgtatgctctggaatctgtggagacgccagccctgcccaatcagagatgccaaaaatggggacatgacttctggacagaggacatgggccacgcccccatgcatccccacccccgcccctccggacggcttacttacctcatacgcagctcatcttaaaccaatagaatcgctcggtggacgagagtgtctgactcagatatctacctcggagggagtttctgctactttagggaattattgactgggctttggggttgaacttttttttttttaaagaaagaaaaagaaaccctgggatccatctgttttttttgttgttgttgttgtttttgttgttgttgttggtggtggtggtggtggttcttaatttttaatttagtttggggaagtagcttgtttttttttttataaatatgttgatttcttgtcttttttttttatttcttactttcccatattaggggtgatagccaaaggggttctggtaagagaaagggggacaaacagaactggtaaagaggcccccctggctccaggcctgtccatcaggaagtaaattttacagggcaccaagctttgccccctaaaatcccttaggtgttctttgttcatgcaggcaggtttctgccgcatttgatgtggaggcagtgaagggcttgccctgctggcctctcatcccccttcttcccacaacccttgggcagggctggactcagtaattttgaggaaattgaagatgccatcttcccctgtgagtgacatgtctttaattttttaaaaaactactatttgaaaattggagggggaagaatgggaagggagttattgccaaatatgttaaatatgggttggggtgcttgtatatgtatcttcctcaatttccccataaatgaggtatctttttgtcacaccaaaatcaaggggtagggagagggaggaggttgcaaaaagccagatgtgggggaaaagtaacatcaacactgtcccatcctcagccctgaactagctaccatctgatcccctcagacattctcaggattttacaagactgtcagagtggggaacccctcccattaaagatccgggcaggactggggacaggttggaagtgtgatgggtgggggggtgggaggcatgggccgggggcagttctctcctcacttgtaaacttgtgtagtttcacagaaaaaaaacaaaatgcagttttaaataaagaaatttcttttttccctggg

SEQ ID NO: 129969 - DNA, 2333 bp, Artificial Sequence
  derived and/or modified sequence
cacacccccgcttgggcctcctctctctctccggctccattttctccgccgccgggggccggggtctcctgtggggggcccagccggtatcccaggtctcccttcagtgccggggtgaacccccgggggagccgggagccgggggcagacgggcgggggttggggcggagggagcagcggccccagcgagtttggggggagaagtaaccaggcggggggaggggcggagcagggagggggcctcagggcccccccccagctatggacgaacggctactggggccgccccctccaggcgggggccgggggggcctgggattggtgagtggggagcctgggggccctggcgagcctcccggtggcggagaccccggtgggggtagcgggggggtcccgggaggccgagggaagcaagacatcggggacattctgcagcagataatgaccatcaccgaccagagcctggacgaggcccaggccaagaaacacgccctaaactgccaccgaatgaagcctgctctctttagcgtcctgtgtgaaatcaaggagaaaactggcctcagcattcggagctcccaggaggaggagccggtggacccacagctgatgcgcttggacaacatgcttctggcagagggtgtggctgggcccgagaaagggggcggctcagcagcagcagctgcagccgctgcagcctctggtggtggtgtgtcccctgacaactccatcgaacactcggactatcgcagcaaacttgcccagatccgtcacatataccactcggagctggagaagtatgagcaggcatgtaatgagttcacgacccatgtcatgaacctgctgagggagcagagccgcaccaggcccgtggcccccaaagagatggaacgcatggtgagcatcatccatcgaaagttcagcgccatccagatgcagctgaagcagagcacctgcgaggctgtgatgatcctgcgctcccgtttcctggatgccagacgaaagcgccgtaacttcagcaaacaggccactgaggtcctaaatgagtatttctactcccacctgagtaacccatatcctagtgaggaggccaaggaggagcttgccaagaagtgtggcatcaccgtgtctcaggtattatggaggttgcgggaggagttgtcaggcaaagtgcacgcatctcagctaggtgcagtggtctccaactggtttggcaacaagaggattcgctataagaaaaacatcggaaagttccaagaggaggcaaacatctatgctgtcaagaccgccgtgatcatagcagagagggggccttttggggtgagagggaccgagctgagtcttccctctctgcccccacaaggctctggcggctctttcaatctctcaggatctggagacatgtttctggggatgcctgggctcaacggagattcctattctgcttcccaggtcagatgcccatctcccctgcaggtggaatcactccgacactcgatggggccagggggctatggggataacctcgggggaggccagatgtacagcccacgggaaatgagggcaaatggcagctggcaagaggctgtgaccccctcttcagtgacatccccaacggagggaccagggagtgttcactctgatacctccaactgatcttgcccctcagggtcacaggggtgggggctctcacaaggcgacttgaagaggacgcaggcttccagaggacaaaccccaatacaggagaagcacaagacagagaagggccaatggggtcatcccctccctaacgagactctctgtgctgggggtgctaattacatggcaggaagaatggggcctctaaggggagtgtggggtctgtctctcccttttttccatctttttcctctctcgctttctttcttacacagaaacatacacataccgagaaacctatttctcagacccctttttctcctctgtctttctctctccctctcccacacctcacacacacatactcccacttgcaactattctgtttctctcctgggctcccccactttcccttccccaccccacttgtatgctctggaatctgtggagacgccagccctgcccaatcagagatgccaaaaatggggacatgacttctggacagaggacatgggccacgcccccatgcatccccacccccgcccctccggacggcttacttacctcatacgcagctcatcttaaaccaatagaatcgctcggtggacgagagtgtctgactcagatatctacctcggagggagtttctgctactttagggaattattgactgggctttggggttgaacttttttttt

SEQ ID NO: 129970 - DNA, 2333 bp, Artificial Sequence
  derived and/or modified sequence
cacacccccgcttgggcctcctctctctctccggctccattttctccgccgccgggggccggggtctcctgtggggggcccagccggtatcccaggtctcccttcagtgccggggtgaacccccgggggagccgggagccgggggcagacgggcgggggttggggcggagggagcagcggccccagcgagtttggggggagaagtaaccaggcggggggaggggcggagcagggagggggcctcagggcccccccccagctatggacgaacggctactggggccgccccctccaggcgggggccgggggggcctaggattggtgagtggggagcctgggggccctggcgagcctcccggtggcggagaccccggtgggggtagcgggggggtcccgggaggccgagggaagcaagacatcggggacattctgcagcagataatgaccatcaccgaccagagcctggacgaggcccaggccaagaaacacgccctaaactgccaccgaatgaagcctgctctctttagcgtcctgtgtgaaatcaaggagaaaactggcctcagcattcggagctcccaggaggaggagccggtggacccacagctgatgcgcttggacaacatgcttctggcagagggtgtggctgggcccgagaaagggggcggctcagcagcagcagctgcagccgctgcagcctctggtggtggtgtgtcccctgacaactccatcgaacactcggactatcgcagcaaacttgcccagatccgtcacatataccactcggagctggagaagtatgagcaggcatgtaatgagttcacgacccatgtcatgaacctgctgagggagcagagccgcaccaggcccgtggcccccaaagagatggaacgcatggtgagcatcatccatcgaaagttcagcgccatccagatgcagctgaagcagagcacctgcgaggctgtgatgatcctgcgctcccgtttcctggatgccagacgaaagcgccgtaacttcagcaaacaggccactgaggtcctaaatgagtatttctactcccacctgagtaacccatatcctagtgaggaggccaaggaggagcttgccaagaagtgtggcatcaccgtgtctcaggtattatggaggttgcgggaggagttgtcaggcaaagtgcacgcatctcagctaggtgcagtggtctccaactggtttggcaacaagaggattcgctataagaaaaacatcggaaagttccaagaggaggcaaacatctatgctgtcaagaccgccgtgatcatagcagagagggggccttttggggtgagagggaccgagctgagtcttccctctctgcccccacaaggctctggcggctctttcaatctctcaggatctggagacatgtttctggggatgcctgggctcaacggagattcctattctgcttcccaggtcagatgcccatctcccctgcaggtggaatcactccgacactcgatggggccagggggctatggggataacctcgggggaggccagatgtacagcccacgggaaatgagggcaaatggcagctggcaagaggctgtgaccccctcttcagtgacatccccaacggagggaccagggagtgttcactctgatacctccaactgatcttgcccctcagggtcacaggggtgggggctctcacaaggcgacttgaagaggacgcaggcttccagaggacaaaccccaatacaggagaagcacaagacagagaagggccaatggggtcatcccctccctaacgagactctctgtgctgggggtgctaattacatggcaggaagaatggggcctctaaggggagtgtggggtctgtctctcccttttttccatctttttcctctctcgctttctttcttacacagaaacatacacataccgagaaacctatttctcagacccctttttctcctctgtctttctctctccctctcccacacctcacacacacatactcccacttgcaactattctgtttctctcctgggctcccccactttcccttccccaccccacttgtatgctctggaatctgtggagacgccagccctgcccaatcagagatgccaaaaatggggacatgacttctggacagaggacatgggccacgcccccatgcatccccacccccgcccctccggacggcttacttacctcatacgcagctcatcttaaaccaatagaatcgctcggtggacgagagtgtctgactcagatatctacctcggagggagtttctgctactttagggaattattgactgggctttggggttgaacttttttttt

SEQ ID NO: 129971 - DNA, 2258 bp, Artificial Sequence
  derived and/or modified sequence
cacacccccgcttgggcctcctctctctctccggctccattttctccgccgccgggggccggggtctcctgtggggggcccagccggtatcccaggtctcccttcagtgccggggtgaacccccgggggagccgggagccgggggcagacgggcgggggttggggcggagggagcagcggccccagcgagtttggggggagaagtaaccaggcggggggaggggcggagcagggagggggcctcagggcccccccccagctatggacgaacggctactggggccgccccctccaggcgggggccgggggggcctgggattggtgagtggggagcctgggggccctggcgagcctcccggtggcggagaccccggtgggggtagcgggggggtcccgggaggccgagggaagcaagacatcggggacattctgcagcagataatgaccatcaccgaccagagcctggacgaggcccaggccaagaaacacgccctaaactgccaccgaatgaagcctgctctctttagcgtcctgtgtgaaatcaaggagaaaactggcctcagcattcggagctcccaggaggaggagccggtggacccacagctgatgcgcttggacaacatgcttctggcagagggtgtggctgggcccgagaaagggggcggctcagcagcagcagctgcagccgctgcagcctctggtggtggtgtgtcccctgacaactccatcgaacactcggactatcgcagcaaacttgcccagatccgtcacatataccactcggagctggagaagtatgagcaggcatgtaatgagttcacgacccatgtcatgaacctgctgagggagcagagccgcaccaggcccgtggcccccaaagagatggaacgcatggtgagcatcatccatcgaaagttcagcgccatccagatgcagctgaagcagagcacctgcgaggctgtgatgatcctgcgctcccgtttcctggatgccagacgaaagcgccgtaacttcagcaaacaggccactgaggtcctaaatgagtatttctactcccacctgagtaacccatatcctagtgaggaggccaaggaggagcttgccaagaagtgtggcatcaccgtgtctcaggtctccaactggtttggcaacaagaggattcgctataagaaaaacatcggaaagttccaagaggaggcaaacatctatgctgtcaagaccgccgtgtcagtcacccaggggggccacagccgcaccagctccccgacacccccttcctctgcaggctctggcggctctttcaatctctcaggatctggagacatgtttctggggatgcctgggctcaacggagattcctattctgcttcccaggtcagatgcccatctcccctgcaggtggaatcactccgacactcgatggggccagggggctatggggataacctcgggggaggccagatgtacagcccacgggaaatgagggcaaatggcagctggcaagaggctgtgaccccctcttcagtgacatccccaacggagggaccagggagtgttcactctgatacctccaactgatcttgcccctcagggtcacaggggtgggggctctcacaaggcgacttgaagaggacgcaggcttccagaggacaaaccccaatacaggagaagcacaagacagagaagggccaatggggtcatcccctccctaacgagactctctgtgctgggggtgctaattacatggcaggaagaatggggcctctaaggggagtgtggggtctgtctctcccttttttccatctttttcctctctcgctttctttcttacacagaaacatacacataccgagaaacctatttctcagacccctttttctcctctgtctttctctctccctctcccacacctcacacacacatactcccacttgcaactattctgtttctctcctgggctcccccactttcccttccccaccccacttgtatgctctggaatctgtggagacgccagccctgcccaatcagagatgccaaaaatggggacatgacttctggacagaggacatgggccacgcccccatgcatccccacccccgcccctccggacggcttacttacctcatacgcagctcatcttaaaccaatagaatcgctcggtggacgagagtgtctgactcagatatctacctcggagggagtttctgctactttagggaattattgactgggctttggggttgaacttttttttt

SEQ ID NO: 129972 - DNA, 2012 bp, Artificial Sequence
  derived and/or modified sequence
ggggcggagcagggagggggcctcagggcccccccccagctatggacgaacggctactggggccgccccctccaggcgggggccggggggctgggattggtgagtggggagcctgggggccctggcgagcctcccggtggcggagaccccggtgggggtagcgggggggtcccgggaggccgagggaagcaagacatcggggacattctgcagcagataatgaccatcaccgaccagagcctggacgaggcccaggccaagaaacacgccctaaactgccaccgaatgaagcctgctctctttagcgtcctgtgtgaaatcaaggagaaaactggcctcagcattcggagctcccaggaggaggagccggtggacccacagctgatgcgcttggacaacatgcttctggcagagggtgtggctgggcccgagaaagggggcggctcagcagcagcagctgcagccgctgcagcctctggtggtggtgtgtcccctgacaactccatcgaacactcggactatcgcagcaaacttgcccagatccgtcacatataccactcggagctggagaagtatgagcaggcatgtaatgagttcacgacccatgtcatgaacctgctgagggagcagagccgcaccaggcccgtggcccccaaagagatggaacgcatggtgagcatcatccatcgaaagttcagcgccatccagatgcagctgaagcagagcacctgcgaggctgtgatgatcctgcgctcccgtttcctggatgccagacgaaagcgccgtaacttcagcaaacaggccactgaggtcctaaatgagtatttctactcccacctgagtaacccatatcctagtgaggaggccaaggaggagcttgccaagaagtgtggcatcaccgtgtctcaggtctccaactggtttggcaacaagaggattcgctataagaaaaacatcggaaagttccaagaggaggcaaacatctatgctgtcaagaccgccgtgtcagtcacccaggggggccacagccgcaccagctccccgacacccccttcctctgcaggctctggcggctctttcaatctctcaggatctggagacatgtttctggggatgcctgggctcaacggagattcctattctgcttcccaggtggaatcactccgacactcgatggggccagggggctatggggataacctcgggggaggccagatgtacagcccacgggaaatgagggcaaatggcagctggcaagaggctgtgaccccctcttcagtgacatccccaacggagggaccagggagtgttcactctgatacctccaactgatcttgcccctcagggtcacaggggtgggggctctcacaaggcgacttgaagaggacgcaggcttccagaggacaaaccccaatacaggagaagcacaagacagagaagggccaatggggtcatcccctccctaacgagactctctgtgctgggggtgctaattacatggcaggaagaatggggcctctaaggggagtgtggggtctgtctctcccttttttccatctttttcctctctcgctttctttcttacacagaaacatacacataccgagaaacctatttctcagacccctttttctcctctgtctttctctctccctctcccacacctcacacacacatactcccacttgcaactattctgtttctctcctgggctcccccactttcccttccccaccccacttgtatgctctggaatctgtggagacgccagccctgcccaatcagagatgccaaaaatggggacatgacttctggacagaggacatgggccacgcccccatgcatccccacccccgcccctccggacggcttacttacctcatacgcagctcatcttaaaccaatagaatcgctcggtggacgagagtgtctgactcagatatctacctcggagggagtttctgctactttagggaattattgactgggctttggggttgaacttttttttt

SEQ ID NO: 129973 - DNA, 2321 bp, Artificial Sequence
  derived and/or modified sequence
cacacccccgcttgggcctcctctctctctccggctccattttctccgccgccgggggccggggtctcctgtggggggcccagccggtatcccaggtctcccttcagtgccggggtgaacccccgggggagccgggagccgggggcagacgggcgggggttggggcggagggagcagcggccccagcgagtttggggggagaagtaaccaggcggggggaggggcggagcagggagggggcctcagggcccccccccagctatggacgaacggctactggggccgccccctccaggcgggggccgggggggcctgggattggtgagtggggagcctgggggccctggcgagcctcccggtggcggagaccccggtgggggtagcgggggggtcccgggaggccgagggaagcaagacatcggggacattctgcagcagataatgaccatcaccgaccagagcctggacgaggcccaggccaagaaacacgccctaaactgccaccgaatgaagcctgctctctttagcgtcctgtgtgaaatcaaggagaaaactggcctcagcattcggagctcccaggaggaggagccggtggacccacagctgatgcgcttggacaacatgcttctggcagagggtgtggctgggcccgagaaagggggcggctcagcagcagcagctgcagccgctgcagcctctggtggtggtgtgtcccctgacaactccatcgaacactcggactatcgcagcaaacttgcccagatccgtcacatataccactcggagctggagaagtatgagcaggcatgtaatgagttcacgacccatgtcatgaacctgctgagggagcagagccgcaccaggcccgtggcccccaaagagatggaacgcatggtgagcatcatccatcgaaagttcagcgccatccagatgcagctgaagcagagcacctgcgaggctgtgatgatcctgcgctcccgtttcctggatgccagacgaaagcgccgtaacttcagcaaacaggccactgaggtcctaaatgagtatttctactcccacctgagtaacccatatcctagtgaggaggccaaggaggagcttgccaagaagtgtggcatcaccgtgtctcaggtattatggaggttgcgggaggagttgtcaggcaaagtgcacgcatctcagctaggtgcagtggtctccaactggtttggcaacaagaggattcgctataagaaaaacatcggaaagttccaagaggaggcaaacatctatgctgtcaagaccgccgtgtcagtcacccaggggggccacagccgcaccagctccccgacacccccttcctctgcaggctctggcggctctttcaatctctcaggatctggagacatgtttctggggatgcctgggctcaacggagattcctattctgcttcccaggtcagatgcccatctcccctgcaggtggaatcactccgacactcgatggggccagggggctatggggataacctcgggggaggccagatgtacagcccacgggaaatgagggcaaatggcagctggcaagaggctgtgaccccctcttcagtgacatccccaacggagggaccagggagtgttcactctgatacctccaactgatcttgcccctcagggtcacaggggtgggggctctcacaaggcgacttgaagaggacgcaggcttccagaggacaaaccccaatacaggagaagcacaagacagagaagggccaatggggtcatcccctccctaacgagactctctgtgctgggggtgctaattacatggcaggaagaatggggcctctaaggggagtgtggggtctgtctctcccttttttccatctttttcctctctcgctttctttcttacacagaaacatacacataccgagaaacctatttctcagacccctttttctcctctgtctttctctctccctctcccacacctcacacacacatactcccacttgcaactattctgtttctctcctgggctcccccactttcccttccccaccccacttgtatgctctggaatctgtggagacgccagccctgcccaatcagagatgccaaaaatggggacatgacttctggacagaggacatgggccacgcccccatgcatccccacccccgcccctccggacggcttacttacctcatacgcagctcatcttaaaccaatagaatcgctcggtggacgagagtgtctgactcagatatctacctcggagggagtttctgctactttagggaattattgactgggctttggggttgaacttttttttt

SEQ ID NO: 129974 - DNA, 2258 bp, Artificial Sequence
  derived and/or modified sequence
cacacccccgcttgggcctcctctctctctccggctccattttctccgccgccgggggccggggtctcctgtggggggcccagccggtatcccaggtctcccttcagtgccggggtgaacccccgggggagccgggagccgggggcagacgggcgggggttggggcggagggagcagcggccccagcgagtttggggggagaagtaaccaggcggggggaggggcggagcagggagggggcctcagggcccccccccagctatggacgaacggctactggggccgccccctccaggcgggggccgggggggcctaggattggtgagtggggagcctgggggccctggcgagcctcccggtggcggagaccccggtgggggtagcgggggggtcccgggaggccgagggaagcaagacatcggggacattctgcagcagataatgaccatcaccgaccagagcctggacgaggcccaggccaagaaacacgccctaaactgccaccgaatgaagcctgctctctttagcgtcctgtgtgaaatcaaggagaaaactggcctcagcattcggagctcccaggaggaggagccggtggacccacagctgatgcgcttggacaacatgcttctggcagagggtgtggctgggcccgagaaagggggcggctcagcagcagcagctgcagccgctgcagcctctggtggtggtgtgtcccctgacaactccatcgaacactcggactatcgcagcaaacttgcccagatccgtcacatataccactcggagctggagaagtatgagcaggcatgtaatgagttcacgacccatgtcatgaacctgctgagggagcagagccgcaccaggcccgtggcccccaaagagatggaacgcatggtgagcatcatccatcgaaagttcagcgccatccagatgcagctgaagcagagcacctgcgaggctgtgatgatcctgcgctcccgtttcctggatgccagacgaaagcgccgtaacttcagcaaacaggccactgaggtcctaaatgagtatttctactcccacctgagtaacccatatcctagtgaggaggccaaggaggagcttgccaagaagtgtggcatcaccgtgtctcaggtctccaactggtttggcaacaagaggattcgctataagaaaaacatcggaaagttccaagaggaggcaaacatctatgctgtcaagaccgccgtgtcagtcacccaggggggccacagccgcaccagctccccgacacccccttcctctgcaggctctggcggctctttcaatctctcaggatctggagacatgtttctggggatgcctgggctcaacggagattcctattctgcttcccaggtcagatgcccatctcccctgcaggtggaatcactccgacactcgatggggccagggggctatggggataacctcgggggaggccagatgtacagcccacgggaaatgagggcaaatggcagctggcaagaggctgtgaccccctcttcagtgacatccccaacggagggaccagggagtgttcactctgatacctccaactgatcttgcccctcagggtcacaggggtgggggctctcacaaggcgacttgaagaggacgcaggcttccagaggacaaaccccaatacaggagaagcacaagacagagaagggccaatggggtcatcccctccctaacgagactctctgtgctgggggtgctaattacatggcaggaagaatggggcctctaaggggagtgtggggtctgtctctcccttttttccatctttttcctctctcgctttctttcttacacagaaacatacacataccgagaaacctatttctcagacccctttttctcctctgtctttctctctccctctcccacacctcacacacacatactcccacttgcaactattctgtttctctcctgggctcccccactttcccttccccaccccacttgtatgctctggaatctgtggagacgccagccctgcccaatcagagatgccaaaaatggggacatgacttctggacagaggacatgggccacgcccccatgcatccccacccccgcccctccggacggcttacttacctcatacgcagctcatcttaaaccaatagaatcgctcggtggacgagagtgtctgactcagatatctacctcggagggagtttctgctactttagggaattattgactgggctttggggttgaacttttttttt

SEQ ID NO: 129975 - DNA, 2012 bp, Artificial Sequence
  derived and/or modified sequence
ggggcggagcagggagggggcctcagggcccccccccagctatggacgaacggctactggggccgccccctccaggcgggggccggggggctaggattggtgagtggggagcctgggggccctggcgagcctcccggtggcggagaccccggtgggggtagcgggggggtcccgggaggccgagggaagcaagacatcggggacattctgcagcagataatgaccatcaccgaccagagcctggacgaggcccaggccaagaaacacgccctaaactgccaccgaatgaagcctgctctctttagcgtcctgtgtgaaatcaaggagaaaactggcctcagcattcggagctcccaggaggaggagccggtggacccacagctgatgcgcttggacaacatgcttctggcagagggtgtggctgggcccgagaaagggggcggctcagcagcagcagctgcagccgctgcagcctctggtggtggtgtgtcccctgacaactccatcgaacactcggactatcgcagcaaacttgcccagatccgtcacatataccactcggagctggagaagtatgagcaggcatgtaatgagttcacgacccatgtcatgaacctgctgagggagcagagccgcaccaggcccgtggcccccaaagagatggaacgcatggtgagcatcatccatcgaaagttcagcgccatccagatgcagctgaagcagagcacctgcgaggctgtgatgatcctgcgctcccgtttcctggatgccagacgaaagcgccgtaacttcagcaaacaggccactgaggtcctaaatgagtatttctactcccacctgagtaacccatatcctagtgaggaggccaaggaggagcttgccaagaagtgtggcatcaccgtgtctcaggtctccaactggtttggcaacaagaggattcgctataagaaaaacatcggaaagttccaagaggaggcaaacatctatgctgtcaagaccgccgtgtcagtcacccaggggggccacagccgcaccagctccccgacacccccttcctctgcaggctctggcggctctttcaatctctcaggatctggagacatgtttctggggatgcctgggctcaacggagattcctattctgcttcccaggtggaatcactccgacactcgatggggccagggggctatggggataacctcgggggaggccagatgtacagcccacgggaaatgagggcaaatggcagctggcaagaggctgtgaccccctcttcagtgacatccccaacggagggaccagggagtgttcactctgatacctccaactgatcttgcccctcagggtcacaggggtgggggctctcacaaggcgacttgaagaggacgcaggcttccagaggacaaaccccaatacaggagaagcacaagacagagaagggccaatggggtcatcccctccctaacgagactctctgtgctgggggtgctaattacatggcaggaagaatggggcctctaaggggagtgtggggtctgtctctcccttttttccatctttttcctctctcgctttctttcttacacagaaacatacacataccgagaaacctatttctcagacccctttttctcctctgtctttctctctccctctcccacacctcacacacacatactcccacttgcaactattctgtttctctcctgggctcccccactttcccttccccaccccacttgtatgctctggaatctgtggagacgccagccctgcccaatcagagatgccaaaaatggggacatgacttctggacagaggacatgggccacgcccccatgcatccccacccccgcccctccggacggcttacttacctcatacgcagctcatcttaaaccaatagaatcgctcggtggacgagagtgtctgactcagatatctacctcggagggagtttctgctactttagggaattattgactgggctttggggttgaacttttttttt

SEQ ID NO: 129976 - DNA, 1293 bp, Artificial Sequence
  derived and/or modified sequence
atggacgagagactgttaggcccaccgcctcctgggggagggcgtggaggcttgggactcgtttccggggaaccaggtggtcccggtgagcccccaggcggtggggatcccggtggcggaagtgggggtgtcccaggaggccgaggaaagcaggacattggtgacatcctgcagcagattatgacgattaccgaccagtctttggatgaggctcaagctaagaagcacgcacttaactgtcacaggatgaagccagcgctgttttccgtgctgtgcgagataaaggaaaaaacaggcctgtctattaggagctcacaagaggaggagcctgtggacccccagcttatgcgcctagacaatatgttgttagccgaaggtgtggccggacccgaaaaaggaggcggaagtgcggcagccgcagcggcagccgcagcttctggcggaggtgtgtcgcctgacaatagtatcgaacatagtgattacagaagcaaactggcccagatccgccatatttaccactccgagttggagaagtacgaacaggcctgtaatgagttcacaacacatgtgatgaacctgctccgggaacaatctaggacccggcctgtggccccaaaggagatggagcggatggtctcaatcattcataggaagttttctgccatccagatgcagttaaagcaatcgacttgcgaagctgtgatgatcctccgctcccgatttctggacgctagaaggaagagacgcaactttagcaagcaggcaacggaagtgctcaatgagtatttctactctcacctgtcgaacccttacccttctgaagaggcaaaagaagaactagcgaagaagtgcggtattactgtctcccaggtgtccaactggttcggcaacaagagaatccgatacaaaaaaaacattggcaaatttcaggaggaggctaacatctacgctgtgaaaaccgccgtttccgtgacccagggcggacactccagaacttcctctcctacacctcccagctctgccggatctggcggttctttcaacctctccggcagtggagatatgtttctgggcatgccaggccttaacggagacagctatagtgctagtcaggtagagtcattgcggcattccatggggccaggcggttatggtgataacctgggcggtgggcagatgtactccccacgagaaatgagggccaacggatcctggcaggaagccgtaaccccatcatccgtgacatctccaactgagggaccgggttctgtgcattccgacacgtccaattag

SEQ ID NO: 129977 - DNA, 1293 bp, Artificial Sequence
  derived and/or modified sequence
atggacgaacgccttcttggaccaccccctcctggcggaggcagaggcggactgggtctggtgagtggagaacctggaggaccaggcgagccgccagggggaggagaccccggagggggatcgggcggagtgcccggaggcaggggcaagcaggacatcggggacatccttcagcagattatgactataacagaccagtctctggatgaggcccaggccaaaaaacacgctttgaactgccataggatgaagcctgctctgttcagcgttttgtgtgaaatcaaagagaagacagggttgtctattaggagttcacaggaggaggagccagtggacccacaactgatgcgtctggacaacatgctactggccgagggcgttgcgggacctgagaagggaggtggaagcgccgcagcggctgccgcagctgcggcttctgggggtggagtgtccccagacaatagcatcgagcacagcgattataggagtaagctggcacaaatcagacacatttatcacagcgaactggaaaaatatgagcaggcatgtaacgagttcaccactcatgtgatgaatctcctgagagagcagtcacgcacaagacccgtggcccctaaggagatggagcgtatggtaagcataatccacagaaagttctccgctattcaaatgcaacttaaacagtcgacctgcgaagccgtgatgattctcaggagccgcttccttgacgctagaaggaaaagacgcaacttttcaaagcaggcaaccgaggtgcttaacgaatacttctatagccacctgtccaatccctacccatctgaagaggccaaggaagagctcgctaagaagtgcgggatcaccgtgagtcaagtgtccaactggtttggcaacaagaggatcagatacaaaaagaatattggtaagttccaggaagaggccaatatctacgctgtcaagactgcagtgtccgtgacccagggaggacacagccgaacgtcatctcccaccccaccctcttccgccggatcaggaggttcctttaacttaagcgggagcggtgacatgttccttggtatgcccggactgaatggcgattcatactccgcaagccaggtagaatccttgcggcactcaatggggccaggcggttatggcgataatctaggagggggacagatgtatagccctcgggaaatgcgggctaatggcagctggcaggaggctgtgacaccttcaagcgttacgtcccccactgaagggccaggctccgtacactctgacacctccaactag

SEQ ID NO: 129978 - DNA, 1293 bp, Artificial Sequence
  derived and/or modified sequence
atggacgagagactgttgggacccccacctcctgggggaggcagaggcggactggggctggtgtcaggtgagcctggcggaccaggggaaccgcctgggggaggggatccgggaggtggatccggcggtgtacccggaggaagaggtaagcaagacataggcgatattctacaacaaattatgaccattaccgatcaatctctggatgaagcccaggctaagaaacatgctctcaattgccacagaatgaagcccgctctgttctctgtgctgtgcgaaattaaagaaaaaacaggactgtctattcggagctcccaggaagaagaaccagtggatccacagttgatgaggttggacaacatgctgttggccgaaggcgtcgcgggtcccgaaaagggcggaggcagcgctgccgcagccgctgccgctgcagcctccgggggtggcgtgagcccagacaactcaatcgagcactctgactaccgaagcaaactagcacagatccgccacatctaccacagtgagctggaaaagtatgaacaggcttgtaatgagttcacaacccacgtgatgaacctgctccgggagcagagccgtacccgcccagtggcccctaaggagatggagcgaatggtctcaattatccataggaaatttagcgccattcagatgcagctgaaacaatccacatgcgaagcagtcatgattttacggtcgaggttcttggatgctcggcgtaagcgcagaaacttttcgaagcaggccacagaagtgctgaacgagtacttttacagtcacctgtccaatccttatcctagcgaggaggccaaggaggagctcgcaaaaaaatgtggtatcaccgtctcacaggtgagtaactggtttggcaataaaaggatacggtataaaaagaatattgggaagttccaggaagaagcaaatatctatgccgtaaagacagcggtctccgtgacccaaggaggacatagtcgtacgagttcccctacgcccccatccagcgcaggctctggaggcagttttaacctttccggtagtggcgacatgttcctgggtatgcccggtttgaatggggactcttactctgcttctcaggtggagagtttacgacacagtatggggccaggtgggtacggggataatctcggaggaggccagatgtactctcccagggagatgagagctaacggatcctggcaggaagcagtcacaccatcttccgtgaccagtcccaccgagggccctgggagtgtccattctgacacgagcaactag

SEQ ID NO: 129979 - DNA, 1293 bp, Artificial Sequence
  derived and/or modified sequence
atggatgaacggctcctcggtccccctccccctggcggaggcagggggggtctggggctggttagtggcgaacccggaggaccaggcgagccccctggcggaggcgatcctggaggcggttctggcggagtgcctggcggacggggaaaacaagacattggcgacattttgcagcagatcatgacaatcacagaccagtctctggacgaagcacaagcgaaaaaacatgctctgaattgccaccggatgaaaccagccttgttttcagtgctgtgtgagattaaggaaaagaccggactttctattaggtcctcacaggaagaagagcctgtggatcctcagctcatgcgattagacaatatgcttttggctgagggtgtggccggtcctgaaaaagggggagggagcgcagccgcagcagcagcggcagctgcatccggcggaggcgtgagcccggataattccattgagcattctgattatagatctaagctggcccagatcagacacatttaccactccgaactcgaaaagtatgagcaggcctgtaacgaatttaccacacatgtgatgaacctactaagggagcaatcccggacacggccagtggctcctaaagaaatggaacgcatggtgtctatcatacatcggaaatttagtgctatacagatgcagctcaaacagagtacctgcgaagcagtgatgatcctgagatccaggttcctggatgctcggcgaaagagacgaaatttttccaagcaggccaccgaggtcctcaatgagtatttctattcccatttaagtaatccataccccagcgaggaagcaaaggaagagctcgccaagaagtgtgggataaccgtgagccaggtgtccaactggttcggcaataagcggatacggtacaaaaaaaatatcggcaaatttcaggaggaagctaatatctatgccgtgaagacagccgtaagcgttacgcaagggggacacagtaggacgtcttcacccacgccccctagctctgcaggctctggcggttccttcaatctgtcgggatcaggcgatatgttcctcggaatgcccggattgaacggcgattcctattctgcctctcaggttgagtctctccgccatagtatgggacccggaggttacggtgacaacttaggaggcggacagatgtactcaccccgagaaatgagagccaatggctcttggcaggaagctgtgactccctcgagtgtgacttctccaacagagggcccaggatccgtccatagcgatactagcaactag

SEQ ID NO: 129980 - DNA, 1293 bp, Artificial Sequence
  derived and/or modified sequence
atggacgaacgcctgttggggcctcctcctcctgggggaggaagggggggactaggactggtctcaggagaacctgggggtccgggagagccacctggagggggagatcccggtggagggtctggaggtgtcccgggaggaagaggcaagcaggatattggagacatcttgcagcagattatgacaatcaccgatcagtccctcgatgaggcccaggcaaaaaaacacgccctgaactgccaccgcatgaagccggctctattctcggtgttatgtgagattaaggaaaaaacaggactctcaattcgcagcagccaggaagaggagccggttgatccacaactcatgagactggataatatgttgctagccgaaggcgtggctgggcctgagaaaggcggaggtagtgccgcagctgcagccgcagcagcagcctctgggggaggcgtcagcccggataacagcatcgagcattcagactatcgatcaaaattggctcagataaggcatatctaccattccgaattagagaaatacgaacaggcatgcaacgagttcacaacccacgtgatgaatcttctgcgggagcagagcagaactcggcctgtggctcctaaggagatggagcggatggtaagcatcatccacaggaagttcagcgccatccaaatgcaactgaaacagagtacctgcgaggcagttatgatcctgcggtctagatttttggacgctaggcgaaagcggaggaacttctcaaagcaagctactgaagtactgaatgagtacttctattcacatctgagtaatccttacccaagtgaggaggctaaagaagagttggcgaaaaaatgcggtatcacagtgagtcaggtgagtaattggtttggcaataaaaggatccgctataagaaaaacatcgggaaattccaggaggaggccaacatttacgccgtcaaaactgccgtgagcgtaactcaagggggacactcccgcacctcttcgccgaccccccctagcagcgctggttctggcggatcctttaaccttagcggctcaggcgatatgtttctcgggatgccaggtctgaatggcgatagctacagcgcatcccaagttgaatcactgaggcactccatggggccaggtgggtacggcgacaaccttggaggcggtcagatgtattcccccagggagatgcgagccaacggcagctggcaggaggccgtgactcccagttcggtgacatcccccactgagggtccgggaagtgtgcatagcgacacttctaactag

SEQ ID NO: 129981 - DNA, 1293 bp, Artificial Sequence
  derived and/or modified sequence
atggacgagcgcctgctgggaccccctccacctggcggtgggaggggcggtcttggcctggtatctggcgagccagggggacctggggaaccacctggtgggggtgacccaggcggaggctccgggggtgtccctgggggacggggtaaacaggatataggagacatcttgcagcagatcatgactatcacggaccagtcattggatgaggcccaggctaaaaagcatgcacttaattgtcatcggatgaagccggcactgttctcagtgttgtgtgaaattaaggaaaagacggggttgagcattcggagctcccaggaggaggaacctgtcgaccctcagctgatgcgcctcgacaacatgttgctcgcagagggggtggccggaccagagaagggcggaggcagcgccgctgctgcagccgcagccgctgcgagcggcggaggagtgtctcctgataactctatcgagcattcggattacaggtcaaagctggctcagattaggcacatctaccatagtgagcttgagaaatatgagcaggcctgtaatgagtttacaacccacgtaatgaacctgctgcgtgagcagagcaggactagacctgtggcccctaaagaaatggagagaatggtctcgatcatccataggaagttttccgccatccaaatgcagttaaaacaatccacttgcgaagccgtgatgatattacggtcccgcttcctcgatgctaggcgcaaacggagaaattttagcaagcaggcaaccgaggtgcttaatgagtacttctactcccacctctctaatccatatccctccgaggaggctaaggaggaattggcaaaaaaatgtggaatcacagtgtcacaggtctccaattggtttggcaacaagagaatcaggtataagaagaatataggaaaatttcaggaggaagccaacatctacgccgttaagaccgccgtgtccgtgacccaaggtggtcactcaaggacctcgtccccaacacccccatcctctgctgggagtggaggctccttcaatctcagtggatcaggggatatgttcctgggcatgcctggcctcaatggggactcctattccgcctcacaggtcgaaagtttgaggcactcaatggggccagggggatatggcgacaacttaggcggtggtcaaatgtactcccctagggagatgagggcgaatgggtcctggcaggaggccgtcaccccgtcatccgtcacgtcgcctactgagggccctggcagcgttcacagtgatacatcaaattag

SEQ ID NO: 129982 - DNA, 1293 bp, Artificial Sequence
  derived and/or modified sequence
atggatgagcgcctcctcggcccaccccctccaggtggaggtagagggggactcgggctcgtttccggtgaacccggagggcctggtgagcctccgggtggcggagacccaggaggagggagtggtggggtgccagggggtagaggcaaacaagatattggagacatactccaacaaatcatgacaatcacagatcagagtttggatgaggcacaggccaagaaacacgcccttaattgtcaccgtatgaaacccgcactgtttagtgtgctgtgcgagattaaggagaaaacaggactctccatccgaagctcccaagaagaagagcctgttgatcctcagctaatgcggttagacaacatgctcctggctgagggagtggcgggaccggaaaaaggaggagggagtgctgccgcagctgcagccgctgcagcctcagggggaggcgtttccccggataactctattgagcacagcgactacagatctaaactggcacagattcggcatatctaccacagcgagctggaaaagtacgagcaggcctgtaatgaattcaccacccacgtcatgaacctgctgagagagcaaagccgcacgagacccgtggcacctaaagaaatggaacggatggtcagtatcatccaccggaagttctcagcaatacagatgcagctgaaacagtccacatgtgaggcggtgatgattctgcgctccagatttttggatgcgcgtcgtaaacgcaggaatttcagtaagcaggccacggaagtgttgaacgaatatttctactcacatctctcaaacccctacccctccgaagaggccaaggaggagctggccaagaaatgtggaataacggtgtcgcaagtgtccaactggttcggcaataaaaggatccgctataagaagaacattggcaaatttcaggaagaagcaaacatatacgccgtgaaaactgctgtgtctgtcactcaggggggtcactcacgcacttcgagccccacgccgccatcctccgcaggcagcgggggaagctttaacctgagcggctccggggatatgtttttaggtatgcctggactgaacggggattcttacagtgccagccaagtagaaagtctccggcacagcatggggccaggaggatacggagataatctcggcggagggcagatgtattccccacgcgagatgcgagctaacggctcatggcaggaagctgtgaccccgagttccgtcacctctcctacggagggacccggatctgtgcatagtgatacatctaactag

SEQ ID NO: 129983 - DNA, 1392 bp, Artificial Sequence
  derived and/or modified sequence
atggatgaaaggctgcttggccctccacccccagggggtggcagaggcggactcggcctcgtgtccggcgagcccggaggaccaggtgagccgccaggcggtggcgaccctggcggtggttcaggaggggttccagggggaaggggtaaacaggacatcggcgatatactgcagcagatcatgactattaccgatcaaagcctggacgaagctcaggctaagaagcatgcgctcaactgtcaccgaatgaagccagctttattttcagttctgtgtgaaatcaaagaaaagactggtctttccatcaggtcttctcaggaggaagagccagtggacccacaactaatgaggctcgataatatgctgttggccgaaggtgtggcagggcctgaaaaggggggaggatcagcagctgccgcagctgcggctgcagcgtccggcggaggagttagtcccgataactcaatagagcactcggattatcgcagcaaactggcacagattcgacatatctaccacagtgagctggagaagtatgagcaggcgtgtaacgagttcaccactcatgtaatgaacctgcttagagagcagtcgaggactcggccagtggccccaaaagaaatggagcggatggtatccataatccaccggaaattttcggccatccagatgcaactgaagcagagcacctgtgaggctgtgatgatcttgaggtctcgcttcctggacgcaagacggaaaagacgcaacttttccaagcaggccaccgaggtactaaatgaatacttttacagccatttgtccaacccctatccatctgaagaagcgaaggaagaattggctaagaaatgcggaatcactgtgagtcaagtcctgtggagactccgggaggagctgtccggcaaggtgcatgccagccagctaggagccgtggtaagtaattggtttgggaataagagaattaggtataagaagaacattggcaagttccaggaggaagccaatatttacgctgtaaagacagctgtcatcattgctgagcgaggcccttttggggtgcgaggcaccgagctgtccttgccctctctcccaccccagggcagcggcggaagcttcaatctgagcggctccggggacatgtttctgggtatgcctggcttgaatggcgattcgtattccgcgtcacaggtaagatgtccgagtcccctacaggtggaatctttaagacactcaatgggccctggcggatacggggacaacctggggggtgggcagatgtacagtccacgggagatgcgagcaaacggaagctggcaggaggccgtgaccccctcaagcgtaacatctcctaccgaaggcccagggtctgttcactccgacacttccaattag

SEQ ID NO: 129984 - DNA, 1392 bp, Artificial Sequence
  derived and/or modified sequence
atggatgaacgcctgctcggtcccccacctcccggagggggacgcggtggcctgggactggtatcaggagagcctggtggacctggcgagccccctggaggaggagatcctggtgggggaagcgggggtgttcctgggggtcgcggtaagcaagatattggagatattctacagcagattatgactataacagatcaaagtctggatgaagcccaggccaaaaaacacgccctgaattgtcacaggatgaaacctgctctgttcagcgtgttatgtgaaatcaaggagaagacaggcttgtcaattcgttcatcccaagaggaagaacctgtagacccccagttgatgcgcctggacaacatgctccttgcggagggcgtggccggacccgagaagggtggtggcagcgcagccgctgccgcagccgctgcagcctctggagggggagtgagtcccgataacagcattgaacactccgactaccgctccaaactcgcgcagattcgtcacatctatcactctgagcttgaaaaatatgagcaggcttgcaatgagtttacgacacatgtcatgaatcttcttagagagcaatcccgcacaaggccagttgcccctaaagaaatggaaagaatggtgtctatcatacatcgtaagtttagcgcaattcagatgcagctgaagcagtctacctgtgaggcagtcatgatattgaggtccaggttcctcgacgcgcgtagaaagagaagaaactttagtaagcaggcaaccgaggtgctgaacgaatacttttacagccacctttccaacccctacccatcagaagaggctaaggaagaacttgccaagaagtgcgggattaccgtcagtcaggtgctatggcgtctgagggaggagttgtctggtaaggtgcatgcgagccagctgggggctgttgtgtcgaactggttcggcaacaaaaggatcagatataagaaaaacatagggaagtttcaagaggaggctaacatttacgcggtgaagacagccgtcataattgccgaacggggaccttttggcgtgcgaggcacagaactgtcgctgcctagcctgccaccgcagggatcaggcggtagctttaaccttagtggttctggcgatatgtttttaggcatgcctggactaaatggtgactcttactcagctagtcaggtacgatgcccctcacctttgcaggttgagtcactcagacattccatgggaccaggcggatacggtgacaatctgggcggtggacagatgtactcaccccgagagatgcgcgctaatggatcctggcaggaagcagttaccccaagcagcgttacaagtcctactgaaggtccagggagtgtgcattcagatacctccaattag

SEQ ID NO: 129985 - DNA, 1317 bp, Artificial Sequence
  derived and/or modified sequence
atggacgaacgactcctcggtccaccccctcccggtggcggaaggggtgggctaggcctcgtctccggcgaacccggtggcccaggcgagccgcctggagggggagacccgggaggaggatccgggggtgtgcctggtggacggggtaaacaggacattggcgatatcctgcaacagatcatgaccatcaccgaccaaagtttggacgaggcacaggcaaaaaagcacgcacttaactgccatagaatgaaacctgccctattcagcgtcctttgtgaaatcaaagagaagacagggctgtccattaggagcagccaggaggaggaacccgtggatccccagctgatgagactagacaacatgttacttgctgaaggcgtggccggaccagaaaaaggcggagggagcgctgcagccgcagcagccgctgcagcgagtggagggggtgtctcccccgacaattctatcgagcattctgactaccggagcaaactggcgcaaataaggcacatctatcacagcgaactcgaaaagtacgagcaggcatgcaatgagtttacaacgcacgtgatgaacctgttgcgggaacagagccgcacccgtcccgtcgcccctaaagaaatggaaaggatggtgagcatcatacataggaagtttagcgccatccagatgcagctgaagcaaagtacctgcgaggccgtgatgatcctgcggagcagattcttggacgctagaagaaaaagaaggaacttttccaaacaagcaactgaagtgctcaacgagtacttttactcacacctttctaacccttacccctcagaagaagcgaaagaggaattggccaaaaagtgcgggattactgtgtcccaggtttccaattggtttggtaacaagcgcatccgctataagaaaaacattggtaaatttcaggaggaagccaatatctacgcagtcaaaaccgccgtatctgttacccagggagggcatagtcggacttctagtcctactcctccctcttctgccggatctggaggctcttttaaccttagcggctccggcgacatgtttttaggaatgcccggtctgaacggcgatagttattcagctagccaagtgaggtgccccagccctctgcaggtggagtctcttagacacagcatgggccctggtgggtatggcgacaacctggggggtggacagatgtatagcccaagggagatgcgcgctaacgggtcctggcaggaggctgtcactccctcatctgttacatctcccactgagggtcccggtagtgtgcactccgatacctcgaattag

SEQ ID NO: 129986 - DNA, 1317 bp, Artificial Sequence
  derived and/or modified sequence
atggatgaacgcctcttgggtcctcctcccccaggcggtggaagaggagggctgggactggtgtctggggagcccggaggacccggagagccacccggaggcggagatcctgggggtggaagtggcggagtgcccggtggacggggaaaacaggacatcggcgacatactacagcagatcatgactattacggatcagtccttggacgaggcacaggcgaaaaagcacgccctgaactgccatcgaatgaaaccagccctgttttccgtcctgtgcgagattaaggagaagaccggactgtcaattcgaagttcgcaggaggaggaacctgttgatccacagctgatgcgcctcgataatatgctgctggcagaaggcgtcgctgggcctgaaaaaggaggtggcagtgcagctgcagcggcagccgctgcagccagcggcggtggggtctccccagacaactcaatcgaacatagtgactataggagcaagcttgcacagataagacacatttatcattccgagctggagaaatacgagcaagcctgcaacgagtttaccactcacgttatgaatttactgcgtgaacagagccgcaccaggcccgttgctccgaaggagatggagcgcatggtcagcatcattcaccgcaagttcagcgccatccaaatgcagctgaagcagagcacctgcgaagcagtgatgatcttacgctctcggtttctggatgcccgacgaaaacggcgaaatttttctaagcaggctacggaggtccttaacgaatacttttactctcacctgtccaacccatacccttctgaagaagctaaagaagagctggcgaagaagtgtggcatcacagttagtcaggtgtctaactggttcggaaataagagaattaggtataagaagaacatcggtaagtttcaggaggaggctaacatatacgccgtgaaaaccgcagtctccgtgacccagggcggtcattccaggactagtagtcctacacctccaagctcggccggatccggtggttctttcaacctcagtggttccggcgacatgtttttgggcatgcctggcttgaacggagacagctatagcgccagtcaggtcagatgtccttcgccactgcaggtagaaagcttgaggcattccatgggaccaggagggtacggcgacaacctgggaggtggccagatgtactcaccacgtgaaatgagagctaatggttcctggcaggaagccgtgaccccatcaagtgtgacatctccgaccgaaggccctgggtcagtgcacagtgatactagcaattag

SEQ ID NO: 129987 - DNA, 1392 bp, Artificial Sequence
  derived and/or modified sequence
atggacgagagactcttgggccctcccccacctgggggagggcgtgggggactgggattggtttctggggaacctggaggcccaggggagccacccggtggcggtgatcctggaggcggttccgggggtgtcccgggtggacggggaaagcaggacattggagacattctgcagcaaattatgacaattactgaccagtctctggatgaggcccaggcgaaaaagcacgccctgaattgtcacaggatgaagccagccttgttcagtgtcctgtgtgagatcaaagaaaagacaggactgtcaatacgttcatcacaagaggaggagcccgtggatccgcaactcatgcgacttgacaacatgttacttgctgaaggggtggcaggacccgaaaagggtggcggatctgcagcagccgctgccgctgctgctgcttctgggggaggggtgagcccagataatagcattgaacactctgactaccggagtaaactggctcagatccggcatatctatcactcagagctggaaaagtacgaacaggcatgcaacgagttcaccacgcatgtgatgaatctgctgcgagagcaatctcgtacccgccctgttgctcctaaggagatggagcggatggtcagcatcatccaccgcaagttttctgccattcaaatgcagctgaagcagtcgacttgtgaagctgtgatgatcttgaggtctcgctttcttgacgccaggcgcaagcggagaaacttctctaagcaagccaccgaggtgctgaatgaatatttttacagccacctgtccaacccatatcccagtgaggaggctaaagaagagctggccaagaagtgcggcatcacagtgtctcaagtcctttggaggttgcgcgaggagctttccgggaaggtgcatgcttcccagctgggggctgtcgtcagcaactggttcgggaataaacggattcgctataaaaagaacattggtaaatttcaagaagaggctaacatctacgctgtcaaaactgcagttataatcgcagagagggggccattcggcgtacgaggcaccgaactgtcactgccatcactgccaccccaaggatctggaggcagcttcaatttatctggaagcggcgacatgttcttaggtatgcctggattgaatggggatagctatagcgctagccaggtccgctgccctagtcccctccaagttgagtccctccgacactccatggggcctggcggttatggagataaccttggtggcggacagatgtactcacctagggagatgagagcaaacggcagttggcaggaggcagtcacaccatcctccgtgacatcgcccacggaagggcctggttctgtgcacagcgacacatctaattag

SEQ ID NO: 129988 - DNA, 1392 bp, Artificial Sequence
  derived and/or modified sequence
atggatgaacgtctgctgggacctccgccacctgggggtggacgtggaggactgggccttgtatccggggaaccgggaggacccggtgaacctcctggaggcggagaccccggtggcggttccggcggtgttccgggaggcagagggaagcaggatataggagacatattgcaacagatcatgacgatcacggaccagagcctcgatgaagcccaggctaagaagcacgctctgaactgccaccgcatgaaacctgctttgttcagtgtgttgtgtgagattaaggagaaaaccggtctgtcaattcggagttctcaggaggaggaacctgtagaccctcagttgatgcggctggacaatatgctcctcgccgagggcgttgccggaccggagaagggcggaggctctgccgctgctgctgccgctgctgcagcgtctggcggaggcgtctccccagataattccatcgagcattctgattatagatcaaaactcgctcagattcggcacatataccactccgagttggaaaaatatgagcaggcctgcaacgagttcaccacccacgtgatgaatctgcttagagagcagtcaaggacccggcctgtcgctccaaaggagatggagagaatggtgagcataatacatcgtaagttttcagctatacagatgcagctgaaacaatcaacatgtgaagccgtgatgatcctacgatctcgatttctagacgctcggcgtaagcggaggaactttagcaagcaggccaccgaggttctgaacgaatatttttactctcatttgagcaatccctacccgtccgaggaagccaaagaagagctagctaagaagtgtggaatcacggtgagtcaggttctgtggaggcttcgcgaagaactcagcggcaaggtccacgccagccagcttggggcagttgttagcaactggttcgggaacaagcgaattaggtacaagaagaacattggcaagttccaggaggaggcaaatatatatgcagttaagaccgcagtgataatcgctgaaaggggtcctttcggggtgagaggcactgaactatctctgcctagtcttccaccccaaggttccggagggtccttcaatttgagcggcagtggggacatgtttctgggtatgccaggcctcaatggcgattcgtactccgcatcccaggttcgttgcccttcgcccttgcaggttgagtctttacggcattccatgggtcccggagggtacggcgacaacctgggcggaggacagatgtacagtccccgagagatgagagctaatggtagctggcaagaagcggtgactccctccagtgtgaccagtcctacagaaggcccaggctctgtgcacagtgacaccagtaactag

SEQ ID NO: 129989 - DNA, 1332 bp, Artificial Sequence
  derived and/or modified sequence
ggcgcagaacaggggggtggcctgcgcgctccgcctcaactgtggacaaacggctactggggacgcccactgcaggccggagcgggtggcctggggcttgtttctggcgaaccaggtggacccggagagccacccggtggcggtgatcccggtggaggcagcggtggcgtgcctggcggaaggggaaaacaggatataggcgatatcctgcagcaaattatgaccatcaccgaccaaagcctcgatgaggcccaggcaaaaaaacacgcgctcaattgtcataggatgaaacctgccttgttctccgtgctctgcgagattaaagaaaagaccggcctgtctataaggtcaagccaggaggaggaacccgtggacccccagctgatgaggctggataatatgttactcgcagagggggtggccggacctgaaaaaggaggcggatctgcggcagctgcggcagctgctgcagcaagcggtgggggtgtgtctcccgacaattctatcgagcattcggattatcggtcaaaactggcccagattcggcatatatatcacagcgagctggagaagtacgaacaggcatgtaatgaatttacaacccacgtgatgaatcttctccgggaacagtctcgcactaggccggtggccccaaaggaaatggagagaatggtgtccattatccataggaaattcagcgcgatacagatgcaattaaaacaatctacttgcgaagccgtgatgatactgagatcgcgtttcctggatgcccgtcggaaacgcagaaatttctccaaacaggccaccgaagtcttaaatgagtatttctacagccatctctctaatccttatccgtccgaagaggccaaagaggagctcgcaaagaaatgcggcatcactgtttctcaggtcagcaattggttcgggaataaaaggatccgttacaagaaaaatattggcaagttccaagaagaagccaacatctacgcagtgaagaccgcagtgtctgtgacccagggcggacacagccggacctcttcccctaccccaccgagctccgccggatcaggcggatcgtttaatcttagtggcagcggggatatgttcttgggcatgcccggtctgaatggtgatagttacagtgcctcgcaggtcgaaagcctgcgccattccatggggccaggcggatacggtgataacctcgggggagggcagatgtattcccccagagaaatgagggccaacggttcctggcaggaggctgtgacaccctccagtgtcactagtcctacggaagggcctgggagcgtccatagcgacacatccaattag

SEQ ID NO: 129990 - DNA, 1332 bp, Artificial Sequence
  derived and/or modified sequence
ggtgccgagcagggtggcggactccgggcaccgccacagttatggacaaatggctattggggcagacccctgcaggcgggtgccggtggcttgggccttgtgagtggggaacccggtggccctggcgagccacctggcggaggcgaccccggaggaggttccggtggagtccctggcggaaggggtaaacaagacattggcgacatccttcaacagatcatgactatcaccgatcaaagccttgacgaagcacaggctaaaaagcatgcgctgaattgccacaggatgaagcccgcactgttttctgtgctgtgcgaaatcaaagagaaaaccggcctctctatcaggagcagtcaagaggaagagcctgtggatcctcagttaatgagacttgacaacatgctgctggctgaaggagttgcaggaccagagaaggggggaggatctgccgctgcagccgctgccgctgccgcaagtgggggaggcgtgagtcctgataacagtattgagcactctgattacagatcaaagctggcccaaatccgccacatatatcattcagagcttgagaagtacgaacaggcatgcaatgaattcacaacacatgtgatgaacctgctgcgtgagcagagccgaacacggcctgtggcacccaaagagatggaaagaatggtgagcatcatccatagaaagttctccgccattcagatgcaattaaaacagagcacctgcgaggccgtgatgattctgagaagtagatttctggatgccaggaggaagagaagaaactttagcaagcaggccactgaggtgctgaacgaatacttttactcgcatctgtcaaatccttaccccagcgaagaggccaaggaagaactggccaaaaagtgcgggattactgtgtcacaagtgagcaactggtttggtaacaaaagaattcgatacaaaaaaaacataggcaaattccaggaggaggccaatatttatgcagtgaagacagccgtctcagtgacacagggcggacactctcgtacttccagcccgactccaccttcaagcgccggaagcggagggagttttaatctttctggatcaggagatatgttccttggaatgccaggactgaacggggacagctactctgcaagtcaagtcgaatctctcaggcatagcatgggacctggcggatacggagacaaccttgggggaggacagatgtactctccacgtgagatgcgagctaacggctcatggcaagaggccgtaaccccatcctccgtcacttcgcccaccgaaggcccaggttctgtccacagcgacacatccaattag

SEQ ID NO: 129991 - DNA, 1317 bp, Artificial Sequence
  derived and/or modified sequence
atggacgagcgcctgcttggcccaccccctcccggtggcggacgcggtggccttggcctcgtctccggtgagcctggtggcccaggtgagccacccggtggtggggacccgggaggtggaagcgggggagtgcccggaggcagaggaaaacaggatattggcgatattctccagcagattatgacaataaccgatcagagtctcgatgaagcacaggcgaagaagcacgccctcaattgccatcgaatgaagcctgctctgttttccgttctatgtgagataaaggaaaagaccggcctctccatcaggtctagtcaggaggaggagccggtcgaccctcagcttatgcgacttgataacatgctgttagcagagggcgtagcgggtcccgagaaaggtgggggaagtgccgcagccgctgccgcagccgctgcctctgggggaggcgtgtcgccagacaactctattgaacatagcgattaccgctccaagttggctcagatacgccacatttatcactcggagctagagaagtatgaacaagcatgtaacgagtttacaacgcacgtgatgaacttgctccgggagcagtcccgaacgcgtcccgtggctcctaaagagatggagagaatggtgtctatcattcaccgcaagttttccgcaattcagatgcaactcaaacaatcgacgtgtgaggcagtgatgattctgcgatcccgctttctggacgcaaggcgcaaaaggagaaactttagcaagcaggcgaccgaggtcctgaacgagtacttctactcacacctgtccaacccctatccttcagaagaagcaaaggaggaactcgcgaagaaatgtggcatcaccgtgagccaggtgagcaactggtttggtaacaagcggattcgctataagaagaatattgggaaattccaggaagaagccaatatctacgcagttaagacagccgtttctgtgacacaaggcggtcattcaagaaccagtagcccgacaccaccttcgtccgccggatccgggggaagctttaatctgtctggctctggagacatgttcctgggtatgcctgggctgaatggggacagttactccgccagccaagttagatgtccctcacctttgcaggtggaaagcctgcgtcactcaatggggcctggtggatacggtgataatctgggcggtgggcagatgtactcccctcgcgagatgcgtgccaacggcagctggcaagaggcggttaccccatcctcagtgacatcacccacagaaggtccagggtccgtccattcggataccagcaactag

SEQ ID NO: 129992 - DNA, 1380 bp, Artificial Sequence
  derived and/or modified sequence
atggacgaaagactgttgggacctccgccaccgggaggcggtagaggcggactgggactcgtaagcggcgagcccggtggtccaggcgagccccctggcggaggagaccccggaggtggcagcggaggggtgcctggcggtcgtggaaagcaggatatcggagatattctgcagcaaatcatgaccatcaccgaccaaagcttggacgaggcgcaggctaagaagcacgcattaaactgccacaggatgaaaccagctctattttccgtactttgcgagattaaggagaaaacgggtctgtccatcagaagctcccaggaagaggagcccgtcgatccccagctgatgcgactggataacatgctcctggctgagggcgtcgccggacctgaaaagggaggaggttccgcagctgccgcagccgcagctgcagcatctggcggtggagtctcccctgataactccatcgagcatagcgattacagatcaaagctggcacaaataaggcatatctaccatagcgagttggagaagtatgaacaggcctgtaacgagtttactacacacgtcatgaaccttctgagggagcagagccggactaggccagttgcgcctaaagagatggaacgaatggtcagtatcatccacaggaaattctccgccatccagatgcagttgaaacaatctacatgcgaggccgtgatgatactgagatcccggttcctcgatgccaggcgcaaacgtagaaacttctcgaaacaggccacagaggtgctgaacgagtacttctattctcatttgagtaatccatacccttccgaagaagccaaagaggaacttgctaaaaagtgcgggatcacggtcagccaagtgctctggagattaagggaagaactgtctgggaaagttcacgctagtcaactcggtgccgtcgtgagcaactggttcggcaataagcggatccgctacaagaagaatattgggaaattccaagaggaggccaacatctacgctgtgaaaacagcagttagcgttacacagggaggacactctaggaccagttcgcccacacccccttcatctgcgggaagcggaggttcattcaacctgagtgggagcggagatatgttcctgggcatgccgggactaaatggcgatagttacagtgcaagtcaagtgcggtgtccgagccctcttcaggtcgaaagcttgaggcactccatggggcctgggggatatggcgacaatcttggcggtgggcaaatgtacagcccacgcgagatgagagcgaatggctcttggcaggaggcagtaaccccgagtagtgtgacttctccgactgagggcccaggtagcgtgcactcagatacatcgaactag

SEQ ID NO: 129993 - DNA, 1332 bp, Artificial Sequence
  derived and/or modified sequence
ggtgctgagcagggagggggactaagagcccctccccagctatggaccaacggctactggggcagaccattgcaagcgggagccggaggtctgggcctcgtgagtggtgagcctggaggccctggtgagccccctggcggtggtgatccaggaggcggtagcggcggagtgccaggagggaggggaaagcaggatattggcgatattctccagcagatcatgaccattaccgaccaatcgctggatgaagctcaagcaaagaagcatgccttaaactgtcatcgaatgaagcctgccctattcagtgtcctctgcgagattaaggagaaaactggactatcgatcaggagtagccaggaggaggagcctgtggaccctcagttaatgaggctggataatatgctcttagccgaaggagtggccggacctgaaaaaggcggaggatcagcggctgcagctgccgctgccgctgcgagtggagggggtgtttcaccagataacagcatcgagcacagcgactatagatctaaacttgcacaaatccggcacatatatcactcagaacttgaaaagtatgagcaggcgtgcaacgagttcacaacacacgtgatgaatctcctccgcgaacaatctaggaccaggcccgtggctccaaaagaaatggaaagaatggtgtctatcattcaccgaaagttctctgctatccagatgcagttgaagcagagtacctgtgaagccgtgatgatccttagatcccgatttctcgatgcacgcagaaaacgccgtaacttctcaaaacaggcgaccgaagtgttaaacgagtatttctacagccacctctccaacccttaccctagtgaggaggccaaagaggaactagccaagaagtgtggcatcaccgtaagtcaggtgtcaaattggtttggtaataagaggattcgctacaagaagaatattgggaagtttcaggaggaagctaatatttatgccgtgaagactgctgtctccgtgacacagggagggcatagtaggacatcatcccccacccccccaagttctgccggttcgggcggttcttttaatctgagcggctcaggcgatatgtttctgggaatgcctgggctaaacggtgattcatacagcgctagtcaggtcgaatccctcaggcatagcatgggtccagggggttatggggataatctgggtggaggtcagatgtactcccctagagagatgagggcaaacggaagctggcaggaagcggtgacaccctcatcggtcacctcaccaactgagggaccagggtccgtgcactcagacacctctaattag

SEQ ID NO: 129994 - DNA, 1317 bp, Artificial Sequence
  derived and/or modified sequence
atggatgagagacttcttggccctccacctcctgggggtggtcgcggtgggctggggctggtgtctggtgagccaggaggcccaggggaacctcccggagggggagatcctggtgggggtagcgggggagtgcccggtggacgcggtaaacaagacatcggggatatcctgcagcagattatgaccattaccgatcagtctctggatgaggcccaggcaaagaaacatgccctcaactgccatcggatgaagcctgcactcttctccgtactttgcgaaatcaaggagaagactggcctatccattcggtcgagccaggaggaggagcccgtagaccctcagcttatgcggctcgacaacatgctgctggctgaaggagtggcgggtcccgaaaaaggcggtgggagcgctgccgcagctgccgctgcggctgcttcagggggtggagttagcccagataatagtatcgagcattccgactaccggagtaaactggcccagattaggcatatataccactctgagctggagaaatatgaacaggcgtgcaatgagttcacgacacacgtgatgaatctcctgcgagagcagtctcgaactcggccagtggcacccaaggagatggagcgcatggtgtcaatcatacaccgaaagtttagcgcaatccaaatgcaactaaagcaaagtacatgcgaggctgtgatgatcttgaggtctaggtttcttgatgctaggcgcaagcggaggaatttcagcaagcaggctactgaagtgctaaacgagtacttctacagtcatctgagcaacccatatccttccgaggaggccaaggaagagctggcgaaaaagtgcggcatcacagtcagccaagtgtccaattggttcggcaacaagaggatcagatacaagaagaacatcgggaaattccaggaggaggcaaatatctacgccgtgaaaaccgcggtttctgttacccagggaggccacagtcgtaccagtagccctacccctccaagctccgccggatccggcggtagtttcaacttgtcgggcagtggcgatatgttcctgggcatgccaggccttaatggtgatagttatagcgctagccaggtgcggtgcccaagcccactgcaggtcgaatcactgcggcatagtatggggcctggaggctatggggacaatctaggcggagggcagatgtacagccccagagaaatgcgtgctaacggaagttggcaggaagcagttaccccaagctcagtgacatctccaaccgaaggtcctggttccgtgcacagcgataccagcaattag

SEQ ID NO: 129995 - DNA, 1317 bp, Artificial Sequence
  derived and/or modified sequence
atggacgagaggttgctgggcccacccccacctggtggaggcaggggcggactcggactagtgtcaggagaacctgggggacctggagaaccccctgggggaggcgaccctggcggtgggagtggaggtgttcccggaggtcggggtaaacaggatatcggcgacattctgcagcagatcatgacaataacggaccagtctctggatgaggcccaggctaagaaacacgcgctgaactgccaccggatgaagcccgcacttttttctgtgctctgtgagatcaaggaaaaaacaggactgagcattcgctccagccaggaggaggagcctgtggatccccagctgatgaggctggataacatgctccttgccgaaggagtggccggtcccgagaaagggggaggctctgcggctgcagctgcagccgcagccgcaagcggtggtggggtttcacccgataattctattgagcacagtgactacaggtcaaagttagcccagattcgtcacatttatcactctgagctggaaaaatacgaacaggcctgtaacgagtttaccacccacgtgatgaacttactgagggagcagagtcggacccgacccgtcgccccaaaggagatggaacggatggtgtcaataattcaccggaaattcagcgccatacagatgcagctcaagcaaagtacctgtgaggctgtgatgatcctgcgaagcaggttccttgacgctagacgaaagagaagaaacttttcgaagcaagcaactgaggtgctgaatgagtatttttattcgcacctctcaaacccttatccatcggaggaagccaaggaggagttggccaaaaagtgcggtattactgtttcccaggtgtccaactggtttggcaacaagcgaattcgatataagaaaaacattgggaaattccaggaggaagcaaatatttacgccgtgaaaaccgctgtgtccgtcacccaggggggtcactctagaaccagttccccaacacctcctagttccgcaggcagcggcggaagcttcaatttatctggctcgggcgacatgttcttgggcatgcccggtctcaatggcgacagctacagtgccagccaggtgagatgtcctagccccctgcaagtcgagagtctgcgccactctatgggaccagggggttacggagacaatctcggtggtggccagatgtattctccccgtgagatgagggctaacgggagctggcaggaagccgtgactccctcttctgtgacctcacccactgaaggcccaggatctgttcacagcgatacgagcaactag

SEQ ID NO: 129996 - DNA, 1332 bp, Artificial Sequence
  derived and/or modified sequence
ggagctgaacaggggggtggcctgcgggctcccccacaactctggactaacgggtactgggggaggcccttgcaggccggtgccggtggattgggattggtgtctggcgaacctggcggacccggagaacctcccggtggaggtgaccccggaggtgggagtggcggtgtgcctggagggagaggaaaacaggacatcggggacatcctccagcagatcatgaccatcaccgatcaaagtttagacgaagcccaggccaagaagcacgcacttaactgccatcgcatgaagcctgcgctgttctcagtgctgtgcgagatcaaagagaagactggactgtccattaggtcttcccaagaggaggagcccgtggacccccagctgatgcgcttggacaacatgttgctggccgagggggtggccggtccggagaaggggggaggttcagccgcagcagcggctgctgccgcagcctccgggggtggagtgagtccagataactccatcgaacatagtgactacagaagcaagctggctcagatcagacatatttaccactctgagctggagaaatacgagcaggcatgtaacgaattcacaacccatgtgatgaacttactgagagaacagtcacggacccgtccagttgccccaaaggaaatggagaggatggtatctataatccacaggaagttctctgcgattcagatgcagctgaagcagtctacatgtgaggctgtcatgatcctgaggtcccggtttttagacgccaggagaaagcgcagaaattttagtaaacaggctaccgaagtgcttaacgagtatttctacagccatctttccaacccctatccgtccgaggaagccaaagaggagctcgctaaaaaatgcgggatcacagtgtcccaggtgagtaactggttcggcaacaagaggatacgctataagaagaacatagggaaattccaggaagaagctaacatatatgccgtcaaaactgccgtgagcgttacccagggtgggcactcacggacctccagcccaacacctccaagcagcgcaggaagcgggggaagttttaacttgtctggatctggcgatatgttcctaggcatgccaggcctgaacggcgattcttacagcgcatcccaagtggagtccctaagacatagcatggggcctggcggatacggtgacaacctgggtgggggtcagatgtattcaccacgcgagatgagagctaacggcagttggcaggaggccgtgaccccatccagtgtaacgagccctactgaaggacctggctccgttcattcagacaccagtaattag

SEQ ID NO: 129997 - DNA, 1392 bp, Artificial Sequence
  derived and/or modified sequence
atggacgagaggctgctcggcccaccgcctcccggagggggtcgcggaggcctggggctcgtgagcggtgaaccagggggtccaggagaacccccagggggaggcgaccccggaggaggctcaggcggagttccaggaggacgtggaaagcaggatataggggatatcctgcagcaaattatgaccatcactgatcaatctctggacgaggcacaggccaagaaacatgcgctcaactgccatagaatgaagccggcactgttttctgttctgtgtgagatcaaagagaagactggcttgagcatccgcagttctcaggaagaggagcccgttgacccccaactgatgaggttagataacatgctcctcgccgaaggggtggcagggccagagaaaggaggcggatcagcggctgccgctgccgctgccgctgcctctggcggtggcgtctccccagacaactctatcgaacactcggactacagatcgaaacttgcacagattaggcacatttaccattcggagctcgaaaaatatgaacaggcctgcaacgagttcacaacccatgtcatgaatcttttgagggaacagtcccggaccagacccgtggcccctaaggaaatggaacgaatggtaagcatcatccatcggaagttctctgccatccaaatgcaattaaaacagagtacctgcgaagcagtgatgattctcagaagccgtttcttggacgcaagaaggaaacggagaaattttagcaagcaggctactgaagttctcaatgaatatttttattcgcatctgtccaacccttatccatctgaagaagcgaaggaggaactcgccaaaaaatgcggcataaccgtgtctcaggttctatggcggctgcgggaggaactttctggcaaggtccatgcctcacagctgggcgctgtggtaagcaattggttcggcaacaaacgcatcaggtacaagaaaaacattgggaagttccaggaagaagcaaatatttatgccgtcaaaacagccgtaatcatagcagagcggggaccttttggtgtgaggggaaccgagctctcgcttccatctcttcctccacagggctcgggcggatcgtttaacttaagcggctctggcgatatgtttctcggcatgcctgggcttaatggggatagttattccgcctcccaagttcggtgtccatctcctctgcaggtggagtcactgagacattctatgggacctggcggatatggggacaatctaggcggaggccaaatgtacagtcccagggagatgcgggctaacgggtcctggcaggaagccgtaacccccagttctgtaacatcacccacggaaggacccggatccgttcattccgacacttccaattag

SEQ ID NO: 129998 - DNA, 1332 bp, Artificial Sequence
  derived and/or modified sequence
ggcgctgagcagggtggaggccttcgagcaccacctcagctctggactaacgggtattggggcaggccactgcaggcgggagcgggtggactgggactggtgtctggtgagccaggaggccctggagaaccacctgggggaggggatcctggcggtggatccggaggtgtgccaggtggcaggggcaagcaggacataggcgatatccttcagcagatcatgaccattactgatcagtctctggatgaggcacaggccaaaaaacacgccttgaactgtcatcgaatgaagcctgcgctctttagcgtcctctgcgagattaaggagaagactggcctctctatacggagcagccaggaggaggagccagtcgatcctcagctcatgcgactggacaatatgctgctggcagagggagttgcaggacccgaaaaggggggtggctccgccgctgccgctgctgccgctgcagccagtggcggaggtgtgagtccggacaattcaatagagcacagcgattacagaagtaaattagctcagatcaggcatatctaccacagcgagctggagaaatacgagcaggcatgtaatgagtttacaacccacgtgatgaatctacttcgagagcagagcagaacacgacccgtcgccccaaaggagatggagcgcatggtcagtatcatccacaggaagttcagcgccattcagatgcagctgaaacagtctacttgtgaagctgtaatgattctgcggtctaggttcctggatgccagaaggaagcgtaggaatttttctaagcaggccaccgaggtcctgaacgaatatttctattctcatctgtctaacccctatccctctgaggaggccaaagaggaattggcaaaaaaatgcggcataacggtgtcacaagtctccaattggtttgggaataaaaggataaggtataaaaaaaatatcgggaaattccaggaagaggcaaatatctacgccgtgaagactgccgtatccgttacacagggcggacacagccggacatcttcacccacccctccatcttcagccggatctggtggatcttttaacttgagcggatcgggggatatgttccttggtatgcccggacttaatggcgacagttactcagccagtcaggtcgagagcttgcgccattcgatgggccctggtgggtatggggataacttaggtgggggtcagatgtactcgccccgagaaatgcgtgctaacggaagttggcaagaagctgtaacccctagctccgtcacgtcacctacagaggggcctggtagcgtgcacagcgacacatcgaattag

SEQ ID NO: 129999 - DNA, 1332 bp, Artificial Sequence
  derived and/or modified sequence
ggggcagagcagggcggaggactgcgcgcacccccacagctatggaccaacggctattggggaaggccactccaggcaggtgcgggaggtctggggcttgttagcggggagccaggaggtcctggtgaaccacctggtgggggtgatcccggaggaggaagcggcggagtccccggagggagagggaaacaggacatcggcgacatcctgcagcagatcatgactatcactgatcagtcgctcgacgaagctcaggccaagaagcatgccctgaattgtcataggatgaaaccagcattgttctcagtcctgtgtgagatcaaggagaagactggcctgagtatcaggtcttctcaggaagaggagcctgttgaccctcagctcatgagactggacaacatgcttcttgcagaaggagtggcgggacccgaaaagggtggtggctcagcagccgctgcagccgctgccgctgctagcgggggaggagtttctccggacaactcaatcgagcactccgattatagaagcaagcttgcacagatcagacacatttatcactccgagctggagaagtatgagcaggcatgcaacgagttcaccacacacgtaatgaacctgctaagagaacaaagtaggacccggcctgtggcccctaaggaaatggagcggatggtgtccatcatccatcggaagttttcggccatccagatgcagctgaaacagtccacgtgcgaggccgtaatgattttgcgcagtaggttcctcgatgcacgtcggaaaaggaggaatttcagtaagcaggccactgaggtgttgaacgagtatttctactcccacttgtcaaacccatatccctctgaagaggcaaaggaagaactcgctaaaaaatgcgggatcacagtgtctcaggtgagcaactggttcggtaataagcgcattcgctataagaaaaatatcggtaagttccaggaggaggcaaacatatacgctgttaagaccgccgtctctgtgacgcaggggggtcattcacggacttcctcacccacccctccgtcttctgccggaagcggcggatcttttaatctatctgggtccggggatatgttcttgggaatgcctggcttaaatggtgactcatattccgcctcacaggtcgaaagtctccgacattctatgggtccaggtgggtacggagataacctcggcggtggccaaatgtattcccccagggaaatgagggccaacgggagctggcaagaggcagtgacccccagttcggtcacctcaccaacagaagggcctgggagcgtgcactccgacacaagcaattag

SEQ ID NO: 130000 - DNA, 1293 bp, Artificial Sequence
  derived and/or modified sequence
atggacgagagactgctgggcccccccccccccggcggcggcagaggcggcctgggcctggtgagcggcgagcccggcggccccggcgagccccccggcggcggcgaccccggcggcggcagcggcggcgtgcccggcggcagaggcaagcaggacatcggcgacatcctgcagcagatcatgaccatcaccgaccagagcctggacgaggcccaggccaagaagcacgccctgaactgccacagaatgaagcccgccctgttcagcgtgctgtgcgagatcaaggagaagaccggcctgagcatcagaagcagccaggaggaggagcccgtggacccccagctgatgagactggacaacatgctgctggccgagggcgtggccggccccgagaagggcggcggcagcgccgccgccgccgccgccgccgccgccagcggcggcggcgtgagccccgacaacagcatcgagcacagcgactacagaagcaagctggcccagatcagacacatctaccacagcgagctggagaagtacgagcaggcctgcaacgagttcaccacccacgtgatgaacctgctgagagagcagagcagaaccagacccgtggcccccaaggagatggagagaatggtgagcatcatccacagaaagttcagcgccatccagatgcagctgaagcagagcacctgcgaggccgtgatgatcctgagaagcagattcctggacgccagaagaaagagaagaaacttcagcaagcaggccaccgaggtgctgaacgagtacttctacagccacctgagcaacccctaccccagcgaggaggccaaggaggagctggccaagaagtgcggcatcaccgtgagccaggtgagcaactggttcggcaacaagagaatcagatacaagaagaacatcggcaagttccaggaggaggccaacatctacgccgtgaagaccgccgtgagcgtgacccagggcggccacagcagaaccagcagccccaccccccccagcagcgccggcagcggcggcagcttcaacctgagcggcagcggcgacatgttcctgggcatgcccggcctgaacggcgacagctacagcgccagccaggtggagagcctgagacacagcatgggccccggcggctacggcgacaacctgggcggcggccagatgtacagccccagagagatgagagccaacggcagctggcaggaggccgtgacccccagcagcgtgaccagccccaccgagggccccggcagcgtgcacagcgacaccagcaactag

SEQ ID NO: 130001 - DNA, 1392 bp, Artificial Sequence
  derived and/or modified sequence
atggacgagagactgctgggcccccccccccccggcggcggcagaggcggcctgggcctggtgagcggcgagcccggcggccccggcgagccccccggcggcggcgaccccggcggcggcagcggcggcgtgcccggcggcagaggcaagcaggacatcggcgacatcctgcagcagatcatgaccatcaccgaccagagcctggacgaggcccaggccaagaagcacgccctgaactgccacagaatgaagcccgccctgttcagcgtgctgtgcgagatcaaggagaagaccggcctgagcatcagaagcagccaggaggaggagcccgtggacccccagctgatgagactggacaacatgctgctggccgagggcgtggccggccccgagaagggcggcggcagcgccgccgccgccgccgccgccgccgccagcggcggcggcgtgagccccgacaacagcatcgagcacagcgactacagaagcaagctggcccagatcagacacatctaccacagcgagctggagaagtacgagcaggcctgcaacgagttcaccacccacgtgatgaacctgctgagagagcagagcagaaccagacccgtggcccccaaggagatggagagaatggtgagcatcatccacagaaagttcagcgccatccagatgcagctgaagcagagcacctgcgaggccgtgatgatcctgagaagcagattcctggacgccagaagaaagagaagaaacttcagcaagcaggccaccgaggtgctgaacgagtacttctacagccacctgagcaacccctaccccagcgaggaggccaaggaggagctggccaagaagtgcggcatcaccgtgagccaggtgctgtggagactgagagaggagctgagcggcaaggtgcacgccagccagctgggcgccgtggtgagcaactggttcggcaacaagagaatcagatacaagaagaacatcggcaagttccaggaggaggccaacatctacgccgtgaagaccgccgtgatcatcgccgagagaggccccttcggcgtgagaggcaccgagctgagcctgcccagcctgcccccccagggcagcggcggcagcttcaacctgagcggcagcggcgacatgttcctgggcatgcccggcctgaacggcgacagctacagcgccagccaggtgagatgccccagccccctgcaggtggagagcctgagacacagcatgggccccggcggctacggcgacaacctgggcggcggccagatgtacagccccagagagatgagagccaacggcagctggcaggaggccgtgacccccagcagcgtgaccagccccaccgagggccccggcagcgtgcacagcgacaccagcaactag

SEQ ID NO: 130002 - DNA, 1317 bp, Artificial Sequence
  derived and/or modified sequence
atggacgagagactgctgggcccccccccccccggcggcggcagaggcggcctgggcctggtgagcggcgagcccggcggccccggcgagccccccggcggcggcgaccccggcggcggcagcggcggcgtgcccggcggcagaggcaagcaggacatcggcgacatcctgcagcagatcatgaccatcaccgaccagagcctggacgaggcccaggccaagaagcacgccctgaactgccacagaatgaagcccgccctgttcagcgtgctgtgcgagatcaaggagaagaccggcctgagcatcagaagcagccaggaggaggagcccgtggacccccagctgatgagactggacaacatgctgctggccgagggcgtggccggccccgagaagggcggcggcagcgccgccgccgccgccgccgccgccgccagcggcggcggcgtgagccccgacaacagcatcgagcacagcgactacagaagcaagctggcccagatcagacacatctaccacagcgagctggagaagtacgagcaggcctgcaacgagttcaccacccacgtgatgaacctgctgagagagcagagcagaaccagacccgtggcccccaaggagatggagagaatggtgagcatcatccacagaaagttcagcgccatccagatgcagctgaagcagagcacctgcgaggccgtgatgatcctgagaagcagattcctggacgccagaagaaagagaagaaacttcagcaagcaggccaccgaggtgctgaacgagtacttctacagccacctgagcaacccctaccccagcgaggaggccaaggaggagctggccaagaagtgcggcatcaccgtgagccaggtgagcaactggttcggcaacaagagaatcagatacaagaagaacatcggcaagttccaggaggaggccaacatctacgccgtgaagaccgccgtgagcgtgacccagggcggccacagcagaaccagcagccccaccccccccagcagcgccggcagcggcggcagcttcaacctgagcggcagcggcgacatgttcctgggcatgcccggcctgaacggcgacagctacagcgccagccaggtgagatgccccagccccctgcaggtggagagcctgagacacagcatgggccccggcggctacggcgacaacctgggcggcggccagatgtacagccccagagagatgagagccaacggcagctggcaggaggccgtgacccccagcagcgtgaccagccccaccgagggccccggcagcgtgcacagcgacaccagcaactag

SEQ ID NO: 130003 - DNA, 1332 bp, Artificial Sequence
  derived and/or modified sequence
ggcgccgagcagggcggcggcctgagagcccccccccagctgtggaccaacggctactggggcagacccctgcaggccggcgccggcggcctgggcctggtgagcggcgagcccggcggccccggcgagccccccggcggcggcgaccccggcggcggcagcggcggcgtgcccggcggcagaggcaagcaggacatcggcgacatcctgcagcagatcatgaccatcaccgaccagagcctggacgaggcccaggccaagaagcacgccctgaactgccacagaatgaagcccgccctgttcagcgtgctgtgcgagatcaaggagaagaccggcctgagcatcagaagcagccaggaggaggagcccgtggacccccagctgatgagactggacaacatgctgctggccgagggcgtggccggccccgagaagggcggcggcagcgccgccgccgccgccgccgccgccgccagcggcggcggcgtgagccccgacaacagcatcgagcacagcgactacagaagcaagctggcccagatcagacacatctaccacagcgagctggagaagtacgagcaggcctgcaacgagttcaccacccacgtgatgaacctgctgagagagcagagcagaaccagacccgtggcccccaaggagatggagagaatggtgagcatcatccacagaaagttcagcgccatccagatgcagctgaagcagagcacctgcgaggccgtgatgatcctgagaagcagattcctggacgccagaagaaagagaagaaacttcagcaagcaggccaccgaggtgctgaacgagtacttctacagccacctgagcaacccctaccccagcgaggaggccaaggaggagctggccaagaagtgcggcatcaccgtgagccaggtgagcaactggttcggcaacaagagaatcagatacaagaagaacatcggcaagttccaggaggaggccaacatctacgccgtgaagaccgccgtgagcgtgacccagggcggccacagcagaaccagcagccccaccccccccagcagcgccggcagcggcggcagcttcaacctgagcggcagcggcgacatgttcctgggcatgcccggcctgaacggcgacagctacagcgccagccaggtggagagcctgagacacagcatgggccccggcggctacggcgacaacctgggcggcggccagatgtacagccccagagagatgagagccaacggcagctggcaggaggccgtgacccccagcagcgtgaccagccccaccgagggccccggcagcgtgcacagcgacaccagcaactag

SEQ ID NO: 130004 - DNA, 1380 bp, Artificial Sequence
  derived and/or modified sequence
atggacgagagactgctgggcccccccccccccggcggcggcagaggcggcctgggcctggtgagcggcgagcccggcggccccggcgagccccccggcggcggcgaccccggcggcggcagcggcggcgtgcccggcggcagaggcaagcaggacatcggcgacatcctgcagcagatcatgaccatcaccgaccagagcctggacgaggcccaggccaagaagcacgccctgaactgccacagaatgaagcccgccctgttcagcgtgctgtgcgagatcaaggagaagaccggcctgagcatcagaagcagccaggaggaggagcccgtggacccccagctgatgagactggacaacatgctgctggccgagggcgtggccggccccgagaagggcggcggcagcgccgccgccgccgccgccgccgccgccagcggcggcggcgtgagccccgacaacagcatcgagcacagcgactacagaagcaagctggcccagatcagacacatctaccacagcgagctggagaagtacgagcaggcctgcaacgagttcaccacccacgtgatgaacctgctgagagagcagagcagaaccagacccgtggcccccaaggagatggagagaatggtgagcatcatccacagaaagttcagcgccatccagatgcagctgaagcagagcacctgcgaggccgtgatgatcctgagaagcagattcctggacgccagaagaaagagaagaaacttcagcaagcaggccaccgaggtgctgaacgagtacttctacagccacctgagcaacccctaccccagcgaggaggccaaggaggagctggccaagaagtgcggcatcaccgtgagccaggtgctgtggagactgagagaggagctgagcggcaaggtgcacgccagccagctgggcgccgtggtgagcaactggttcggcaacaagagaatcagatacaagaagaacatcggcaagttccaggaggaggccaacatctacgccgtgaagaccgccgtgagcgtgacccagggcggccacagcagaaccagcagccccaccccccccagcagcgccggcagcggcggcagcttcaacctgagcggcagcggcgacatgttcctgggcatgcccggcctgaacggcgacagctacagcgccagccaggtgagatgccccagccccctgcaggtggagagcctgagacacagcatgggccccggcggctacggcgacaacctgggcggcggccagatgtacagccccagagagatgagagccaacggcagctggcaggaggccgtgacccccagcagcgtgaccagccccaccgagggccccggcagcgtgcacagcgacaccagcaactag

SEQ ID NO: 130005 - protein, 1060 aa, Artificial Sequence
  derived and/or modified sequence
MDSGAGGRRCPEAALLILGPPRMEHLRHSPGPGGQRLLLPSMLLALLLLLAPSPGHATRVVYKVPEEQPPNTLIGSLAADYGFPDVGHLYKLEVGAPYLRVDGKTGDIFTTETSIDREGLRECQNQLPGDPCILEFEVSITDLVQNGSPRLLEGQIEVQDINDNTPNFASPVITLAIPENTNIGSLFPIPLASDRDAGPNGVASYELQAGPEAQELFGLQVAEDQEEKQPQLIVMGNLDRERWDSYDLTIKVQDGGSPPRASSALLRVTVLDTNDNAPKFERPSYEAELSENSPIGHSVIQVKANDSDQGANAEIEYTFHQAPEVVRRLLRLDRNTGLITVQGPVDREDLSTLRFSVLAKDRGTNPKSARAQVVVTVKDMNDNAPTIEIRGIGLVTHQDGMANISEDVAEETAVALVQVSDRDEGENAAVTCVVAGDVPFQLRQASETGSDSKKKYFLQTTTPLDYEKVKDYTIEIVAVDSGNPPLSSTNSLKVQVVDVNDNAPVFTQSVTEVAFPENNKPGEVIAEITASDADSGSNAELVYSLEPEPAAKGLFTISPETGEIQVKTSLDREQRESYELKVVAADRGSPSLQGTATVLVNVLDCNDNDPKFMLSGYNFSVMENMPALSPVGMVTVIDGDKGENAQVQLSVEQDNGDFVIQNGTGTILSSLSFDREQQSTYTFQLKAVDGGVPPRSAYVGVTINVLDENDNAPYITAPSNTSHKLLTPQTRLGETVSQVAAEDFDSGVNAELIYSIAGGNPYGLFQIGSHSGAITLEKEIERRHHGLHRLVVKVSDRGKPPRYGTALVHLYVNETLANRTLLETLLGHSLDTPLDIDIAGDPEYERSKQRGNILFGVVAGVVAVALLIALAVLVRYCRQREAKSGYQAGKKETKDLYAPKPSGKASKGNKSKGKKSKSPKPVKPVEDEDEAGLQKSLKFNLMSDAPGDSPRIHLPLNYPPGSPDLGRHYRSNSPLPSIQLQPQSPSASKKHQVVQDLPPANTFVGTGDTTSTGSEQYSDYSYRTNPPKYPSKQVGQPFQLSTPQPLPHPYHGAIWTEVWE

SEQ ID NO: 130006 - protein, 1048 aa, Artificial Sequence
  derived and/or modified sequence
MDSGAGGRRCPEAALLILGPPRMEHLRHSPGPGGQRLLLPSMLLALLLLLAPSPGHATRVVYKVPEEQPPNTLIGSLAADYGFPDVGHLYKLEVGAPYLRVDGKTGDIFTTETSIDREGLRECQNQLPGDPCILEFEVSITDLVQNGSPRLLEGQIEVQDINDNTPNFASPVITLAIPENTNIGSLFPIPLASDRDAGPNGVASYELQVAEDQEEKQPQLIVMGNLDRERWDSYDLTIKVQDGGSPPRASSALLRVTVLDTNDNAPKFERPSYEAELSENSPIGHSVIQVKANDSDQGANAEIEYTFHQAPEVVRRLLRLDRNTGLITVQGPVDREDLSTLRFSVLAKDRGTNPKSARAQVVVTVKDMNDNAPTIEIRGIGLVTHQDGMANISEDVAEETAVALVQVSDRDEGENAAVTCVVAGDVPFQLRQASETGSDSKKKYFLQTTTPLDYEKVKDYTIEIVAVDSGNPPLSSTNSLKVQVVDVNDNAPVFTQSVTEVAFPENNKPGEVIAEITASDADSGSNAELVYSLEPEPAAKGLFTISPETGEIQVKTSLDREQRESYELKVVAADRGSPSLQGTATVLVNVLDCNDNDPKFMLSGYNFSVMENMPALSPVGMVTVIDGDKGENAQVQLSVEQDNGDFVIQNGTGTILSSLSFDREQQSTYTFQLKAVDGGVPPRSAYVGVTINVLDENDNAPYITAPSNTSHKLLTPQTRLGETVSQVAAEDFDSGVNAELIYSIAGGNPYGLFQIGSHSGAITLEKEIERRHHGLHRLVVKVSDRGKPPRYGTALVHLYVNETLANRTLLETLLGHSLDTPLDIDIAGDPEYERSKQRGNILFGVVAGVVAVALLIALAVLVRYCRQREAKSGYQAGKKETKDLYAPKPSGKASKGNKSKGKKSKSPKPVKPVEDEDEAGLQKSLKFNLMSDAPGDSPRIHLPLNYPPGSPDLGRHYRSNSPLPSIQLQPQSPSASKKHQVVQDLPPANTFVGTGDTTSTGSEQYSDYSYRTNPPKYPSKQVGQPFQLSTPQPLPHPYHGAIWTEVWE

SEQ ID NO: 130007 - protein, 1038 aa, Artificial Sequence
  derived and/or modified sequence
MEHLRHSPGPGGQRLLLPSMLLALLLLLAPSPGHATRVVYKVPEEQPPNTLIGSLAADYGFPDVGHLYKLEVGAPYLRVDGKTGDIFTTETSIDREGLRECQNQLPGDPCILEFEVSITDLVQNGSPRLLEGQIEVQDINDNTPNFASPVITLAIPENTNIGSLFPIPLASDRDAGPNGVASYELQAGPEAQELFGLQVAEDQEEKQPQLIVMGNLDRERWDSYDLTIKVQDGGSPPRASSALLRVTVLDTNDNAPKFERPSYEAELSENSPIGHSVIQVKANDSDQGANAEIEYTFHQAPEVVRRLLRLDRNTGLITVQGPVDREDLSTLRFSVLAKDRGTNPKSARAQVVVTVKDMNDNAPTIEIRGIGLVTHQDGMANISEDVAEETAVALVQVSDRDEGENAAVTCVVAGDVPFQLRQASETGSDSKKKYFLQTTTPLDYEKVKDYTIEIVAVDSGNPPLSSTNSLKVQVVDVNDNAPVFTQSVTEVAFPENNKPGEVIAEITASDADSGSNAELVYSLEPEPAAKGLFTISPETGEIQVKTSLDREQRESYELKVVAADRGSPSLQGTATVLVNVLDCNDNDPKFMLSGYNFSVMENMPALSPVGMVTVIDGDKGENAQVQLSVEQDNGDFVIQNGTGTILSSLSFDREQQSTYTFQLKAVDGGVPPRSAYVGVTINVLDENDNAPYITAPSNTSHKLLTPQTRLGETVSQVAAEDFDSGVNAELIYSIAGGNPYGLFQIGSHSGAITLEKEIERRHHGLHRLVVKVSDRGKPPRYGTALVHLYVNETLANRTLLETLLGHSLDTPLDIDIAGDPEYERSKQRGNILFGVVAGVVAVALLIALAVLVRYCRQREAKSGYQAGKKETKDLYAPKPSGKASKGNKSKGKKSKSPKPVKPVEDEDEAGLQKSLKFNLMSDAPGDSPRIHLPLNYPPGSPDLGRHYRSNSPLPSIQLQPQSPSASKKHQVVQDLPPANTFVGTGDTTSTGSEQYSDYSYRTNPPKYPSKQVGQPFQLSTPQPLPHPYHGAIWTEVWE

SEQ ID NO: 130008 - DNA, 3183 bp, Artificial Sequence
  derived and/or modified sequence
atggacagcggagctggcggaagaaggtgcccagaggctgctctcttaattcttggccccccaagaatggaacatctgcgccactcacccggccccggtggtcagcgactgctgctgccgagcatgctgcttgcactgttgttactgttggcaccttctccgggacatgctacaagagtcgtctacaaggtgccagaggaacagcccccaaacactctgattggatccttggccgccgactatgggtttcccgatgttggacacctctataagttggaagtgggagccccgtaccttcgagtggacggcaagacgggcgacattttcacaaccgaaacaagcattgaccgggaaggcctcagggagtgccaaaatcagctacccggagacccctgcatcctggagtttgaggtcagtatcacagatttggtgcagaacgggtctccgcgcctgctggagggccagattgaggtccaagacatcaatgacaacaccccaaacttcgctagccctgtcattaccctcgcaattccagaaaacactaacattggttccctctttccaatcccactggctagtgaccgcgatgcaggtcctaacggcgttgcctcttatgagctgcaggcgggccccgaggcacaggagttatttggtttgcaagtggctgaggatcaagaggagaaacagcctcagctaatagtcatggggaatctggatcgggaaaggtgggattcatacgacttaaccattaaggtgcaggatgggggttctcctccacgcgcttcatctgcacttctccgcgtgactgtactggataccaatgacaatgctcctaagtttgagcgacccagttatgaagctgagctttcagagaacagccctatcggacacagcgtgatccaggtgaaggcaaacgattctgaccagggcgccaacgcagagatcgaatacacattccaccaggcaccggaagtggtgagaagactgttacgccttgaccgtaacacaggcctgattactgtgcaaggcccggtcgacagagaagacctatctactctccggttttcagtgctagcaaaggaccgcggcactaaccctaaatctgctcgagcacaggtggtggtcacggtaaaagacatgaacgacaatgcccctacaatcgagatacgtgggatcggccttgtgacgcaccaggatgggatggctaatatcagcgaggacgtagctgaggagacggccgttgcattggtgcaggtcagtgacagggacgagggtgagaacgcagccgtgacctgcgttgttgccggggacgttccgttccagctgaggcaggccagcgaaactggaagcgacagtaaaaagaagtacttcctgcagactacaacgcccctggactatgagaaggtcaaagattataccattgagattgtggcagttgactctggaaaccctccactgtcctccaccaattcgctgaaggtacaggtggtggacgtcaatgataatgccccagttttcactcagtccgtgacagaagtggccttcccagaaaataataaaccaggagaggtaatagccgagatcactgcctctgatgctgattcgggatccaacgccgaactggtctattctctggagcccgaacccgcagctaaagggctgtttaccatttcacccgagacaggagaaattcaggtgaagacttcacttgaccgagagcaacgggaaagctatgagttaaaggtggtcgcggccgatcgcggatctcccagtctacaggggactgccacagtactggtgaatgttctggattgcaacgacaacgatcccaaattcatgctgtctggctacaacttttccgtgatggagaacatgcccgcactgtccccggttgggatggtcacggtcatcgacggcgacaaaggggagaatgcccaggttcaactaagcgtagagcaggataacggagacttcgtcatacagaatgggacagggacaatcctttctagtttaagtttcgatcgcgagcaacagagtacgtacacatttcagttaaaagccgtggacgggggcgtgccacctcgctctgcatacgtgggtgttacaattaacgtccttgacgaaaacgataatgccccttacattactgcaccctccaacaccagtcacaagctgctcaccccccagactcgtctgggagagaccgtgtcccaggtggccgccgaagactttgactctggggtaaacgccgagttaatctactccatcgccggtggcaacccctatggcttgtttcaaatcggttctcactcgggagccattacactagaaaaggagatcgagcgacggcatcacggattgcataggttagtagtgaaggtatcggaccgcggaaagccgccccgttatggcaccgcactggttcatctatacgtcaatgagacactggctaatcggacgctgctggaaactctgttgggccactccctggatacccccctcgacattgacattgcgggagatcccgagtatgaacgctccaagcaaaggggtaacatcctgtttggggtggtcgctggggtcgtggccgtggctctgctcattgctctggcagttctggtgagatattgccgtcaacgcgaagcgaagagcggatatcaggcaggcaagaaagaaaccaaagacctctatgcccctaagcccagtggtaaggcatcgaaaggcaacaaaagtaagggcaagaagagcaagagtccaaagccggtaaaaccagtcgaggatgaagatgaagctggccttcagaaaagtctgaagttcaacctcatgtctgacgccccaggagactcccccaggatccacctgcccctgaactacccccctggcagtcccgacctcggccggcactataggtccaatagcccgctgccttctatccagctacagccccaaagtccaagcgcctcgaagaaacatcaagttgtgcaggacttgccccccgccaacacatttgttggcacgggggacactacttcaacaggtagcgagcaatactcggattatagctataggactaacccgccgaagtatccaagtaaacaggtgggacaacctttccagctgtccacacctcaacctctgcctcacccttaccacggggccatctggacggaggtgtgggagtag

SEQ ID NO: 130009 - DNA, 3147 bp, Artificial Sequence
  derived and/or modified sequence
atggactccggagctggtggacgcagatgccccgaagcggctctgctgatcttgggtcctcccaggatggaacacttgcgacatagtccggggcctggcggccagcggctcctcctcccatccatgctactggccctgctcctcctgcttgccccttctccaggacatgccactagagtggtgtacaaggtgcccgaggaacagcctccaaacacattgatcggctcactggctgcggattatggctttccagacgtgggccacctgtataaacttgaggttggagccccttatctaagagttgatggaaagaccggggatatctttacaaccgagacgtcgatcgatagggaaggactccgcgagtgccagaatcagcttcccggcgatccttgcatcctggagtttgaggtgtctattacggacctggtccaaaacggtagtccgaggctgttagagggccagatcgaggtgcaagacatcaatgataatactcccaattttgcctcaccagtgatcacactcgccatccctgaaaacactaatatcggctctctttttcctatccctctcgctagtgaccgcgatgccggtcccaacggtgtggcatcctatgagctgcaggttgcagaagaccaggaggagaagcagcctcaactgattgtgatgggaaacctcgacagagagagatgggattcttacgacctgaccattaaggtacaggatggggggagtccacccagggcttccagcgcactgctgagagtgactgttctggatactaatgacaatgcacctaagtttgagagaccatcgtacgaggctgagctttctgagaatagtcctattgggcacagtgttatccaggtgaaggccaacgactcggaccagggagccaatgctgagattgaatacacattccatcaggcgcccgaagtcgtgcggaggctgctgcggctcgatcggaacacaggtcttatcacagtgcaggggccagtggatcgagaggatctcagtacactgcggttctccgtactcgcaaaggaccgcgggaccaatcctaaaagcgctcgcgcccaggtcgtggtgaccgtcaaggatatgaatgacaacgcacccacaatcgaaatacgtggcataggcctcgttactcaccaggatggcatggccaatattagtgaagacgttgccgaggagacggccgtggcattggtgcaggtgagtgacagagacgagggcgagaacgcagctgtgacatgcgtggtggcgggtgatgttccttttcagctcagacaagcttctgagaccggttcagacagtaagaaaaaatatttcctacagaccaccacacccctggactatgaaaaggtgaaagattataccatcgagattgtggcggttgactccggaaaccctcctctgtcaagtactaacagtctcaaagtacaggttgtcgatgtgaatgacaacgctccagtgttcactcagagcgttaccgaagtagcattcccagaaaataataaaccaggagaggtgattgccgagattaccgcctctgatgcggactctgggtcgaatgccgaactggtatactcactcgagcctgaacccgctgcaaagggactgttcaccatcagccccgagaccggtgaaatacaggtgaagacctcactcgatcgtgagcagcgggagagctatgaactgaaggttgtggcagctgacagggggtccccatctctgcaggggacagcgacagttctcgtaaatgtgttggattgtaatgataacgatcccaagttcatgctgtccggctataactttagcgttatggaaaacatgcctgctctctctccagtgggcatggtcacggtcattgacggggataagggcgagaatgcccaggtgcagctatctgtggaacaagacaatggtgattttgtcattcagaacggtaccggcactatcctgagctccctttcattcgaccgggagcagcagagtacatatacatttcaactcaaggcagtcgacggtggcgtacccccaagatctgcctatgttggggtaacgattaacgtccttgatgaaaatgacaatgctccatacatcacagcaccaagcaacacctcacataagctactgactccccaaactagactcggagagacagtcagccaagtggccgcagaggattttgacagcggcgtgaacgcggagctaatatactccattgctggtggtaatccatacggcctgttccagatcggaagtcattccggagcgattaccctggagaaggagattgagaggaggcaccacgggctgcaccgcctagtagtcaaagtgtccgatcgagggaagcctcccaggtacggtaccgcactcgtccacctgtacgtgaacgagacactggccaatagaacgttgctggagaccctgctgggacattcactcgacaccccactggatattgatatcgccggcgacccagagtatgagcgatctaagcaacgagggaacatactgttcggtgttgtggcaggagttgtggccgtggcactgctcatcgccctcgccgtgctcgtgaggtattgccgtcaaagggaggccaaatcaggatatcaagcaggtaaaaaggaaacaaaagatctttatgccccgaagcccagcggtaaagcgtcaaaggggaacaagtcaaaaggcaaaaagtctaagtcccctaagcctgtgaagccggtggaagacgaggacgaagccggccttcagaagtctcttaagtttaatctcatgtccgacgcaccaggtgattcgccccgaatccacctgccgctcaattatcctccgggcagcccagatctgggccgccactaccggtcaaacagcccactgcctagtatccagctgcaaccacagtccccttccgcctccaaaaagcaccaggtcgtccaggatctgccaccagccaatacatttgtaggcacaggagacacaacgtctactggttccgagcagtacagcgactacagttacaggaccaatccacctaagtacccatcgaagcaggtcggccagccattccagctgagcacacctcaacccctacctcacccatatcacggcgcgatatggaccgaggtttgggaatag

SEQ ID NO: 130010 - DNA, 3183 bp, Artificial Sequence
  derived and/or modified sequence
atggattctggagctgggggccgccgctgcccagaggccgccctgctgatcctgggcccccccaggatggagcacctgcggcacagccctggccctgggggccagaggctgctgctgcccagcatgctgctggccctgctgctgctgctggcccccagccctggccacgccaccagggtggtgtacaaggtgcctgaggagcagccccccaacaccctcatcggcagcctggccgctgactatggcttcccagatgtgggccacctgtacaagctggaggtgggcgccccctacctgcgggtggatggcaagacaggagacatcttcaccacagagaccagcattgaccgggagggcctgcgggagtgccagaaccagctgcccggggacccctgcatcctggagtttgaggtgtccatcacagacctggtgcagaatggcagcccccggctgctggagggccagatcgaggtgcaggacatcaatgacaacacccccaactttgccagccctgtgatcaccctggccatccctgagaacaccaacatcggcagcctcttccccatccccctggccagtgacagagatgctggccccaacggggtggccagctatgagctgcaggccggccctgaggcccaggagctgtttggcctgcaggtggccgaggaccaggaggagaagcagccccagctgattgtgatgggcaacctggaccgggagcgctgggacagctatgacctgaccatcaaggtgcaggacggcggcagccccccccgggccagcagcgccctgctgcgggtgacagtgctggacaccaatgacaatgcccccaagtttgagcggcccagctatgaagctgagctgtctgagaacagccccatcggccacagcgtcatccaggtgaaggccaatgacagcgaccagggcgccaatgctgagattgagtacaccttccaccaggcccctgaggtggtgcggcggctgctgcggctggacaggaacacaggcctcatcaccgtgcagggccctgtggaccgggaggacctgagcaccctgcgcttctctgtgctggccaaggaccggggcaccaaccccaagagcgcccgggcccaggtggtggtgacagtgaaggacatgaatgacaatgcccccaccatcgagatccggggcatcggcctggtgacccaccaggacggcatggccaacatcagtgaagatgtggccgaggagacagctgtggccctggtgcaggtgtctgacagagatgaaggagaaaatgctgctgtgacctgtgtggtggccggagatgtgcccttccagctgcggcaggccagcgagaccggcagtgacagcaagaagaagtacttcctgcagaccaccacccccctggactatgagaaggtgaaggactacaccatcgagatcgtggccgtggacagcggcaacccccccctgagcagcaccaacagcctgaaggtgcaggtggtggatgtgaatgacaatgcccctgtgttcacccagagcgtgacagaggtggccttccctgagaacaacaagccaggagaggtgattgctgagatcacagccagtgatgctgacagcggcagcaatgctgagctggtgtacagcctggagcctgagcctgctgccaagggcctcttcaccatcagccctgagactggagagatccaggtgaagaccagcctggaccgggagcagcgggagagctatgagctgaaggtggtggccgctgaccggggcagccccagcctgcagggcacagccaccgtgctggtgaatgtgctggactgcaatgacaatgaccccaagttcatgctgagcggctacaacttctctgtgatggagaacatgcctgccctgagccctgtgggcatggtgacagtgattgatggagacaagggagaaaatgcccaggtgcagctgtctgtggagcaggacaatggagactttgtgatccagaatggcaccggcaccatcctgagcagcctgagctttgaccgggagcagcagagcacctacaccttccagctgaaggctgtggatggaggagtgcccccaagaagtgcctacgtgggcgtgaccatcaacgtgctggatgaaaatgacaatgccccctacatcacagcccccagcaacaccagccacaagctgctgaccccccagacccggctgggggagaccgtgtcccaggtggccgctgaggactttgacagcggcgtgaatgctgagctgatctacagcattgctgggggcaacccctacggcctcttccagatcggcagccacagcggggccatcaccctggagaaggagattgaaagaagacaccacggcctgcaccggctggtggtgaaggtgtctgaccggggcaagccacccaggtatggaacagccctggtgcacctgtatgtgaatgagaccctggccaacagaaccctgctggagaccctgctgggccacagcctggacacccccctggacatcgacattgctggggaccctgaatatgaaagaagcaagcagaggggcaacatcctgtttggagtggtggccggcgtggtggccgtggccctgctgattgccctggccgtgctggtgcgctactgccggcagcgggaggccaagagcggctaccaggccggcaagaaggagaccaaggacctgtatgcccccaagcccagcggcaaggccagcaaaggaaacaagagcaagggcaagaagagcaagagccccaagcctgtgaagcctgtggaggatgaagatgaagctggcctgcagaagagcctgaagttcaacctgatgtctgatgcccctggggacagcccccgcatccacctgcccctgaactacccacctggcagcccagacctgggccgccactaccgcagcaacagccccctgcccagcatccagctgcagccccagagccccagcgccagcaagaagcaccaggtggtgcaggacctgcccccagccaacacctttgtgggcaccggggacaccaccagcacaggcagcgagcagtacagcgactacagctaccgcaccaacccccccaagtaccccagcaagcaggtgggccagcccttccagctgagcaccccccagcccctgccccacccctaccatggagccatctggacagaggtgtgggagtag

SEQ ID NO: 130011 - DNA, 3147 bp, Artificial Sequence
  derived and/or modified sequence
atggattctggagctgggggccgccgctgcccagaggccgccctgctgatcctgggcccccccaggatggagcacctgcggcacagccctggccctgggggccagaggctgctgctgcccagcatgctgctggccctgctgctgctgctggcccccagccctggccacgccaccagggtggtgtacaaggtgcctgaggagcagccccccaacaccctcatcggcagcctggccgctgactatggcttcccagatgtgggccacctgtacaagctggaggtgggcgccccctacctgcgggtggatggcaagacaggagacatcttcaccacagagaccagcattgaccgggagggcctgcgggagtgccagaaccagctgcccggggacccctgcatcctggagtttgaggtgtccatcacagacctggtgcagaatggcagcccccggctgctggagggccagatcgaggtgcaggacatcaatgacaacacccccaactttgccagccctgtgatcaccctggccatccctgagaacaccaacatcggcagcctcttccccatccccctggccagtgacagagatgctggccccaacggggtggccagctatgagctgcaggtggccgaggaccaggaggagaagcagccccagctgattgtgatgggcaacctggaccgggagcgctgggacagctatgacctgaccatcaaggtgcaggacggcggcagccccccccgggccagcagcgccctgctgcgggtgacagtgctggacaccaatgacaatgcccccaagtttgagcggcccagctatgaagctgagctgtctgagaacagccccatcggccacagcgtcatccaggtgaaggccaatgacagcgaccagggcgccaatgctgagattgagtacaccttccaccaggcccctgaggtggtgcggcggctgctgcggctggacaggaacacaggcctcatcaccgtgcagggccctgtggaccgggaggacctgagcaccctgcgcttctctgtgctggccaaggaccggggcaccaaccccaagagcgcccgggcccaggtggtggtgacagtgaaggacatgaatgacaatgcccccaccatcgagatccggggcatcggcctggtgacccaccaggacggcatggccaacatcagtgaagatgtggccgaggagacagctgtggccctggtgcaggtgtctgacagagatgaaggagaaaatgctgctgtgacctgtgtggtggccggagatgtgcccttccagctgcggcaggccagcgagaccggcagtgacagcaagaagaagtacttcctgcagaccaccacccccctggactatgagaaggtgaaggactacaccatcgagatcgtggccgtggacagcggcaacccccccctgagcagcaccaacagcctgaaggtgcaggtggtggatgtgaatgacaatgcccctgtgttcacccagagcgtgacagaggtggccttccctgagaacaacaagccaggagaggtgattgctgagatcacagccagtgatgctgacagcggcagcaatgctgagctggtgtacagcctggagcctgagcctgctgccaagggcctcttcaccatcagccctgagactggagagatccaggtgaagaccagcctggaccgggagcagcgggagagctatgagctgaaggtggtggccgctgaccggggcagccccagcctgcagggcacagccaccgtgctggtgaatgtgctggactgcaatgacaatgaccccaagttcatgctgagcggctacaacttctctgtgatggagaacatgcctgccctgagccctgtgggcatggtgacagtgattgatggagacaagggagaaaatgcccaggtgcagctgtctgtggagcaggacaatggagactttgtgatccagaatggcaccggcaccatcctgagcagcctgagctttgaccgggagcagcagagcacctacaccttccagctgaaggctgtggatggaggagtgcccccaagaagtgcctacgtgggcgtgaccatcaacgtgctggatgaaaatgacaatgccccctacatcacagcccccagcaacaccagccacaagctgctgaccccccagacccggctgggggagaccgtgtcccaggtggccgctgaggactttgacagcggcgtgaatgctgagctgatctacagcattgctgggggcaacccctacggcctcttccagatcggcagccacagcggggccatcaccctggagaaggagattgaaagaagacaccacggcctgcaccggctggtggtgaaggtgtctgaccggggcaagccacccaggtatggaacagccctggtgcacctgtatgtgaatgagaccctggccaacagaaccctgctggagaccctgctgggccacagcctggacacccccctggacatcgacattgctggggaccctgaatatgaaagaagcaagcagaggggcaacatcctgtttggagtggtggccggcgtggtggccgtggccctgctgattgccctggccgtgctggtgcgctactgccggcagcgggaggccaagagcggctaccaggccggcaagaaggagaccaaggacctgtatgcccccaagcccagcggcaaggccagcaaaggaaacaagagcaagggcaagaagagcaagagccccaagcctgtgaagcctgtggaggatgaagatgaagctggcctgcagaagagcctgaagttcaacctgatgtctgatgcccctggggacagcccccgcatccacctgcccctgaactacccacctggcagcccagacctgggccgccactaccgcagcaacagccccctgcccagcatccagctgcagccccagagccccagcgccagcaagaagcaccaggtggtgcaggacctgcccccagccaacacctttgtgggcaccggggacaccaccagcacaggcagcgagcagtacagcgactacagctaccgcaccaacccccccaagtaccccagcaagcaggtgggccagcccttccagctgagcaccccccagcccctgccccacccctaccatggagccatctggacagaggtgtgggagtag

SEQ ID NO: 130012 - DNA, 3183 bp, Artificial Sequence
  derived and/or modified sequence
atggacagcggcgccggcggccggcggtgccccgaggccgccctgctaatactggggcctccacgaatggagcatctcagacactctcctggccctgggggccagcgtctcttgctcccatctatgctcttggcactgctgctgctactggcaccttccccgggccacgccacccgggtggtgtacaaggtgccagaggaacagcccccaaacacgctgattggttctctggcagctgattacggctttcctgatgtcggacacctctacaaactcgaagtcggggcaccatacctcagggtagatggaaagaccggggacatttttacaaccgagacatccatcgacagggagggactcagagagtgtcagaatcaactgcccggtgatccgtgcattctggaatttgaggtttccattactgatcttgtgcagaatgggagccctcgactattggaggggcagatcgaggttcaggacattaatgacaatacgccaaatttcgcatctcctgtcataactttggcaatccccgagaacacaaacattgggtctctctttcctatacctctggcatccgaccgcgacgctggccctaatggcgtcgctagctatgagcttcaggctggtccagaagctcaggagctgttcgggctgcaggtcgctgaagatcaagaggaaaagcaacctcagctcatcgtaatgggtaatctggatcgggagagatgggacagttatgacttgaccataaaagtgcaggacggcggctcaccgccacgagcctcatcggccctgttgcgcgttaccgtcctagacaccaatgacaatgcccctaagtttgagagaccttcatatgaggccgaactctccgaaaatagtcctatcggtcacagtgtcattcaggttaaggctaatgatagcgaccagggcgcaaatgctgagatagagtatacctttcaccaagcacctgaagtggtgaggcgactacttcgtctcgatcgtaacaccggcttaattaccgtgcaaggaccagttgacagagaggacctttctactttgcgcttctctgtcctggccaaggatcgagggactaaccctaagagcgcccgggctcaggttgtggtgactgtgaaagacatgaacgacaacgctcccaccatcgaaattagaggcattggcctggtgacccatcaggacgggatggctaatattagcgaggatgtggctgaggaaacggctgtggctttggtccaagtgtccgaccgggacgagggggagaatgccgccgtgacatgtgttgtagccggggatgtgccctttcagctgaggcaagctagcgaaaccggctccgatagtaaaaagaaatactttttacagactaccacccccttggattatgagaaggtgaaggactataccattgagattgtggctgtcgactctgggaatcccccactttcaagcacaaattcattaaaagttcaggtggtggatgtcaacgataatgcgcccgtgttcacccagagtgtcaccgaggtggcgtttcccgagaataacaagcctggggaggtgatcgccgagataaccgccagtgatgcagatagcggttctaacgctgagctggtgtattccttggagccagaaccagcagctaagggcctgtttactatatcaccagaaaccggagaaattcaggtgaaaaccagcttagaccgcgaacagagagagtcatatgaattgaaggttgtggctgccgatagaggatctccctccttgcagggaaccgctactgtgcttgtgaatgtgctggactgtaatgacaacgatccaaaattcatgctaagcggttacaactttagtgttatggagaacatgcccgcactatcccccgtgggtatggtaactgtaattgatggggataagggggagaacgcccaggtacaactgtcggtggaacaagacaacggagacttcgtgatccagaatggcacgggcaccattctctcctcactctcttttgaccgggagcagcaaagtacctacacctttcagttaaaggccgtggatggaggggtcccccctcgctctgcgtatgtgggagtcacgattaacgtcctggatgaaaacgacaacgcaccctacatcaccgccccgtctaatacctcacacaaactgctgactccccaaacaaggctcggcgagaccgtcagtcaggttgccgccgaggatttcgactcgggagtgaatgctgaattgatctattccattgccggcggtaacccatacggcttgttccagatcggatctcactctggggccatcactcttgagaaggaaattgagcgcagacatcacggtctgcatcggctagtggtcaaagtgtcagacagggggaagcccccgaggtatggaacagcactggtccacctgtacgtgaatgagacactggcaaatcgcaccctgctagaaacactcctcggccactcactggataccccacttgacattgatattgcgggagatcccgaatacgaaaggtctaagcaacggggcaacatcctatttggggttgtggctggcgtcgtggcggtggcacttctgatcgcactcgcggtactagtgcggtattgtagacagagagaggctaagtctggttaccaggctgggaaaaaagaaacaaaagacctctacgccccgaagccgagcggaaaagcatcaaaggggaacaagagcaagggcaagaaatctaagagccctaaaccggttaaaccagtggaggatgaagacgaggccggactccagaaaagcttgaaattcaatctcatgagtgacgcgccaggggattctcccaggatacacctgcccctgaattatccacctggaagccctgatctagggagacactaccggagtaactctccattgccatctatccagctgcaaccgcagtctcctagcgcaagcaaaaagcaccaggtggtccaagatctgccccccgcaaacacatttgtgggtactggagacactacctccaccggcagcgaacaatatagtgattactcctatagaacaaaccctccgaagtacccgtcaaaacaagttggacagcccttccagttatccaccccccagcccctcccccatccctatcatggagccatttggacggaagtttgggagtag

SEQ ID NO: 130013 - DNA, 3147 bp, Artificial Sequence
  derived and/or modified sequence
atggacagcggcgccggcggccggcggtgccccgaggccgccctgctgattttgggaccccctcgcatggagcatcttcggcatagccccggaccaggcggtcagagactgttgctgccatccatgctcctcgcactgctgcttctgctcgccccgagcccaggtcacgctacacgcgtggtttacaaagtaccggaagaacaacccccaaatacactcatcgggtctctggctgccgactacggctttcccgatgtgggacacttatataagctggaagtgggggcgccttacctgagggtggatggaaaaacgggtgatatctttacaactgaaacaagtatagaccgagagggactaagagagtgtcagaatcagctgcccggcgatccatgtatcctcgaatttgaggtttccatcacagatctagtgcagaatgggtctccacgcctgctggagggtcagatcgaagtgcaagacatcaatgacaacacccccaatttcgcaagcccagttatcactctcgccatccctgagaacacaaatataggaagtctctttcccatacccctggccagcgacagagatgcgggcccgaatggcgtagcatcatacgagcttcaggtggccgaggatcaggaagagaagcagccccagttgatagtgatggggaacctggatcgggaacggtgggacagctatgatctcacgatcaaggtgcaggatggggggtcccccccacgtgccagttcagcccttttaagagtaacagtcttagatacaaacgacaatgcccccaagttcgaacgaccaagttacgaggcagaactctctgagaactcccccattggccactctgtgattcaggtcaaggccaacgattcagaccagggcgcaaatgctgaaattgagtacaccttccatcaggctcccgaggtcgttagacgtctcctccgcctggatcgcaataccggcctcatcactgtgcagggtccggttgatcgtgaagatctctcgaccctcagattctcagtgttggcaaaagatcgggggacgaaccccaaatctgctcgggctcaggtggttgtcacagttaaagatatgaatgataacgctcccacaatcgaaatccggggaatcggactcgttactcaccaagatgggatggccaatatcagcgaggacgtcgctgaggagacggcagtggcccttgttcaggtgtccgacagagacgaaggggaaaacgcagccgtgacctgtgtggttgcgggagacgtcccatttcaactcagacaggcatcagagaccggttcagactcgaaaaaaaagtatttcctgcagaccaccactcctttagattacgagaaagtgaaggattacaccatagaaatcgtggccgtggatagcggtaacccacccctctcctccacaaatagcctgaaggtgcaggtggttgatgttaacgacaacgcccctgtgtttacgcagtctgtgaccgaagttgcattcccagagaacaacaaacctggggaggtgatagccgagattactgcctctgacgccgatagtggctcaaacgccgaattggtctattctctggagcccgagcccgccgccaaaggactcttcaccatctctccggaaaccggcgagatacaggtaaaaactagcctagatcgggaacaacgggagtcctatgagctaaaggtggtcgctgccgatcggggatctccatctctccaggggaccgctactgtccttgtcaatgttctcgactgcaacgacaacgaccctaagttcatgctatccggttataatttttccgttatggaaaatatgccggccctgagtcccgtgggtatggtgacagtgatcgatggggataagggtgaaaatgctcaggtccagctgtctgtagagcaagataacggggactttgtcatacagaacggcacagggactatcctaagcagtttaagctttgatagagagcaacaatctacctacacattccagctgaaggctgtcgacggaggagtgccgccacgaagtgcttacgtgggggtaacaattaatgtcttggatgagaacgacaacgccccctatattaccgccccaagcaacactagtcataagctgctgactccacagaccaggctgggcgaaactgtgtctcaggtggccgctgaagattttgacagcggcgttaatgccgaacttatttactccattgcagggggaaacccttacggcttgttccaaattggatcccacagtggggctataacacttgagaaggagatcgaaaggcggcaccatgggctccatcgactggttgtcaaggtgtcagatcgggggaaacctcctcgctacggaaccgccctggtgcacctatacgtgaatgaaaccctggctaatcgcactctgctggaaacactgctaggacatagcttggatacaccactggatattgacatcgcgggggacccagagtatgaaagatcgaaacagagaggaaatatcctgttcggggtggtcgctggagtggttgcagtggccctgcttatcgcgctggctgttttggtgcgctattgccgccagagagaggctaaaagcggatatcaagcaggcaagaaagagactaaggacctgtacgcccccaagcccagcggcaaggcatccaagggaaataagtcaaagggtaaaaagagcaaaagtccaaagccagtaaagcccgtggaggacgaagatgaggctgggttacaaaaatcgttgaaatttaatctgatgtccgacgcacctggcgacagtccaagaatccatttaccattgaactacccaccagggtcccccgacctcggcaggcattaccgttcaaacagtcctcttcctagtatacaactgcagcctcagtccccaagtgcaagtaaaaaacatcaggtggtgcaggatctgccccctgctaatacctttgttggcaccggcgatactacttccactggatccgagcagtattccgattacagctatcgtacaaatccgcctaagtatccaagcaagcaggtagggcagccttttcagctgtctaccccacagcctctacctcacccataccacggcgcaatttggaccgaggtgtgggaatag

SEQ ID NO: 130014 - DNA, 3183 bp, Artificial Sequence
  derived and/or modified sequence
atggactcaggcgctggcggaagaagatgtccagaggccgctttgctgatcctggggcctcctcgaatggagcacctacgccactctcctgggccagggggtcaacgtctgttgctgccctcaatgcttcttgccctgctgttactgttggcaccatctcccggtcacgctacccgcgttgtgtacaaagttccggaagagcagcctcctaatacactgataggtagcctggccgcagattacgggtttccggacgtaggacacctctacaaattggaggtcggtgctccctatttacgagttgatgggaaaactggagacattttcaccactgagaccagtatcgaccgggaagggttacgagagtgtcaaaatcaactgccaggggacccctgcatacttgaattcgaggtgagcattacagacttggtccagaatgggagccctagactgctggaagggcaaatcgaggtgcaggacatcaatgacaacacccctaatttcgcctctcctgtgatcacactcgccatccccgagaacaccaatatcggtagccttttccccatacccctggccagcgatagggacgctgggcctaatggagtcgctagctacgagctccaggccggaccagaggctcaggagctcttcggactgcaagtggcagaggaccaggaagagaagcaacctcagctgatcgtcatgggaaacctcgatcgagaacgatgggactcttatgacttgacaatcaaggtgcaggatggcggatcacccccacgtgcgtcctccgcattgctgcgggtcacagtgctggatacaaacgataatgctccaaaattcgagaggccatcctacgaagccgagctgtccgagaattcccccatcgggcactccgtgatccaggtgaaggccaacgacagcgaccaaggtgcaaacgcagaaattgagtacacttttcaccaggcacccgaagtcgtgaggcggcttttgaggttagaccgcaacactggcttgattaccgttcaagggcctgtagatcgcgaagacctgagcactctgaggttttcagttcttgcaaaagatcgcggtactaaccctaaatccgcacgcgcacaggttgttgtcacggtgaaggacatgaatgataacgctccaacaattgaaattcggggaatcggattagtgacgcaccaggacggcatggcaaacatttccgaagatgttgcggaggaaacagctgtcgccctggtgcaggtttcggatagagatgaaggtgagaacgcagcagttacatgtgtagtcgcgggagacgtgccctttcagctgcgtcaagcttctgaaacaggcagtgattcaaaaaagaagtatttcctgcaaaccacgacccctcttgactatgagaaagtcaaggattacacaattgaaattgtcgccgttgacagcggcaatccacccctttcttcgacgaattccttgaaggtgcaggtcgttgatgtgaatgataatgccccagtctttacccagagcgtgacagaagtcgccttcccagagaacaacaagccaggagaggtcatagccgagatcactgcctcagacgctgatagcggatccaatgccgaactggtgtatagtttggaaccggagccggcagctaagggattatttaccatctcacccgagaccggggagattcaggttaaaacctcactggatcgagagcagcgggaaagttacgaattgaaagtggtcgccgcagaccggggttccccttctctccagggcacagctacagtccttgtcaatgtcctagactgtaacgacaacgatccaaagttcatgctatcgggttacaacttttccgtcatggaaaatatgcccgcactgagtcccgttggcatggtcaccgttattgatggagacaagggagaaaatgcccaggtacaactgagtgtagagcaggataatggagattttgttatccagaacggcactggaaccatcctgtcttcgttaagcttcgatcgggaacaacagagcacgtatactttccagttgaaagccgtagatggtggggtgccaccaaggtccgcttatgtgggggtcacgataaacgtcctggacgagaacgacaacgctccctacatcacggctccttcgaatactagtcataaactactgacaccacagactaggctcggggagactgtgagccaggtggcagccgaagacttcgattccggcgtgaatgctgagctcatatactctattgccggtgggaacccgtatggcctgttccagatcggaagccactcaggggcaattacacttgaaaaagagatcgagagaaggcaccacggcctgcaccggctggtggtcaaagtgtccgatcgaggtaagccgcctcgttacggtaccgcactggtacatctttacgtgaacgagaccctagccaatcggacccttctcgagactctgttggggcactctctcgatacccctttggacattgatatagcaggggatcccgaatatgagaggagtaagcagcgcggaaacatcctgttcggcgtggtagccggtgtagtggctgtggctctcctcatcgctttggcagtcttggttaggtactgccgtcagcgggaggctaaatcaggctaccaagctgggaagaaagagactaaagatctgtacgctcccaagccaagcggtaaggcaagcaagggaaacaaatctaaagggaaaaagtcgaaatccccgaagcccgtcaagccggtagaagatgaggatgaggccggactgcagaaatctctgaaattcaatctgatgtccgacgcgcctggcgactcccctcgcatccacctaccattgaactacccccctggctcccctgacctgggccgacactataggtctaactcacccttgccgtccatccagctgcaaccacagtcccctagcgctagtaagaaacaccaggtagtgcaagaccttccacctgcaaacaccttcgtcgggactggagacacaacctccacgggatcggagcagtacagtgactattcttaccgcactaatccaccaaagtacccttcaaagcaggtgggtcagccatttcagctcagtaccccacagcccttgcctcacccataccacggcgcaatctggactgaggtgtgggaatag

SEQ ID NO: 130015 - DNA, 3147 bp, Artificial Sequence
  derived and/or modified sequence
atggacagcggggcaggcggaagacgatgtccagaggccgctctacttatactgggaccccctcggatggagcacctccgccacagtccgggaccaggcggacaaagacttcttctgccctccatgctgttagccctgctgctgcttttggccccaagcccagggcacgccacacgagtggtgtataaagtccccgaagagcagcctcctaacacactcatcgggtcactggccgctgattacggatttcccgacgtgggccatctctacaaacttgaagttggcgcaccttacctccgcgtcgacggtaagacgggggatatatttacgacagagacatcaattgatagggagggactgagagagtgccaaaaccagttgcctggcgacccctgtattctggaatttgaagtgagcattactgatcttgtgcaaaacggatcaccgcgtctcctggagggccagatcgaagtgcaggatattaatgataatacacctaatttcgcctctcccgtgattactctggccatcccagagaacactaatatcggtagcttatttccaattcctcttgcttctgatagggatgccggacccaacggtgtggcgtcctacgaactgcaggtcgctgaagatcaggaggaaaagcaaccgcagctgattgttatgggaaacttagaccgcgagaggtgggactcttatgacctgaccattaaggtccaggacggcggatcacctccccgagccagctcagcgcttctgcgagttaccgtcctggacaccaacgacaatgctccaaaatttgaaaggccatcatatgaggccgagctgtctgaaaatagccccatcgggcactctgttatccaagtgaaagctaacgattctgatcagggtgccaatgctgaaattgagtacacttttcaccaagcacccgaagtcgtgaggagacttctgagactggatcgcaatactgggctgattactgttcaggggccagtcgatcgggaggacctttctacactgcggttttcagtgttggccaaagacagggggactaatccaaagagcgccagggcacaagtggttgtcaccgtcaaagacatgaacgacaatgctcccactatcgagataagaggtatcgggcttgttactcaccaggacggaatggccaacatctccgaagacgtcgcagaagagacagccgtagcgttggtccaggtctctgatagggacgaaggagagaacgcagcggtaacctgcgtcgtcgccggtgacgttcctttccaacttcgccaggctagcgagaccggaagcgactcgaaaaagaaatactttttacaaaccaccactcccctggactacgaaaaggtgaaggactataccatcgagattgttgcggtggattccggaaacccacctctatcatcaacgaattccctgaaggtgcaggttgttgacgtgaatgacaatgctcctgttttcacccagtcggtgacagaggtcgccttccccgagaacaacaaaccaggagaggtgattgcagaaataaccgctagcgatgctgactcaggatcgaacgccgaactcgtatactctcttgaaccggagccggctgcgaaggggctcttcaccattagtccagagaccggcgagattcaggtcaaaacaagtctggaccgggaacagagggaaagctacgaactgaaggtggtggctgcagaccggggttctccttccttgcaggggaccgccaccgtcctcgtgaatgtgctggactgtaatgataatgaccccaagtttatgttgtccggatataacttctctgtcatggagaatatgcccgcacttagtccagttggtatggtcactgtaattgatggtgataaaggtgagaatgcccaggtacagctaagcgtcgaacaagacaatggtgatttcgtaatacagaacggcacgggaaccattttatcctcattgagtttcgatcgcgagcagcagtccacatataccttccagctgaaggctgtcgatggaggcgtgccgccacgaagcgcctatgtgggcgtcactattaacgttctggacgagaacgataacgccccttatattaccgcccctagcaacactagccataagcttctgaccccacagacaaggctaggagaaacagttagtcaggtggctgccgaagacttcgattccggggtgaacgctgagttgatctactcaatcgctgggggaaacccctacggcctgttccaaatcggatctcacagcggcgcaataacattggagaaagagattgagaggcgacaccacggccttcataggctggtcgtgaaagtgagcgaccggggtaagccaccgaggtacgggacagcccttgtgcacctgtacgtgaacgagactctggccaacaggacgctattagagaccctgctgggccactccttagacacaccgctcgacatcgacatagctggcgatccagaatacgagaggtcaaagcagaggggaaacatcttgttcggcgtggtggcaggggtggtggcagtggccctgttgatcgctctcgcggttctggtaagatactgccgacagcgcgaggcaaaatcaggctaccaagcaggcaagaaagaaactaaagatttgtacgcacctaaaccctctggaaaagcaagcaaggggaacaaatcaaagggaaaaaaatcaaagtcacccaagccagtcaaacccgtggaagacgaggacgaagcgggattacaaaaatccctgaagttcaacctgatgtctgacgcaccaggtgattcacccaggatccatctccctctcaactacccacctggatctccggatctaggtcgccactatcgatcaaacagtcctctgccatcaatccagctgcagcctcagagcccctccgccagcaagaagcaccaagtggttcaggacctaccgcctgctaatacttttgtgggcactggcgacactacttcgactgggagcgagcaatacagtgactatagctatcgcacaaatccacctaagtatccatctaagcaggtgggtcaacctttccaacttagcacccctcaaccactgccacacccttaccatggcgcaatctggacagaagtttgggagtag

SEQ ID NO: 130016 - DNA, 3819 bp, Artificial Sequence
  derived and/or modified sequence
ggggagcgggagcgcggcgcggacgcaaagccgccgggctgctgcgcccagagccagccggagccggagccggagcccgaactgcagctccagccccagccgtgcggagccgcagcccaggccggggccggcggcggctcatggacagcggggcgggcggccggcgctgcccggaggcggccctcctgattctggggcctcccaggatggagcacctgaggcacagcccaggccctggggggcaacggctactgctgccctccatgctgctagcactgctgctcctgctggctccatccccaggccacgccactcgggtagtgtacaaggtgccggaggaacagccacccaacaccctcattgggagcctcgcagccgactatggttttccagatgtggggcacctgtacaagctagaggtgggtgccccgtaccttcgcgtggatggcaagacaggtgacattttcaccaccgagacctccatcgaccgtgaggggctccgtgaatgccagaaccagctccctggtgatccctgcatcctggagtttgaggtatctatcacagacctcgtgcagaatggcagcccccggctgctagagggccagatagaagtacaagacatcaatgacaacacacccaacttcgcctcaccagtcatcactctggccatccctgagaacaccaacatcggctcactcttccccatcccgctggcttcagaccgtgatgctggtcccaacggtgtggcatcctatgagctgcaggctgggcctgaggcccaggagctatttgggctgcaggtggcagaggaccaggaggagaagcaaccacagctcattgtgatgggcaacctggaccgtgagcgctgggactcctatgacctcaccatcaaggtgcaggatggcggcagccccccacgcgccagcagtgccctgctgcgtgtcaccgtgcttgacaccaatgacaacgcccccaagtttgagcggccctcctatgaggccgaactatctgagaatagccccataggccactcggtcatccaggtgaaggccaatgactcagaccaaggtgccaatgcagaaatcgaatacacattccaccaggcgcccgaagttgtgaggcgtcttcttcgactggacaggaacactggacttatcactgttcagggcccggtggaccgtgaggacctaagcaccctgcgcttctcagtgcttgctaaggaccgaggcaccaaccccaagagtgcccgtgcccaggtggttgtgaccgtgaaggacatgaatgacaatgcccccaccattgagatccggggcatagggctagtgactcatcaagatgggatggctaacatctcagaggatgtggcagaggagacagctgtggccctggtgcaggtgtctgaccgagatgagggagagaatgcagctgtcacctgtgtggtggcaggtgatgtgcccttccagctgcgccaggccagtgagacaggcagtgacagcaagaagaagtatttcctgcagactaccaccccgctagactacgagaaggtcaaagactacaccattgagattgtggctgtggactctggcaaccccccactctccagcactaactccctcaaggtgcaggtggtggacgtcaatgacaacgcacctgtcttcactcagagtgtcactgaggtcgccttcccggaaaacaacaagcctggtgaagtgattgctgagatcactgccagtgatgctgactctggctctaatgctgagctggtttactctctggagcctgagccggctgctaagggcctcttcaccatctcacccgagactggagagatccaggtgaagacatctctggatcgggaacagcgggagagctatgagttgaaggtggtggcagctgaccggggcagtcctagcctccagggcacagccactgtccttgtcaatgtgctggactgcaatgacaatgaccccaaatttatgctgagtggctacaacttctcagtgatggagaacatgccagcactgagtccagtgggcatggtgactgtcattgatggagacaagggggagaatgcccaggtgcagctctcagtggagcaggacaacggtgactttgttatccagaatggcacaggcaccatcctatccagcctgagctttgatcgagagcaacaaagcacctacaccttccagctgaaggcagtggatggtggcgtcccacctcgctcagcttacgttggtgtcaccatcaatgtgctggacgagaatgacaacgcaccctatatcactgccccttctaacacctctcacaagctgctgaccccccagacacgtcttggtgagacggtcagccaggtggcagccgaggactttgactctggtgtcaatgctgagctgatctacagcattgcaggtggcaacccttatggactcttccagattgggtcacattcaggtgccatcaccctggagaaggagattgagcggcgccaccatgggctacaccgcctggtggtgaaggtcagtgaccgcggcaagcccccacgctatggcacagccttggtccatctttatgtcaatgagactctggccaaccgcacgctgctggagaccctcctgggccacagcctggacacgccgctggatattgacattgctggggatccagaatatgagcgctccaagcagcgtggcaacattctctttggtgtggtggctggtgtggtggccgtggccttgctcatcgccctggcggttcttgtgcgctactgcagacagcgggaggccaaaagtggttaccaggctggtaagaaggagaccaaggacctgtatgcccccaagcccagtggcaaggcctccaagggaaacaaaagcaaaggcaagaagagcaagtccccaaagcccgtgaagccagtggaggacgaggatgaggccgggctgcagaagtccctcaagttcaacctgatgagcgatgcccctggggacagtccccgcatccacctgcccctcaactacccaccaggcagccctgacctgggccgccactatcgctctaactccccactgccttccatccagctgcagccccagtcaccctcagcctccaagaagcaccaggtggtacaggacctgccacctgcaaacacattcgtgggcaccggggacaccacgtccacgggctctgagcagtactccgactacagctaccgcaccaacccccccaaataccccagcaagcaggtaggccagccctttcagctcagcacaccccagcccctaccccacccctaccacggagccatctggaccgaggtgtgggagtgatggagcaggtttactgtgcctgcccgtgttgggggccagcctgagccagcagtgggaggtggggccttagtgcctcaccgggcacacggattaggctgagtgaagattaagggagggtgtgctctgtggtctcctccctgccctctccccactggggagagacctgtgatttgccaagtccctggaccctggaccagctactgggccttatgggttgggggtggtaggcaggtgagcgtaagtggggagggaaatgggtaagaagtctactccaaacctaggtctctatgtcagaccagacctaggtgcttctctaggagggaaacagggagacctggggtcctgtggataactgagtggggagtctgccaggggagggcaccttcccattgtgccttctgtgtgtattgtgcattaacctcttcctcaccactaggcttctggggctgggtcccacatgcccttgaccctgacaataaagttctctatttttgga

SEQ ID NO: 130017 - DNA, 3769 bp, Artificial Sequence
  derived and/or modified sequence
gcggcgcggacgcaaagccgccgggctgctgcgcccagagccagccggagccggagccggagcccgaactgcagctccagccccagccgtgcggagccgcagcccaggccggggccggcggcggctcatggacagcggggcgggcggccggcgctgcccggaggcggccctcctgattctggggcctcccaggatggagcacctgaggcacagcccaggccctggggggcaacggctactgctgccctccatgctgctagcactgctgctcctgctggctccatccccaggccacgccactcgggtagtgtacaaggtgccggaggaacagccacccaacaccctcattgggagcctcgcagccgactatggttttccagatgtggggcacctgtacaagctagaggtgggtgccccgtaccttcgcgtggatggcaagacaggtgacattttcaccaccgagacctccatcgaccgtgaggggctccgtgaatgccagaaccagctccctggtgatccctgcatcctggagtttgaggtatctatcacagacctcgtgcagaatggcagcccccggctgctagagggccagatagaagtacaagacatcaatgacaacacacccaacttcgcctcaccagtcatcactctggccatccctgagaacaccaacatcggctcactcttccccatcccgctggcttcagaccgtgatgctggtcccaacggtgtggcatcctatgagctgcaggtggcagaggaccaggaggagaagcaaccacagctcattgtgatgggcaacctggaccgtgagcgctgggactcctatgacctcaccatcaaggtgcaggatggcggcagccccccacgcgccagcagtgccctgctgcgtgtcaccgtgcttgacaccaatgacaacgcccccaagtttgagcggccctcctatgaggccgaactatctgagaatagccccataggccactcggtcatccaggtgaaggccaatgactcagaccaaggtgccaatgcagaaatcgaatacacattccaccaggcgcccgaagttgtgaggcgtcttcttcgactggacaggaacactggacttatcactgttcagggcccggtggaccgtgaggacctaagcaccctgcgcttctcagtgcttgctaaggaccgaggcaccaaccccaagagtgcccgtgcccaggtggttgtgaccgtgaaggacatgaatgacaatgcccccaccattgagatccggggcatagggctagtgactcatcaagatgggatggctaacatctcagaggatgtggcagaggagacagctgtggccctggtgcaggtgtctgaccgagatgagggagagaatgcagctgtcacctgtgtggtggcaggtgatgtgcccttccagctgcgccaggccagtgagacaggcagtgacagcaagaagaagtatttcctgcagactaccaccccgctagactacgagaaggtcaaagactacaccattgagattgtggctgtggactctggcaaccccccactctccagcactaactccctcaaggtgcaggtggtggacgtcaatgacaacgcacctgtcttcactcagagtgtcactgaggtcgccttcccggaaaacaacaagcctggtgaagtgattgctgagatcactgccagtgatgctgactctggctctaatgctgagctggtttactctctggagcctgagccggctgctaagggcctcttcaccatctcacccgagactggagagatccaggtgaagacatctctggatcgggaacagcgggagagctatgagttgaaggtggtggcagctgaccggggcagtcctagcctccagggcacagccactgtccttgtcaatgtgctggactgcaatgacaatgaccccaaatttatgctgagtggctacaacttctcagtgatggagaacatgccagcactgagtccagtgggcatggtgactgtcattgatggagacaagggggagaatgcccaggtgcagctctcagtggagcaggacaacggtgactttgttatccagaatggcacaggcaccatcctatccagcctgagctttgatcgagagcaacaaagcacctacaccttccagctgaaggcagtggatggtggcgtcccacctcgctcagcttacgttggtgtcaccatcaatgtgctggacgagaatgacaacgcaccctatatcactgccccttctaacacctctcacaagctgctgaccccccagacacgtcttggtgagacggtcagccaggtggcagccgaggactttgactctggtgtcaatgctgagctgatctacagcattgcaggtggcaacccttatggactcttccagattgggtcacattcaggtgccatcaccctggagaaggagattgagcggcgccaccatgggctacaccgcctggtggtgaaggtcagtgaccgcggcaagcccccacgctatggcacagccttggtccatctttatgtcaatgagactctggccaaccgcacgctgctggagaccctcctgggccacagcctggacacgccgctggatattgacattgctggggatccagaatatgagcgctccaagcagcgtggcaacattctctttggtgtggtggctggtgtggtggccgtggccttgctcatcgccctggcggttcttgtgcgctactgcagacagcgggaggccaaaagtggttaccaggctggtaagaaggagaccaaggacctgtatgcccccaagcccagtggcaaggcctccaagggaaacaaaagcaaaggcaagaagagcaagtccccaaagcccgtgaagccagtggaggacgaggatgaggccgggctgcagaagtccctcaagttcaacctgatgagcgatgcccctggggacagtccccgcatccacctgcccctcaactacccaccaggcagccctgacctgggccgccactatcgctctaactccccactgccttccatccagctgcagccccagtcaccctcagcctccaagaagcaccaggtggtacaggacctgccacctgcaaacacattcgtgggcaccggggacaccacgtccacgggctctgagcagtactccgactacagctaccgcaccaacccccccaaataccccagcaagcaggtaggccagccctttcagctcagcacaccccagcccctaccccacccctaccacggagccatctggaccgaggtgtgggagtgatggagcaggtttactgtgcctgcccgtgttgggggccagcctgagccagcagtgggaggtggggccttagtgcctcaccgggcacacggattaggctgagtgaagattaagggagggtgtgctctgtggtctcctccctgccctctccccactggggagagacctgtgatttgccaagtccctggaccctggaccagctactgggccttatgggttgggggtggtaggcaggtgagcgtaagtggggagggaaatgggtaagaagtctactccaaacctaggtctctatgtcagaccagacctaggtgcttctctaggagggaaacagggagacctggggtcctgtggataactgagtggggagtctgccaggggagggcaccttcccattgtgccttctgtgtgtattgtgcattaacctcttcctcaccactaggcttctggggctgggtcccacatgcccttgaccctgacaataaagttctctatttttgg

SEQ ID NO: 130018 - DNA, 3183 bp, Artificial Sequence
  derived and/or modified sequence
atggacagcggcgccggcggcagaagatgccccgaggccgccctgctgatcctgggcccccccagaatggagcacctgagacacagccccggccccggcggccagagactgctgctgcccagcatgctgctggccctgctgctgctgctggcccccagccccggccacgccaccagagtggtgtacaaggtgcccgaggagcagccccccaacaccctgatcggcagcctggccgccgactacggcttccccgacgtgggccacctgtacaagctggaggtgggcgccccctacctgagagtggacggcaagaccggcgacatcttcaccaccgagaccagcatcgacagagagggcctgagagagtgccagaaccagctgcccggcgacccctgcatcctggagttcgaggtgagcatcaccgacctggtgcagaacggcagccccagactgctggagggccagatcgaggtgcaggacatcaacgacaacacccccaacttcgccagccccgtgatcaccctggccatccccgagaacaccaacatcggcagcctgttccccatccccctggccagcgacagagacgccggccccaacggcgtggccagctacgagctgcaggccggccccgaggcccaggagctgttcggcctgcaggtggccgaggaccaggaggagaagcagccccagctgatcgtgatgggcaacctggacagagagagatgggacagctacgacctgaccatcaaggtgcaggacggcggcagcccccccagagccagcagcgccctgctgagagtgaccgtgctggacaccaacgacaacgcccccaagttcgagagacccagctacgaggccgagctgagcgagaacagccccatcggccacagcgtgatccaggtgaaggccaacgacagcgaccagggcgccaacgccgagatcgagtacaccttccaccaggcccccgaggtggtgagaagactgctgagactggacagaaacaccggcctgatcaccgtgcagggccccgtggacagagaggacctgagcaccctgagattcagcgtgctggccaaggacagaggcaccaaccccaagagcgccagagcccaggtggtggtgaccgtgaaggacatgaacgacaacgcccccaccatcgagatcagaggcatcggcctggtgacccaccaggacggcatggccaacatcagcgaggacgtggccgaggagaccgccgtggccctggtgcaggtgagcgacagagacgagggcgagaacgccgccgtgacctgcgtggtggccggcgacgtgcccttccagctgagacaggccagcgagaccggcagcgacagcaagaagaagtacttcctgcagaccaccacccccctggactacgagaaggtgaaggactacaccatcgagatcgtggccgtggacagcggcaacccccccctgagcagcaccaacagcctgaaggtgcaggtggtggacgtgaacgacaacgcccccgtgttcacccagagcgtgaccgaggtggccttccccgagaacaacaagcccggcgaggtgatcgccgagatcaccgccagcgacgccgacagcggcagcaacgccgagctggtgtacagcctggagcccgagcccgccgccaagggcctgttcaccatcagccccgagaccggcgagatccaggtgaagaccagcctggacagagagcagagagagagctacgagctgaaggtggtggccgccgacagaggcagccccagcctgcagggcaccgccaccgtgctggtgaacgtgctggactgcaacgacaacgaccccaagttcatgctgagcggctacaacttcagcgtgatggagaacatgcccgccctgagccccgtgggcatggtgaccgtgatcgacggcgacaagggcgagaacgcccaggtgcagctgagcgtggagcaggacaacggcgacttcgtgatccagaacggcaccggcaccatcctgagcagcctgagcttcgacagagagcagcagagcacctacaccttccagctgaaggccgtggacggcggcgtgccccccagaagcgcctacgtgggcgtgaccatcaacgtgctggacgagaacgacaacgccccctacatcaccgcccccagcaacaccagccacaagctgctgaccccccagaccagactgggcgagaccgtgagccaggtggccgccgaggacttcgacagcggcgtgaacgccgagctgatctacagcatcgccggcggcaacccctacggcctgttccagatcggcagccacagcggcgccatcaccctggagaaggagatcgagagaagacaccacggcctgcacagactggtggtgaaggtgagcgacagaggcaagccccccagatacggcaccgccctggtgcacctgtacgtgaacgagaccctggccaacagaaccctgctggagaccctgctgggccacagcctggacacccccctggacatcgacatcgccggcgaccccgagtacgagagaagcaagcagagaggcaacatcctgttcggcgtggtggccggcgtggtggccgtggccctgctgatcgccctggccgtgctggtgagatactgcagacagagagaggccaagagcggctaccaggccggcaagaaggagaccaaggacctgtacgcccccaagcccagcggcaaggccagcaagggcaacaagagcaagggcaagaagagcaagagccccaagcccgtgaagcccgtggaggacgaggacgaggccggcctgcagaagagcctgaagttcaacctgatgagcgacgcccccggcgacagccccagaatccacctgcccctgaactacccccccggcagccccgacctgggcagacactacagaagcaacagccccctgcccagcatccagctgcagccccagagccccagcgccagcaagaagcaccaggtggtgcaggacctgccccccgccaacaccttcgtgggcaccggcgacaccaccagcaccggcagcgagcagtacagcgactacagctacagaaccaacccccccaagtaccccagcaagcaggtgggccagcccttccagctgagcaccccccagcccctgccccacccctaccacggcgccatctggaccgaggtgtgggagtag

SEQ ID NO: 130019 - DNA, 3147 bp, Artificial Sequence
  derived and/or modified sequence
atggacagcggcgccggcggcagaagatgccccgaggccgccctgctgatcctgggcccccccagaatggagcacctgagacacagccccggccccggcggccagagactgctgctgcccagcatgctgctggccctgctgctgctgctggcccccagccccggccacgccaccagagtggtgtacaaggtgcccgaggagcagccccccaacaccctgatcggcagcctggccgccgactacggcttccccgacgtgggccacctgtacaagctggaggtgggcgccccctacctgagagtggacggcaagaccggcgacatcttcaccaccgagaccagcatcgacagagagggcctgagagagtgccagaaccagctgcccggcgacccctgcatcctggagttcgaggtgagcatcaccgacctggtgcagaacggcagccccagactgctggagggccagatcgaggtgcaggacatcaacgacaacacccccaacttcgccagccccgtgatcaccctggccatccccgagaacaccaacatcggcagcctgttccccatccccctggccagcgacagagacgccggccccaacggcgtggccagctacgagctgcaggtggccgaggaccaggaggagaagcagccccagctgatcgtgatgggcaacctggacagagagagatgggacagctacgacctgaccatcaaggtgcaggacggcggcagcccccccagagccagcagcgccctgctgagagtgaccgtgctggacaccaacgacaacgcccccaagttcgagagacccagctacgaggccgagctgagcgagaacagccccatcggccacagcgtgatccaggtgaaggccaacgacagcgaccagggcgccaacgccgagatcgagtacaccttccaccaggcccccgaggtggtgagaagactgctgagactggacagaaacaccggcctgatcaccgtgcagggccccgtggacagagaggacctgagcaccctgagattcagcgtgctggccaaggacagaggcaccaaccccaagagcgccagagcccaggtggtggtgaccgtgaaggacatgaacgacaacgcccccaccatcgagatcagaggcatcggcctggtgacccaccaggacggcatggccaacatcagcgaggacgtggccgaggagaccgccgtggccctggtgcaggtgagcgacagagacgagggcgagaacgccgccgtgacctgcgtggtggccggcgacgtgcccttccagctgagacaggccagcgagaccggcagcgacagcaagaagaagtacttcctgcagaccaccacccccctggactacgagaaggtgaaggactacaccatcgagatcgtggccgtggacagcggcaacccccccctgagcagcaccaacagcctgaaggtgcaggtggtggacgtgaacgacaacgcccccgtgttcacccagagcgtgaccgaggtggccttccccgagaacaacaagcccggcgaggtgatcgccgagatcaccgccagcgacgccgacagcggcagcaacgccgagctggtgtacagcctggagcccgagcccgccgccaagggcctgttcaccatcagccccgagaccggcgagatccaggtgaagaccagcctggacagagagcagagagagagctacgagctgaaggtggtggccgccgacagaggcagccccagcctgcagggcaccgccaccgtgctggtgaacgtgctggactgcaacgacaacgaccccaagttcatgctgagcggctacaacttcagcgtgatggagaacatgcccgccctgagccccgtgggcatggtgaccgtgatcgacggcgacaagggcgagaacgcccaggtgcagctgagcgtggagcaggacaacggcgacttcgtgatccagaacggcaccggcaccatcctgagcagcctgagcttcgacagagagcagcagagcacctacaccttccagctgaaggccgtggacggcggcgtgccccccagaagcgcctacgtgggcgtgaccatcaacgtgctggacgagaacgacaacgccccctacatcaccgcccccagcaacaccagccacaagctgctgaccccccagaccagactgggcgagaccgtgagccaggtggccgccgaggacttcgacagcggcgtgaacgccgagctgatctacagcatcgccggcggcaacccctacggcctgttccagatcggcagccacagcggcgccatcaccctggagaaggagatcgagagaagacaccacggcctgcacagactggtggtgaaggtgagcgacagaggcaagccccccagatacggcaccgccctggtgcacctgtacgtgaacgagaccctggccaacagaaccctgctggagaccctgctgggccacagcctggacacccccctggacatcgacatcgccggcgaccccgagtacgagagaagcaagcagagaggcaacatcctgttcggcgtggtggccggcgtggtggccgtggccctgctgatcgccctggccgtgctggtgagatactgcagacagagagaggccaagagcggctaccaggccggcaagaaggagaccaaggacctgtacgcccccaagcccagcggcaaggccagcaagggcaacaagagcaagggcaagaagagcaagagccccaagcccgtgaagcccgtggaggacgaggacgaggccggcctgcagaagagcctgaagttcaacctgatgagcgacgcccccggcgacagccccagaatccacctgcccctgaactacccccccggcagccccgacctgggcagacactacagaagcaacagccccctgcccagcatccagctgcagccccagagccccagcgccagcaagaagcaccaggtggtgcaggacctgccccccgccaacaccttcgtgggcaccggcgacaccaccagcaccggcagcgagcagtacagcgactacagctacagaaccaacccccccaagtaccccagcaagcaggtgggccagcccttccagctgagcaccccccagcccctgccccacccctaccacggcgccatctggaccgaggtgtgggagtag

SEQ ID NO: 130020 - protein, 934 aa, Artificial Sequence
  derived and/or modified sequence
MVPEAWRSGLVSTGRVVGVLLLLGALNKASTVIHYEIPEEREKGFAVGNVVANLGLDLGSLSARRFRVVSGASRRFFEVNRETGEMFVNDRLDREELCGTLPSCTVTLELVVENPLELFSVEVVIQDINDNNPAFPTQEMKLEISEAVAPGTRFPLESAHDPDVGSNSLQTYELSRNEYFALRVQTREDSTKYAELVLERALDREREPSLQLVLTALDGGTPALSASLPIHIKVLDANDNAPVFNQSLYRARVLEDAPSGTRVVQVLATDLDEGPNGEIIYSFGSHNRAGVRQLFALDLVTGMLTIKGRLDFEDTKLHEIYIQAKDKGANPEGAHCKVLVEVVDVNDNAPEITVTSVYSPVPEDAPLGTVIALLSVTDLDAGENGLVTCEVPPGLPFSLTSSLKNYFTLKTSADLDRETVPEYNLSITARDAGTPSLSALTIVRVQVSDINDNPPQSSQSSYDVYIEENNLPGAPILNLSVWDPDAPQNARLSFFLLEQGAETGLVGRYFTINRDNGIVSSLVPLDYEDRREFELTAHISDGGTPVLATNISVNIFVTDRNDNAPQVLYPRPGGSSVEMLPRGTSAGHLVSRVVGWDADAGHNAWLSYSLLGSPNQSLFAIGLHTGQISTARPVQDTDSPRQTLTVLIKDNGEPSLSTTATLTVSVTEDSPEARAEFPSGSAPREQKKNLTFYLLLSLILVSVGFVVTVFGVIIFKVYKWKQSRDLYRAPVSSLYRTPGPSLHADAVRGGLMSPHLYHQVYLTTDSRRSDPLLKKPGAASPLASRQNTLRSCDPVFYRQVLGAESAPPGQQAPPNTDWRFSQAQRPGTSGSQNGDDTGTWPNNQFDTEMLQAMILASASEAADGSSTLGGGAGTMGLSARYGPQFTLQHVPDYRQNVYIPGSNATLTNAAGKRDGKAPAGGNGNKKKSGKKEKK

SEQ ID NO: 130021 - DNA, 2805 bp, Artificial Sequence
  derived and/or modified sequence
atggtccccgaggcctggaggagcggccttgtatccactggccgggttgtcggggttctccttctgctcggtgcattgaacaaggcctccaccgtaatacactacgaaatccctgaggagcgtgaaaaaggcttcgctgttggcaacgtcgttgcgaatctgggactggatctcggatctctgagcgcccgacgctttagggtagtctcgggagcaagccgtcgcttcttcgaggtgaacagagagacgggggagatgttcgttaatgaccgtctggacagggaagaattgtgtggtaccctgccgagttgcacggttactctcgagctggtcgtggaaaatcctttggaactgttttccgtggaggtggttattcaagatataaatgacaataatcccgcctttccgactcaggagatgaagctggaaatctccgaagcagtcgctccaggtaccagatttccccttgagtcagctcacgacccagacgtgggcagcaattcactgcagacatacgaactgagtcgaaatgaatattttgcactcagagtccagacgagggaggactcgactaaatacgctgaactagtcctggaacgggccctcgatcgggaacgtgaacccagcttacagctggtgctgaccgctctagacgggggaactcccgccctgtcagcctctctgcctatccatataaaggtgctagatgccaatgacaatgctcccgtgttcaatcagagtctgtatcgcgctcgggtccttgaggatgccccgagcggaacccgagtcgtccaggtcttggcaacagacttagatgagggccccaacggggaaatcatctatagcttcgggagtcataatagggcaggggtcaggcagctgtttgctctcgacctcgtaacaggtatgctgacaattaaggggcggttggacttcgaggatactaagctccatgaaatatacattcaagccaaagacaaaggcgccaacccggaaggggctcattgcaaggtgttggtggaggtagtggatgtcaatgataatgcccccgagataaccgtcacatccgtgtactcccctgtgcccgaggacgccccgcttggaaccgtaattgcactactgtccgtcactgacctggacgctggtgagaatgggctggttacttgtgaagtccctcccggactgcccttcagcttgactagcagtctgaagaactactttactctgaagacctctgccgacctggatagggaaacagtgcctgagtacaacctttccataactgcccgcgatgccggtaccccttcactctccgccctgaccattgtacgcgtgcaggtctcagacattaacgataatcctccccagagttcccagtcatcctatgacgtttatattgaagaaaataacttgcccggggcacccatactgaaccttagcgtgtgggatccagacgctcctcagaatgcccgcctgagctttttccttttagagcaaggcgcggagacaggcctggtgggccgttatttcacaattaatcgcgacaatggtatcgtttcttctctggtgcccctggactacgaggacaggcgggagtttgagcttactgcacacatcagtgatggcggcactcccgtactcgcgaccaatatcagcgtgaacatcttcgttacagataggaatgataatgccccgcaagtgctatatcctagacctggtggcagttctgtcgagatgctccccagaggcacatccgcagggcacctggttagtcgtgtagttggttgggatgcggacgcgggtcataatgcttggctgtcatattccctgctcggatcccctaaccagagtttatttgccattggattgcacaccggacagatctccacagcccgccctgtgcaggacactgacagcccaaggcagaccctgaccgttctgataaaggataatggggagccatcacttagtactaccgccaccttgaccgtttcggtgaccgaggactctcccgaggctagagccgagttcccaagcggaagcgcgcccagagagcagaaaaagaatctgacgttctatctactcctgtcgctgattctggtctctgtgggattcgtggttaccgtgtttggggtcattatcttcaaggtgtataagtggaagcaaagcagggatctgtatcgggccccggtgtccagtctctaccggacccccgggccttcccttcacgctgatgccgttcggggtggacttatgagcccccatctatatcaccaggtttacttgacaacagactcaagacgctcagaccccctccttaagaaaccaggcgcagcatcacccctcgcgagtaggcagaatacactgcgtagttgcgaccccgtcttctaccggcaggttctgggcgctgagagcgcccctcctggacagcaggccccacctaacactgattggagattctcccaggctcagcgtccagggacgtccggcagccagaacggcgacgatactgggacctggccaaataaccagttcgacaccgagatgctgcaagccatgatcctggcctcggccagcgaagcagccgatggatctagtaccctcggtgggggcgcgggcaccatgggcctcagtgctcgctatggcccacagttcacattgcaacatgtgcctgattatcggcagaatgtatacattccaggatctaatgcaacacttacaaacgccgctgggaagcgcgatggtaaggcgcccgctggtggtaacggtaacaaaaagaaatctgggaagaaagagaagaagtag

SEQ ID NO: 130022 - DNA, 2805 bp, Artificial Sequence
  derived and/or modified sequence
atggtgcctgaggcctggaggagcggcctggtgtccacaggccgggtggtgggcgtgctgctgctgctgggcgccctgaacaaggccagcaccgtcatccactatgagatccctgaggagcgggagaagggctttgctgtgggcaatgtggtggccaacctgggcctggacctgggcagcctgagcgcccggcgcttccgggtggtgtctggggccagccgccgcttctttgaggtgaaccgggagactggagagatgtttgtgaatgaccggctggaccgggaggagctgtgtggcaccctgcccagctgcaccgtgaccctggagctggtggtggagaaccccctggagctgttctctgtggaggtggtgatccaggacatcaatgacaacaacccagccttccccacccaggagatgaagctggagatcagcgaggccgtggcccctggcacccgcttccccctggagagcgcccatgaccctgatgtgggcagcaacagcctgcagacctatgagctgagcagaaatgagtactttgccctgcgggtgcagacccgggaggacagcaccaagtatgcagagctggtgctggagcgggccctggaccgggagcgggagcccagcctgcagctggtgctgacagccctggatggcggcaccccagccctgagcgccagcctgcccatccacatcaaggtgctggatgccaatgacaatgcccctgtgttcaaccagagcctgtaccgggcccgggtgctggaggatgcccccagcggcaccagggtggtgcaggtgctggccacagacctggatgagggccccaacggggagatcatctacagctttggcagccacaacagagctggggtgcggcagctgtttgccctggacctggtgacaggcatgctgaccatcaagggccgcctggactttgaggacaccaagctgcacgagatctacatccaggccaaggacaagggggccaaccctgagggcgcccactgcaaggtgctggtggaggtggtggatgtgaatgacaatgcccctgagatcaccgtgacctctgtgtacagccctgtgcctgaagatgcccccctgggcaccgtgattgccctgctgtctgtgacagacctggatgctggagaaaatggcctggtgacctgtgaggtgcccccaggcctgcccttcagcctgaccagcagcctgaagaactacttcaccctgaagaccagcgctgacctggaccgggagaccgtgcctgagtacaacctgagcatcacagccagagatgctggcacccccagcctgagcgccctgaccatcgtgcgggtgcaggtgtctgacatcaatgacaaccccccccagagcagccagagcagctatgatgtgtacatcgaggagaacaacctgcccggggcccccatcctgaacctgtctgtgtgggaccctgatgccccccagaatgcccggctgtccttcttcctgctggagcagggcgctgagaccggcctggtgggccgctacttcaccatcaacagagacaatggcatcgtgagcagcctggtgcccctggactatgaggaccggcgggagtttgagctgacagcccacatcagtgatggcggcacccctgtgctggccaccaacatctctgtgaacatctttgtgacagacagaaatgacaatgccccccaggtgctgtaccccaggcctgggggcagctctgtggagatgctgccccggggcaccagcgctggccacctggtgtcccgggtggtgggctgggatgctgatgctggccacaatgcctggctgagctacagcctgctgggcagccccaaccagagcctgtttgccatcggcctgcacacaggccagatcagcacagcccggcctgtgcaggacacagacagcccccggcagaccctgactgtgctgatcaaggacaatggagagcccagcctgagcaccacagccaccctgactgtgtctgtgacagaggacagccctgaggcccgggcagagttccccagcggcagcgccccccgggagcagaagaagaacctgaccttctacctgctgctgagcctcatcctggtgtctgtgggctttgtggtgacagtgtttggagtcatcatcttcaaggtgtacaagtggaagcagagccgggacctgtaccgggcccctgtgagcagcctgtaccgcaccccaggccccagcctgcacgcagatgctgtgcggggcggcctgatgagcccccacctgtaccaccaggtgtacctgaccacagacagcagaagaagtgaccccctgctgaagaagccaggggccgccagccccctggccagccggcagaacaccctgcggagctgtgaccccgtcttctaccggcaggtgctgggcgctgagagcgcccctcctggccagcaggccccacccaacacagactggaggttcagccaggcccagaggcctggcaccagcggcagccagaatggagatgacaccggcacctggcccaacaaccagtttgacacagagatgctgcaggccatgatcctggccagcgccagcgaggccgcagatggcagcagcaccctgggcggcggggccggcaccatgggcctgagcgcccgctatggcccccagttcaccctgcagcacgtgcctgactaccggcagaatgtgtacatccctggcagcaatgccaccctgaccaatgctgctgggaagagagatggcaaggccccagctggaggaaatggaaacaagaagaagagcggcaagaaggagaagaagtag

SEQ ID NO: 130023 - DNA, 2805 bp, Artificial Sequence
  derived and/or modified sequence
atggtgcccgaggcctggcggagcggcctggtgagcaccggccgggtcgtgggagttttgctcttacttggcgctctgaataaagcctccactgtaattcactacgaaatcccagaggaaagagagaagggttttgctgttggcaacgtagttgcgaacttaggactggacctcggttcactgtcagctcgaagatttcgcgtggtgtccggggcctctaggagattctttgaggtgaaccgcgagaccggagagatgtttgtaaacgaccgacttgatagagaggagctctgcggcaccttaccttcatgtaccgttacacttgaactggtcgttgagaaccccctcgaactgttctccgtggaggtggttattcaggacattaacgacaataaccccgctttccccactcaggagatgaagctggagatctctgaagctgttgcccccggcaccaggttccctcttgaatccgcacacgatcccgacgttggatccaacagcctgcagacttatgagctgtctagaaacgaatacttcgcgctgagagttcagacccgggaggactccaccaaatacgcggagctcgtcctggagcgcgctctcgaccgagaacgagagccttccctacagctggtgcttactgctctggatggtggcacgcctgcgctgagcgcctctcttccgatccacataaaggtcctggacgctaacgacaacgcacccgtttttaaccaatcactttacagggctagggttctcgaagacgccccatctggcacacgggtggtgcaagtgctggccactgacctcgatgaaggacctaatggagaaataatatactccttcggaagccacaaccgcgccggcgtgagacagttattcgccctagacctcgtgactggcatgctgaccataaagggaagattagactttgaggacaccaagctgcatgagatctatatccaagccaaagacaagggagctaatcccgagggagctcattgtaaagtccttgttgaagtcgtggacgtgaatgacaatgccccagagatcacagttacctctgtgtacagtccagtcccagaagacgctccccttggtaccgtcattgccctgctttcagtaacggatctcgacgcgggcgagaatggcctcgtaacctgcgaggttccgccggggctgccattctctctcacatcatcactaaaaaactacttcacgcttaagacgtctgctgaccttgatcgtgaaacggtgccagaatacaacctatccatcacagctagagatgcaggaacaccttcgctgtctgccctgacgattgtcagggtacaggtgagcgatatcaacgataatccccctcagagttcccagagctcctacgatgtgtatatagaagagaacaacctccccggggcaccaattctgaatttgtctgtgtgggatcccgatgcaccacagaatgctaggctgtcgttcttcttgctcgagcagggcgccgaaactggattggttggacgctatttcacaattaatagagataatggcatcgtctcttcccttgtgcctcttgactatgaggaccgacgagagtttgagctgactgcccacattagcgacggtggtacccctgtgctcgccaccaatatctcagtgaatatatttgtaaccgaccggaatgacaatgcgccccaggtgttgtatcccaggcctggggggtccagcgtggagatgctgcccaggggcacttccgctggacatctcgtgagccgggtcgtcggctgggacgcagacgccggccataacgcttggctctcatattctctgctcgggtcaccaaaccagtcattatttgcgattggccttcatactggccagatcagtacagcaaggccagtccaggataccgatagcccaagacagactttgacggtgctgatcaaagacaatggagaaccttccctgtctacaactgcgacactgacagtgtctgtgaccgaagactcccccgaagctcgtgcggagtttcctagcggcagtgcccctcgcgagcagaagaagaatctgacgttttatctactgctttcacttatactggtttccgtgggctttgtcgtaaccgtgtttggggtgataatctttaaggtgtacaagtggaagcagtccagagatctgtaccgtgccccggtgtccagcttatatcgtacgcccggcccgagtttacacgctgacgcagtcagggggggcctgatgtccccccacttgtatcatcaggtatacctgaccactgattctcgacgctctgatcctctactaaagaagccaggcgccgcctcaccactcgccagcagacagaatactcttcgctcctgtgaccccgtattttacagacaagtgctcggtgccgagtcagcaccacctggccaacaggcaccccctaacacggattggcgattttcacaagcccaacggcctggaacctcaggatcacagaacggagacgatacgggtacttggcccaacaaccagtttgatacagagatgctgcaggccatgatcctggcttccgcgtctgaagccgcagatgggagttcaaccctggggggaggcgccggcaccatgggtctgagtgcaagatatggtccgcagtttacgctccagcacgtccctgactatcgccagaatgtctatatccccggctccaacgccactctgacgaatgccgccggcaaaagagacgggaaagctcccgctggcgggaacggcaataagaagaagagcggcaagaaggaaaaaaagtag

SEQ ID NO: 130024 - DNA, 2805 bp, Artificial Sequence
  derived and/or modified sequence
atggtgccagaggcttggcgaagtggcttggtctccactggtcgggttgttggagtgctcttgctccttggagcgcttaataaggcctcaaccgtgatacactatgagataccagaggagagggaaaagggatttgcagtgggaaatgtggtagccaacctgggcctggatctgggcagtctgtctgctcggaggttcagggttgtgagcggggcaagccgacgtttctttgaggtgaaccgagagactggagagatgtttgttaatgatcgcctcgatcgagaagagttgtgcggcaccctcccatcttgcaccgttaccttagagctggtagtagaaaatccccttgaattgttctcagtggaggtcgttatccaagacatcaacgacaataatcctgcttttcccacacaagagatgaagctggagatttccgaggccgtggcaccaggaactcggtttccgttggaatccgcacacgatccagacgtagggagcaattccctacagacatacgaactgtctagaaacgaatactttgccctgagagtccaaacccgcgaggactctaccaagtatgcagaactggtcttagaacgagcccttgaccgtgagcgtgaaccctctctgcagttagtcttgacagccctggacggtggaaccccagccttatccgcaagcttgccgatccatattaaagtcttggatgccaacgataatgcccctgtatttaatcaaagcctctacagggcacgggtcctagaggatgcacctagcgggacccgcgtagtacaggttttagcgacggatctcgacgaaggccctaacggggaaatcatctactcatttggatcacataacagggcgggagttcggcagctgtttgccctcgatttggtgaccgggatgttaacgatcaagggcaggctagacttcgaagacactaaacttcatgagatctatattcaggcgaaagacaagggagccaatcctgaaggggcacattgtaaagtcttagtggaggtggtcgatgtgaacgataacgcacccgaaatcaccgtcacttccgtttactcgcccgttcccgaggacgcaccgttggggaccgtcatcgcattgctgagtgtcacggacctcgacgccggagagaatggacttgtgacgtgcgaagtcccacctggactgcctttcagtttaaccagctctctaaaaaactattttacgctgaagaccagcgcggacctcgatagggagactgtccctgaatataatctgagcatcaccgcacgtgacgcagggacccccagcttgtccgcattaactatcgtccgcgtccaggtatctgatattaacgacaaccctccacaaagcagccaaagctcctatgatgtctacattgaggagaacaatctgcccggagcccctattctgaatttgtccgtttgggatcctgacgcaccccagaacgcgagactctctttttttcttctcgagcagggggctgagacgggcttggtggggagatatttcactatcaatagagataacggcattgtctcttcgctcgtgccactggattatgaggatcggagggaattcgaactcaccgcccatataagtgatggcggaacaccggtcctcgcaacaaatatctccgtgaacatcttcgtgaccgaccgcaatgataacgctccccaggtgctctatcctaggcctggagggagctccgttgaaatgctgccaaggggaacatctgcgggacaccttgtcagtcgcgtggtcggttgggatgccgatgccggtcataacgcgtggctgagctactccttgctggggtcacctaaccagtcactgttcgctatcggtctgcataccggccagatctccacagccagacccgtgcaagataccgactcccctcgccaaactctgacagtgctaattaaggataacggcgaaccgtccttgagcactaccgccaccctgactgtgagcgtgacagaagattcccctgaagcacgggcagagttcccatctggctctgcaccccgagagcagaaaaagaatcttactttctatttattgctgagtctgatcctggtaagcgtcggcttcgtagtgacagtatttggcgtgataatttttaaagtctacaaatggaagcagagccgcgatctatatagggcccctgtttcgtctctttaccggactcccggtccttcactgcatgctgatgctgtgaggggcggtcttatgtcaccacacttgtaccatcaggtgtacctgacgaccgatagtagacgttccgaccccttgctgaaaaaaccaggtgcagcttcgcctctggccagccgtcagaacacgctgaggagctgcgaccctgtattctaccgtcaggtgttgggggctgaaagcgcccctccgggacaacaggctccccctaacactgactggcggttctcccaggcccagaggcctggaacaagtggaagccagaacggggatgacactggaacgtggccaaataaccaatttgatactgagatgctgcaagctatgattcttgcatctgcctccgaagctgccgatggcagcagcacactggggggtggggctgggactatggggctgtctgccaggtacgggcctcagttcacactgcaacacgtaccggactacaggcagaatgtgtacatcccaggcagcaacgcaacactgactaacgccgctggaaagcgggatggaaaagctccggctgggggtaacgggaacaaaaagaagtcagggaaaaaggaaaagaaatag

SEQ ID NO: 130025 - DNA, 4711 bp, Artificial Sequence
  derived and/or modified sequence
gtcggactcggcgcccagcgcccaagcgctaacccgctgaaagtttctcagcgaaatctcagggacgatctggaccccgctgagaggaactgcttttgagtgagatggtcccagaggcctggaggagcggactggtaagcaccgggagggtagtgggagttttgcttctgcttggtgccttgaacaaggcttccacggtcattcactatgagatcccggaggaaagagagaagggtttcgctgtgggcaacgtggtcgcgaaccttggtttggatctcggtagcctctcagcccgcaggttccgggtggtgtctggagctagccgaagattctttgaggtgaaccgggagaccggagagatgtttgtgaacgaccgtctggatcgagaggagctgtgtgggacactgccctcttgcactgtaactctggagttggtagtggagaacccgctggagctgttcagcgtggaagtggtgatccaggacatcaacgacaacaatcctgctttccctacccaggaaatgaaattggagattagcgaggccgtggctccggggacgcgctttccgctcgagagcgcgcacgatcccgatgtgggaagcaactctttacaaacctatgagctgagccgaaatgaatactttgcgcttcgcgtgcagacgcgggaggacagcaccaagtacgcggagctggtgttggagcgcgccctggaccgagaacgggagcctagtctccagttagtgctgacggcgttggacggagggaccccagctctctccgccagcctgcctattcacatcaaggtgctggacgcgaatgacaatgcgcctgtcttcaaccagtccttgtaccgggcgcgcgtcctggaggatgcaccctccggcacgcgcgtggtacaagtccttgcaacggatctggatgaaggccccaacggtgaaattatttactccttcggcagccacaaccgcgccggcgtgcggcaactattcgccttagaccttgtaaccgggatgctgacaatcaagggtcggctggacttcgaggacaccaaactccatgagatttacatccaggccaaagacaagggcgccaatcccgaaggagcacattgcaaagtgttggtggaggttgtggatgtgaatgacaacgccccggagatcacagtcacctccgtgtacagcccagtacccgaggatgcccctctggggactgtcatcgctttgctcagtgtgactgacctggatgctggcgagaacgggctggtgacctgcgaagttccaccgggtctccctttcagccttacttcttccctcaagaattacttcactttgaaaaccagtgcagacctggatcgggagactgtgccagaatacaacctcagcatcaccgcccgagacgccggaaccccttccctctcagcccttacaatagtgcgtgttcaagtgtccgacatcaatgacaaccctccacaatcttctcaatcttcctacgacgtttacattgaagaaaacaacctccccggggctccaatactaaacctaagtgtctgggaccccgacgccccgcagaatgctcggctttctttctttctcttggagcaaggagctgaaaccgggctagtgggtcgctatttcacaataaatcgtgacaatggcatagtgtcatccttagtgcccctagactatgaggatcggcgggaatttgaattaacagctcatatcagcgatgggggcaccccggtcctagccaccaacatcagcgtgaacatatttgtcactgatcgcaatgacaatgccccccaggtcctatatcctcggccaggtgggagctcggtggagatgctgcctcgaggtacctcagctggccacctagtgtcacgggtggtaggctgggacgcggatgcagggcacaatgcctggctctcctacagtctcttgggatcccctaaccagagcctttttgccatagggctgcacactggtcaaatcagtactgcccgtccagtccaagacacagattcacccaggcagactctcacggtcttgatcaaagacaatggggagccttcgctctccaccactgctaccctcactgtgtcagtaaccgaggactctcctgaagcccgagccgagttcccctctggctctgccccccgggagcagaaaaaaaatctcaccttttatctacttctttctctaatcctggtttctgtggggtttgtggtcacagtgttcggagtaatcatattcaaagtttacaagtggaagcagtctagagacctataccgagccccggtgagctcactgtaccgaacaccagggccctccttgcacgcggacgccgtgcggggaggcctgatgtcgccgcacctttaccatcaggtgtatctcaccacggactcccgccgcagcgacccgctgctgaagaaacctggtgcagccagtccactggccagccgccagaacacgctgcggagctgtgatccggtgttctataggcaggtgttgggtgcagagagcgcccctcccggacagcaagccccgcccaacacggactggcgtttctctcaggcccagagacccggcaccagcggctcccaaaatggcgatgacaccggcacctggcccaacaaccagtttgacacagagatgctgcaagccatgatcttggcgtccgccagtgaagctgctgatgggagctccaccctgggagggggtgccggcaccatgggattgagcgcccgctacggaccccagttcaccctgcagcacgtgcccgactaccgccagaatgtctacatcccaggcagcaatgccacactgaccaacgcagctggcaagcgggatggcaaggccccagcaggtggcaatggcaacaagaagaagtcgggcaagaaggagaagaagtaacatggaggccaggccaagagccacagggcggcctctccccaaccagcccagcttctccttacctgcacccaggcctcagagtttcagggctaacccccagaatactggtaggggccaaggccatgctccccttgggaaacagaaacaagtgcccagtcagcacctaccccttcccccccagggggttgaatatgcaaaagcagttccgctgggaacccccatccaatcaactgctgtacccatgggggtagtggggttactgtagacaccaagaaccatttgccacaccccgtttagttacagctgaactcctccatcttccaaatcaatcaggcccatccatcccatgcctccctcctccccaccccactccaacagttcctctttcccgagtaaggtggttggggtgttgaagtaccaagtaacctacaagcctcctagttctgaaaagttggaagggcatcatgacctcttggcctctcctttgattctcaatcttcccccaaagcatggtttggtgccagccccttcacctccttccagagcccaagatcaatgctcaagttttggaggacatgatcaccatccccatggtactgatgcttgctggatttagggagggcattttgctaccaagcctcttcccaacgccctggggaccagtcttctgttttgtttttcattgtttgacgtttccactgcatgccttgacttcccccacctcctcctcaaacaagagactccactgcatgttccaagacagtatggggtggtaagataaggaagggaagtgtgtggatgtggatggtgggggcatggacaaagcttgacacatcaagttatcaaggccttggaggaggctctgtatgtcctcaggggactgacaacatcctccagattccagccataaaccaataactaggctggacccttcccactacataatagggctcagcccaggcagccagctttgggctgagctaacaggaccaatggattaaactggcatttcagtccaaggaagctcgaagcaggtttaggaccaggtccccttgagaggtcagaggggcctctgtgggtgctgggtactccagaggtgccactggtggaagggtcagcggagccccagcaggaagggtgggccagccaggccattcttagtccctgggttggggaggcagggagctagggcagggaccaaatgaacagaaagtctcagcccaggatggggcttcttcaacagggcccctgccctcctgaagcctcagtccttcaccttgccaggtgccgtttctcttccgtgaaggccactgcccaggtccccagtgcgccccctagtggccatagcctggttaaagttccccagtgcctccttgtgcatagaccttcttctcccacccccttctgcccctgggtccccggccatccagcggggctgccagagaaccccagacctgcccttacagtagtgtagcgccccctccctctttcggctggtgtagaatagccagtagtgtagtgcggtgtgcttttacgtgatggcgggtgggcagcgggcggcgggctccgcgcagccgtctgtccttgatctgcccgcggcggcccgtgttgtgttttgtgctgtgtccacgcgctaaggcgaccccctcccccgtactgacttctcctataagcgcttctcttcgcatagtcacgtagctcccaccccaccctcttcctgtgtctcacgcaagttttatactctaatatttatatggctttttttcttcgacaaaaaaataataaaacgtttcttctgaaaa

SEQ ID NO: 130026 - DNA, 2805 bp, Artificial Sequence
  derived and/or modified sequence
atggtgcccgaggcctggagaagcggcctggtgagcaccggcagagtggtgggcgtgctgctgctgctgggcgccctgaacaaggccagcaccgtgatccactacgagatccccgaggagagagagaagggcttcgccgtgggcaacgtggtggccaacctgggcctggacctgggcagcctgagcgccagaagattcagagtggtgagcggcgccagcagaagattcttcgaggtgaacagagagaccggcgagatgttcgtgaacgacagactggacagagaggagctgtgcggcaccctgcccagctgcaccgtgaccctggagctggtggtggagaaccccctggagctgttcagcgtggaggtggtgatccaggacatcaacgacaacaaccccgccttccccacccaggagatgaagctggagatcagcgaggccgtggcccccggcaccagattccccctggagagcgcccacgaccccgacgtgggcagcaacagcctgcagacctacgagctgagcagaaacgagtacttcgccctgagagtgcagaccagagaggacagcaccaagtacgccgagctggtgctggagagagccctggacagagagagagagcccagcctgcagctggtgctgaccgccctggacggcggcacccccgccctgagcgccagcctgcccatccacatcaaggtgctggacgccaacgacaacgcccccgtgttcaaccagagcctgtacagagccagagtgctggaggacgcccccagcggcaccagagtggtgcaggtgctggccaccgacctggacgagggccccaacggcgagatcatctacagcttcggcagccacaacagagccggcgtgagacagctgttcgccctggacctggtgaccggcatgctgaccatcaagggcagactggacttcgaggacaccaagctgcacgagatctacatccaggccaaggacaagggcgccaaccccgagggcgcccactgcaaggtgctggtggaggtggtggacgtgaacgacaacgcccccgagatcaccgtgaccagcgtgtacagccccgtgcccgaggacgcccccctgggcaccgtgatcgccctgctgagcgtgaccgacctggacgccggcgagaacggcctggtgacctgcgaggtgccccccggcctgcccttcagcctgaccagcagcctgaagaactacttcaccctgaagaccagcgccgacctggacagagagaccgtgcccgagtacaacctgagcatcaccgccagagacgccggcacccccagcctgagcgccctgaccatcgtgagagtgcaggtgagcgacatcaacgacaaccccccccagagcagccagagcagctacgacgtgtacatcgaggagaacaacctgcccggcgcccccatcctgaacctgagcgtgtgggaccccgacgccccccagaacgccagactgagcttcttcctgctggagcagggcgccgagaccggcctggtgggcagatacttcaccatcaacagagacaacggcatcgtgagcagcctggtgcccctggactacgaggacagaagagagttcgagctgaccgcccacatcagcgacggcggcacccccgtgctggccaccaacatcagcgtgaacatcttcgtgaccgacagaaacgacaacgccccccaggtgctgtaccccagacccggcggcagcagcgtggagatgctgcccagaggcaccagcgccggccacctggtgagcagagtggtgggctgggacgccgacgccggccacaacgcctggctgagctacagcctgctgggcagccccaaccagagcctgttcgccatcggcctgcacaccggccagatcagcaccgccagacccgtgcaggacaccgacagccccagacagaccctgaccgtgctgatcaaggacaacggcgagcccagcctgagcaccaccgccaccctgaccgtgagcgtgaccgaggacagccccgaggccagagccgagttccccagcggcagcgcccccagagagcagaagaagaacctgaccttctacctgctgctgagcctgatcctggtgagcgtgggcttcgtggtgaccgtgttcggcgtgatcatcttcaaggtgtacaagtggaagcagagcagagacctgtacagagcccccgtgagcagcctgtacagaacccccggccccagcctgcacgccgacgccgtgagaggcggcctgatgagcccccacctgtaccaccaggtgtacctgaccaccgacagcagaagaagcgaccccctgctgaagaagcccggcgccgccagccccctggccagcagacagaacaccctgagaagctgcgaccccgtgttctacagacaggtgctgggcgccgagagcgccccccccggccagcaggccccccccaacaccgactggagattcagccaggcccagagacccggcaccagcggcagccagaacggcgacgacaccggcacctggcccaacaaccagttcgacaccgagatgctgcaggccatgatcctggccagcgccagcgaggccgccgacggcagcagcaccctgggcggcggcgccggcaccatgggcctgagcgccagatacggcccccagttcaccctgcagcacgtgcccgactacagacagaacgtgtacatccccggcagcaacgccaccctgaccaacgccgccggcaagagagacggcaaggcccccgccggcggcaacggcaacaagaagaagagcggcaagaaggagaagaagtag

SEQ ID NO: 130027 - protein, 1069 aa, Artificial Sequence
  derived and/or modified sequence
MLRMRTAGWARGWCLGCCLLLPLSLSLAAAKQLLRYRLAEEGPADVRIGNVASDLGIVTGSGEVTFSLESGSEYLKIDNLTGELSTSERRIDREKLPQCQMIFDENECFLDFEVSVIGPSQSWVDLFEGQVIVLDINDNTPTFPSPVLTLTVEENRPVGTLYLLPTATDRDFGRNGIERYELLQEPGGGGSGGESRRAGAADSAPYPGGGGNGASGGGSGGSKRRLDASEGGGGTNPGGRSSVFELQVADTPDGEKQPQLIVKGALDREQRDSYELTLRVRDGGDPPRSSQAILRVLITDVNDNSPRFEKSVYEADLAENSAPGTPILQLRAADLDVGVNGQIEYVFGAATESVRRLLRLDETSGWLSVLHRIDREEVNQLRFTVMARDRGQPPKTDKATVVLNIKDENDNVPSIEIRKIGRIPLKDGVANVAEDVLVDTPIALVQVSDRDQGENGVVTCTVVGDVPFQLKPASDTEGDQNKKKYFLHTSTPLDYEATREFNVVIVAVDSGSPSLSSNNSLIVKVGDTNDNPPMFGQSVVEVYFPENNIPGERVATVLATDADSGKNAEIAYSLDSSVMGIFAIDPDSGDILVNTVLDREQTDRYEFKVNAKDKGIPVLQGSTTVIVQVADKNDNDPKFMQDVFTFYVKENLQPNSPVGMVTVMDADKGRNAEMSLYIEENNNIFSIENDTGTIYSTMSFDREHQTTYTFRVKAVDGGDPPRSATATVSLFVMDENDNAPTVTLPKNISYTLLPPSSNVRTVVATVLATDSDDGINADLNYSIVGGNPFKLFEIDPTSGVVSLVGKLTQKHYGLHRLVVQVNDSGQPSQSTTTLVHVFVNESVSNATAIDSQIARSLHIPLTQDIAGDPSYEISKQRLSIVIGVVAGIMTVILIILIVVMARYCRSKNKNGYEAGKKDHEDFFTPQQHDKSKKPKKDKKNKKSKQPLYSSIVTVEASKPNGQRYDSVNEKLSDSPSMGRYRSVNGGPGSPDLARHYKSSSPLPTVQLHPQSPTAGKKHQAVQDLPPANTFVGAGDNISIGSDHCSEYSCQTNNKYSKQMRLHPYITVFG

SEQ ID NO: 130028 - DNA, 3210 bp, Artificial Sequence
  derived and/or modified sequence
atgctgcgtatgcggacggccggctgggctcgaggctggtgcctcggatgctgcttactgctgccactctccctgtctctggctgccgccaaacaactgttgcgatatcgactggctgaagaaggaccggccgatgtccgcattggcaatgtggcatccgatctgggaattgttacaggatccggggaggttactttctctctagagagcggttctgagtatttgaaaatcgataatctgactggtgaactgagtacttccgagcgtcgcatcgatagagagaagcttccgcagtgccagatgattttcgatgagaacgagtgtttcctggacttcgaagtatcagtcatcggtcccagtcagtcgtgggtagaccttttcgaaggccaggttattgttctggacattaacgataacaccccaacattcccgtctcctgtgctgactctgacagtggaagaaaatcggcccgttgggacgctgtacctcctcccaaccgctaccgatagggacttcggccgcaacggaattgaacgttacgaattactgcaagagcccggcggggggggttccggcggcgagtcacgaagagcgggggccgccgattccgcaccctatcccggcggtggcggtaacggggcatctggcggcggctctgggggcagcaagcgaagattggacgctagcgagggtggcggcgggacaaaccctgggggccgatcaagtgtgttcgaactgcaggtcgccgatactcccgatggcgagaagcagccccagctgatcgttaaaggtgccttggatcgagaacaacgtgactcctatgagctgaccctccgtgtaagagacgggggcgaccctccgaggtcgtcccaggctatcctccgcgtgctgatcactgacgtgaacgacaactctccgagattcgagaagtccgtttatgaggccgacctcgccgagaactcagcaccagggacacccatcctacaactgcgcgcagccgacttagatgtgggcgtgaacggccaaatcgagtacgtcttcggcgcagcaacggagtctgtaaggcggttgcttcgccttgatgaaactagtggatggctgtccgtattgcacagaatcgaccgagaggaggttaatcagcttcgttttaccgtgatggcccgggacagaggacaaccaccaaagactgacaaggctacagtggtgctgaacatcaaagatgagaacgataacgtaccttccattgaaattcgcaagataggaaggatccctctcaaggacggggtggcaaatgtggccgaggacgttctcgtagacaccccaattgcacttgttcaggtctccgaccgcgaccagggcgaaaatggggttgtcacatgtacagtggtgggcgacgtacccttccaactcaagccagcatccgatacagaaggcgaccagaataaaaaaaaatattttcttcataccagcacccctctggattacgaggccacccgggaattcaacgttgtgatcgtggcagtcgactccggaagtccctcactctcaagtaataatagcctgatagtaaaggtgggagacactaacgataatccgcctatgttcgggcagagcgtggtggaagtgtacttccccgaaaacaacatccctggcgagcgagtggccacagttctcgccacggacgcagactcaggtaagaacgctgaaatcgcttactctctggactccagcgtgatgggtatcttcgccattgatcctgattccggagacattctggttaacaccgtattggacagagagcagacagacagatacgagttcaaagtcaatgctaaggataagggcattccagtcctgcagggcagtactacggtaattgtgcaggtcgccgataaaaacgataacgatccgaaattcatgcaggacgttttcaccttttatgtgaaagaaaatctgcaaccaaattctcccgtcggcatggttaccgtgatggatgcggataaaggtcgcaatgccgaaatgtccctttatatcgaggagaacaacaacattttttccattgagaatgataccggaacaatctactctaccatgtcattcgatagggaacaccagacgacatacacgtttagagtcaaggctgtggacggcggcgatccaccccggagtgccacagctacagtcagcctcttcgtcatggatgagaacgataatgcaccaactgtcactctaccaaagaacatttcctataccctattgcctccatccagcaacgtccgcacagtggtcgctactgtgctcgccacagattctgacgacggaataaacgcagatctgaattactctattgtggggggtaatcccttcaaactgttcgagatcgaccccacctcgggcgtggtgtccctggttggaaagctcacacagaagcactacggccttcaccgtctggtcgtccaggtgaatgactctgggcagcctagccaatccaccaccaccctggtccatgtttttgtaaatgagagcgtttccaacgcgactgcgatcgatagccagattgcccgaagcttgcacatacctctgacacaggacatcgcaggagacccaagctatgagatctccaagcagagactgagtattgtgattggggtcgtagcaggcataatgactgtgatccttatcatcctcatcgtagtgatggctcgatactgcagatcgaagaataagaacggatatgaggcgggcaagaaggatcatgaagacttcttcacaccacagcagcacgacaaatccaaaaagcctaaaaaggataagaagaacaagaaatcaaagcagccactctattcttctatcgtcacagtcgaagcaagtaagcctaacggtcagcgttacgattcggttaatgagaagctctcggactccccctccatgggtcgataccggtcggtgaatgggggacccgggtccccagatttagcgcgccactataagagcagcagtcccttgccgactgtacagttacatccccagtctcccacggcgggaaaaaagcaccaagccgtccaggatctcccacccgctaatacctttgtgggcgccggggataacatctctattggaagcgaccattgctctgaatatagctgtcagacgaacaacaaatattccaaacagatgcggctacacccttacataacggtctttggctag

SEQ ID NO: 130029 - DNA, 3210 bp, Artificial Sequence
  derived and/or modified sequence
atgctgaggatgaggacagctggctgggcccggggctggtgcctgggctgctgcctgctgctgcccctgagcctgagcctggccgccgccaagcagctgctgcgctaccgcctggccgaggagggccctgcagatgtgagaattggaaatgtggccagtgacctgggcatcgtgactggaagtggagaggtgaccttcagcctggagagcggcagcgagtacctgaagattgacaacctgactggagagctgagcaccagcgagaggagaattgaccgggagaagctgccccagtgccagatgatctttgatgaaaatgaatgcttcctggactttgaggtgtctgtgattggccccagccagagctgggtggacctgtttgagggccaggtgattgtgctggacatcaatgacaacacccccaccttccccagccctgtgctgaccctgactgtggaggagaacagacctgtgggcaccctgtacctgctgcccacagccacagaccgggactttggaagaaatggaattgaaagatatgagctgctgcaggagcccggcggcggcggcagcggcggggagagccggcgggccggggctgctgacagcgccccctacccaggcggcggcggcaatggagccagcggcggcggcagcggcggcagcaagaggcggctggatgccagcgagggcggcggcggcaccaaccctgggggccgcagctctgtgtttgagctgcaggtggccgacaccccagatggagagaagcagccccagctgattgtgaagggggccctggaccgggagcagagggacagctatgagctgaccctgcgggtgagagatggaggagacccccccaggagcagccaggccatcctgcgggtgctgatcacagatgtgaatgacaacagccccaggtttgagaagtctgtgtatgaagctgacctggctgaaaattctgcccctggcacccccatcctgcagctgcgggctgctgacctggatgtgggcgtgaatggccagattgaatatgtgtttggagctgccacagaatctgtgcggcggctgctgcggctggatgagaccagcggctggctgtctgtgctgcacagaattgaccgggaggaggtgaaccagctgcgcttcaccgtgatggcccgggaccggggccagccccccaagacagacaaggccaccgtggtgctgaacatcaaggatgaaaatgacaacgtgcccagcattgagatcaggaagattggccgcatccccctgaaggatggagtggccaacgtggccgaggatgtgctggtggacacccccatcgccctggtgcaggtgtctgaccgggaccagggagaaaatggagtggtgacctgcaccgtggtgggagatgtgcccttccagctgaagccagccagtgacacagaaggagaccagaacaagaagaagtacttcctgcacaccagcacccccctggactatgaggccacccgggagttcaacgtggtgattgtggccgtggacagcggcagccccagcctgagcagcaacaacagcctcatcgtgaaggtgggggacaccaatgacaacccccccatgtttggccagagcgtggtggaggtgtacttccctgagaacaacatccctggagagcgggtggccaccgtgctggccacagatgctgacagcggcaagaatgctgagatcgcctacagcctggacagctctgtgatgggcatctttgccatcgaccctgacagcggggacatcctggtgaacacagtgctggaccgggagcagacagacagatatgagttcaaggtgaatgccaaggacaagggcatccctgtgctgcagggcagcaccaccgtcatcgtgcaggtggccgacaagaatgacaatgaccccaagttcatgcaggatgtgttcaccttctacgtgaaggagaacctgcagcccaacagccctgtgggcatggtgacagtgatggatgctgacaagggcagaaatgctgagatgagcctgtacatcgaggagaacaacaacatcttcagcattgaaaatgacaccggcaccatctacagcaccatgagctttgaccgggagcaccagaccacctacaccttccgggtgaaggctgtggatggaggagacccccccaggtctgccacagccaccgtgtccctgtttgtgatggatgaaaatgacaatgcccccaccgtgaccctgcccaagaacatctcctacaccctgctgccccccagcagcaatgtgaggacagtggtggccaccgtgctggccacagacagtgatgatggcatcaatgctgacctgaactacagcatcgtgggcggcaaccccttcaagctgtttgaaattgaccccaccagcggcgtggtgtccctggtgggcaagctgacccagaagcactacggcctgcaccggctggtggtgcaggtgaatgacagcggccagcccagccagagcaccaccaccctggtgcacgtgtttgtgaatgaatctgtgtccaatgccacagccatcgacagccagatcgcccggagcctgcacatccccctgacccaggacattgctggggaccccagctatgagatcagcaagcagaggctgagcatcgtcatcggcgtggtggccggcatcatgaccgtcatcctgatcatcctgattgtggtgatggcccgctactgccgcagcaagaacaagaatggctatgaggccggcaagaaggaccacgaggacttcttcaccccccagcagcacgacaagagcaagaagcccaagaaggacaagaagaacaagaagagcaagcagcccctgtacagcagcatcgtgacagtggaggccagcaagcccaacggccagagatatgacagcgtgaatgagaagctgagtgacagccccagcatgggccgctacagatctgtgaatggaggccctggcagcccagacctggcccggcactacaagagcagcagccccctgcccaccgtgcagctgcacccccagagccccacagctgggaagaagcaccaggccgtgcaggacctgcccccagccaacacctttgtgggcgctggggacaacatcagcattggaagtgaccactgcagcgagtacagctgccagaccaacaacaagtacagcaagcagatgaggctgcacccctacatcaccgtgtttggatag

SEQ ID NO: 130030 - DNA, 3210 bp, Artificial Sequence
  derived and/or modified sequence
atgctgcggatgcggaccgccggctgggcccggggctggtgcctgggatgctgcttactgctgccgctctccttgtccctggctgcggccaagcaacttcttcggtacagactcgcagaggagggtcccgctgatgtacgaatcggcaatgttgcctcagacctgggcattgttactggctccggggaagtaacttttagcctcgaatccggaagtgagtatttgaagattgacaacctgactggagaactgtctacctcagaaagacggatagaccgcgagaagctcccccagtgccaaatgatattcgatgaaaacgaatgtttcctggacttcgaggtttctgtgatcggcccttcacagagctgggttgacctctttgagggtcaggtgatcgtgcttgacattaatgataatactcctaccttcccatctcctgtcttgacattaaccgtggaagagaatcgtccagttggcaccctgtatttattgcccactgctaccgatagagatttcgggcgaaacggaattgaaagatacgaattgttacaggaacccggaggagggggctcagggggggagtcgagaagagcgggagctgccgatagcgccccctatcctgggggtggcggcaatggtgcctctgggggaggtagcgggggaagcaaacgccgacttgatgccagtgagggaggcggaggaacaaaccctggcggtcgaagtagtgtgtttgagctgcaggtggcggacactccggatggggagaaacagcctcagctgatcgtcaaaggggccctggatcgtgaacagcgggacagctatgaacttacactaagggtgcgtgacggcggcgacccgccccgcagcagtcaggccatcctgcgcgtcctgattacagacgtcaacgacaactctccacgctttgagaagagcgtctacgaagccgacctcgctgaaaactcggccccaggaacccccatcttacaactgcgagccgcggacctggatgttggggttaatggccagatcgaatatgtgttcggggcagccacagagtctgtaagacggctgcttcgtctggacgagacctctggttggttatcggtcttgcaccgaattgatcgggaggaagtgaatcagttacgtttcactgtcatggcacgtgacagaggccagccgccaaagacggataaggcaaccgtagtgcttaatattaaggatgagaacgataacgtcccctccattgagattagaaagataggaaggatcccactgaaagatggggtcgctaatgtcgccgaggacgtccttgtggacacaccaattgctttagtccaagtgagcgatagagaccagggggaaaatggcgttgtgacctgcaccgtcgtcggtgacgtgccttttcagttaaagccagctagtgatacggaaggcgaccagaataagaaaaaatactttctacacacaagcacccctctagactacgaggcaacaagagagtttaatgtcgttatcgtagccgtggactctgggtccccaagcctatcctccaataactccctgattgtaaaagtgggcgatactaacgacaacccccccatgttcggtcagtcagtcgtcgaagtgtacttcccagaaaacaacatccccggtgagagagtggcgaccgtactggccaccgacgctgattcagggaaaaatgcagagattgcctacagtctggacagcagcgtgatgggaattttcgccatagatccagacagcggtgacatcctggtcaatacagtactggaccgggaacaaacggatcggtatgagttcaaagtgaatgctaaggataaaggaatccccgtgctccagggatccaccactgtcatcgtccaggtggctgataagaacgacaatgaccctaagttcatgcaggacgtgtttactttctatgtgaaagaaaatctgcagcctaacagtccggtgggcatggtgactgtaatggatgccgacaagggccgaaatgcggagatgtccttgtatatagaagagaacaacaacatcttttcaattgagaacgatacaggcaccatttacagcacaatgtcctttgatcgggaacaccaaactacctacacattccgcgtaaaggccgtggacggcggggatccgcctaggagtgccacagctacagtgagtctcttcgtaatggatgaaaatgataacgccccaactgtgacactccctaagaacatatcatacaccttgctaccccccagctccaacgtccggactgtggtggctaccgtccttgctaccgacagcgatgatggaatcaatgcagacctgaattatagcatcgtggggggtaatccttttaaactcttcgaaattgatcctacgagtggcgttgtctccttagtcggtaagttgacacagaagcactatgggctgcatagactcgtggtgcaggttaatgattccggccagccctcacagtctacgacaacactcgtgcatgtattcgtgaacgaatccgtgtcaaacgccacagccatcgatagccagatcgccaggtccctccatatccctctcacacaggacattgcgggtgatccttcctatgagataagcaagcagcggctctctatcgtgatcggcgtggttgcagggatcatgactgtcatactcatcattctgattgttgtcatggccaggtattgtcgctccaaaaataaaaacggatatgaggctgggaaaaaagatcacgaggacttcttcacgccacagcaacatgataagtctaagaagcctaaaaaggacaagaagaacaagaaatccaaacagccactgtattcatctattgtcaccgtcgaggcaagcaagccgaacgggcagcgttatgactcagtcaacgagaagctatctgattcgccttctatgggccgttataggagcgtgaatggaggcccgggcagcccagacctcgcgcgccactataaatcatcatcacccttgcctactgtccagttacaccctcaaagccctaccgcggggaagaaacaccaagccgttcaggacctcccccccgcgaacaccttcgtgggtgcgggcgacaacatcagcatcggatccgatcattgctctgaatatagctgccagacaaacaataagtactccaagcaaatgcgacttcacccctacatcaccgtgtttggctag

SEQ ID NO: 130031 - DNA, 3210 bp, Artificial Sequence
  derived and/or modified sequence
atgcttagaatgaggaccgccggttgggccaggggctggtgcttggggtgttgtcttctgctccctctgagtctgagcctcgcagctgcaaagcaactgctgagataccgccttgctgaagaagggcctgcggatgtgaggataggtaacgtggcctctgatctgggaatcgtgacagggtcaggggaagttacattctccctggagagtgggtcagaatacctgaagatcgacaatctgactggtgagttgtccacatctgagcgtagaattgaccgtgagaagctcccgcagtgccagatgatctttgatgagaatgagtgcttcctagatttcgaggtctcagtcatcggtccaagccagtcctgggtggacctgttcgaaggacaagttattgtgctggatatcaatgacaacacacccacctttccttcacccgtgctgacactgaccgtggaagagaatcgcccagttggcacattgtacctcttaccgacagccaccgaccgggactttggacggaacggtatcgaaaggtacgagcttctgcaggagccaggaggcggaggcagtggaggtgagtcaagacgtgctggggcagcagattctgccccatatcccggaggcggtggaaatggggcatcaggaggagggtctggaggcagcaaacggcgtctggatgccagcgagggaggtggcggtacaaaccccggaggacggagcagcgtctttgaattacaggtggcggacactcctgacggggagaaacaaccgcagctcatcgtcaagggcgctcttgatcgggaacagagggacagttacgaactgacattgcgcgttagggacggcggagatcccccaagatcctcacaggctatcttacgcgtcctaatcactgatgtgaatgataattctcccagattcgaaaagtctgtttacgaggccgacctggcggagaattcggcaccgggaacacccattctgcagctgcgggcagctgacctggatgtgggggtgaacggccagattgaatacgtgtttggtgctgctacagaatctgtccgacgtctcctaagactcgacgagactagcggatggctctcagtgctgcatagaattgaccgggaagaggttaaccaactcagattcacggtgatggccagggaccggggtcagccgcctaaaactgacaaagcgactgtagtgttaaatatcaaggacgaaaatgataatgttcccagtattgagattcgcaagattggtaggattccactcaaagatggcgtcgcaaacgtggcagaagacgttctggtagacaccccaattgcattagttcaggtcagcgatcgcgatcagggggaaaacggcgtagtgacttgcacagttgtcggagacgttccatttcagttgaagcctgcttccgataccgagggcgatcagaacaagaaaaagtattttctgcacacttctactccactcgactatgaggcaactcgtgagtttaacgtcgtcattgtggccgtagactcaggctcccctagcctttcatctaataattctctgatagtgaaagtcggcgataccaatgataacccacctatgttcggtcagtccgttgtcgaggtttatttcccagaaaataacatcccaggtgaacgggtggctaccgtgttggcaaccgatgccgactctggtaagaacgccgagatcgcctacagtctggatagctccgtgatggggatcttcgctattgatccggactcaggggacattctcgtaaacactgtattggacagagaacagaccgaccgctacgagtttaaggtgaatgctaaagacaaggggattcccgtgctgcagggcagtactacagtaatagttcaggtcgcggacaagaacgacaacgatcctaagttcatgcaagacgtgtttaccttttatgtcaaggagaacctgcaacctaatagcccagtgggcatggtgacagtaatggatgcagacaagggacgcaatgctgaaatgagcctttatatagaggagaacaacaatatattcagcattgagaatgacacaggtacgatctactccactatgtctttcgatagggagcaccaaactacatacactttccgggtcaaggcagttgatggaggtgacccgcctcgttccgcgacggccactgtgagcttatttgtgatggatgaaaatgacaatgccccaactgtgactcttccaaagaatatctcctatacattgctgcctcctagctctaatgttcgcacggtggtagctaccgtgttggcgaccgatagtgatgacgggattaatgcagacctcaattactctatagtcgggggaaatccatttaaactcttcgaaatagaccctactagtggcgttgttagccttgtgggcaagctcacacagaagcattatgggcttcaccggttggtcgtgcaggtgaacgactcaggccagcctagccagagtactaccaccttagtccatgtcttcgtgaacgaatcagtgagcaatgcaaccgctatcgactcccagatcgcccgttctctgcatatccccctcacgcaggatatcgccggagatccctcctatgagattagcaagcaacgcttgtccatcgtcatcggcgtagtggctgggataatgacggtgattttaatcatactcattgttgtgatggctcggtactgcaggtcaaagaacaaaaatgggtatgaagcagggaagaaggaccacgaggacttcttcaccccccaacaacacgacaaaagtaaaaaaccaaaaaaagataagaagaataaaaagagcaagcagcccctctactcatcaattgtaactgtggaagcttctaaacccaatgggcagcggtacgactccgttaatgaaaagttgtcagactccccctcaatgggaaggtatagatctgtgaacggcggtcccggaagccccgatctggccagacattacaagagcagctccccattgcccactgtgcagctccatccgcaatccccgactgccggtaagaagcaccaagccgtgcaagacttgccgccagctaacacttttgtgggtgcaggcgacaatattagtattggtagtgaccactgctctgagtactcatgccagaccaataacaagtattccaagcaaatgcgtctccacccttacatcacagtgtttggctag

SEQ ID NO: 130032 - DNA, 5398 bp, Artificial Sequence
  derived and/or modified sequence
gaatgcaggtgagaaaaggcacggactctgcggctgcgaacccaaacttgggcaccgcacggtgcgcactgctcagccttcgcccccgtgggcgaaaggctgctgcggtttcaggcggctgcttcgtgactaatgaccttgcgcagagttgttaagaaaaaagagaaacccgcgctctccggggtgagaagggactgactctgggcgtctctgaagatggctcgggcttctctttggcgcgccggggggaccctgacactgaccgctctgtgacgcgagtagtctcccctgcaccgtgcccgaagcgacgtgccgggggatttttcattctcgatctgttgactggctcccccgctgcatgagcagagtcggagttgagactggcttgttgctggccccagcgcctggtgcaggaagcgactcacgtttgtctgggtggccggagccggagcagagcctgggtttggagtgagtgcctggaacgtgaattggactcaactcgagtagcagcaaagaccagcgggctggcaggcgggggaggctgcaggctcattccccacctcttcccagccccactgcccgtctgccggagcggttctggccccttccgacagagcggggactagagccggggattctccgcccgctgaggggatgactctgggttgggggagcgccgaacccgcggcgcgcagtgtcccgtgaactgtgagtactgcgactgaacggcggcaggcgagcgggcgattagcacccattgcatgaattatgaaacaataactttcggaagaagcaggaggaaaaaaagaagcatctatcgctgccctcccacccccattcccggccaactctccacgccgcttttgccccctccctcccctccctctcgctccttcctttccgggagaggggagaggactcgggggagggcaggcggccggccccggaggaggggggcgccgagggggctgtggttagaaggagcagtagcagcagcagcaggagaagatgctgaggatgcggaccgcgggatgggcgcgcggctggtgcttgggctgctgcctcctcctgccgctctcgctcagcctggcggccgccaagcagctcctccggtaccggctggccgaggagggccccgccgacgtccgcatcggcaacgtggcttcagacctgggcatcgtgaccggatcgggtgaggtgactttcagcctggagtccggttccgagtacctgaagatcgacaacctcactggcgagctgagcacgagcgagcggcgcatcgaccgcgagaagctgccccagtgtcagatgatcttcgacgagaacgagtgcttcctggacttcgaggtgtcggtgatcgggccctcgcagagctgggtggacctgtttgagggtcaggtcatcgtgcttgacatcaacgacaacacgcccaccttcccgtcgcccgtgctcacgctcacggtggaggagaatcggccggtgggcacactttacctgctgcccacagccaccgaccgcgacttcggccgcaacggcatcgagcgctacgagctgctccaggagcccggaggcggcggcagcggcggcgagagccggcgcgccggggcggccgacagcgccccctaccccgggggcggcgggaacggcgcgagcggcggcggctcgggaggctccaagcggcggctggacgcatcagagggcggcggcggcaccaaccccggcggccgcagcagcgtgttcgagctgcaggtggcggacaccccggacggcgagaagcagccgcagctgatcgtgaagggggcgctggaccgcgagcagcgcgactcctacgagctgaccctgcgagtgcgcgacggcggcgacccgcctcgctcctcgcaggccatcctacgggtcctcatcaccgacgtgaacgacaacagcccccgcttcgagaagagcgtgtacgaggccgacttggctgagaacagcgccccggggacccccatcctgcaactgcgcgcagccgacttggacgtgggggtcaacgggcagatcgaatacgtgttcggggcggccaccgagtcggtgaggcggctgctgcgccttgacgagacgtccggctggctcagcgtcctgcaccggatcgaccgcgaggaggtgaaccagctgcgcttcacggtcatggcccgcgaccgcgggcagccccccaagaccgacaaggccaccgtggtccttaacatcaaagacgagaacgacaacgtgccgtccattgaaatccgcaagattgggcgcatccccctcaaggacggggtggccaacgtggccgaggacgttctggtcgacacccccatcgctctggtgcaggtgtccgaccgagaccaaggcgagaacggggtggtcacctgcaccgtggtgggcgacgtgcccttccagctcaagccagccagcgacaccgagggcgaccagaacaagaaaaagtacttcttgcacacctcgacccctctggactatgaggccacccgggagttcaacgtggtcatcgtggcggtggactcaggcagccccagcctctcgagcaacaactccctgattgtcaaggtgggagacaccaacgacaacccgcccatgttcggccagtcggtggtggaggtttacttccctgagaacaacatcccgggcgagagggtggccacggtgctggcgacagacgcagacagcggtaagaacgccgagatcgcctactcgctggactcctctgtgatggggatctttgccatcgatcccgattctggggacatcctggtcaataccgtgctggaccgcgagcagactgacaggtatgagtttaaagttaacgccaaagacaaaggcatccccgtgctgcagggcagcactacggtgattgtgcaggtggctgataaaaatgacaatgaccctaagtttatgcaggacgtcttcaccttttatgtgaaagaaaacttgcagcccaacagccctgtggggatggtcaccgtgatggatgctgacaaggggcggaatgcagagatgagcctgtacatagaggagaacaataacattttttctattgaaaatgacacggggaccatttactccacaatgtcttttgaccgggaacatcagaccacatacactttcagagtcaaggctgtggatgggggagatcctcccagatctgccacagctacagtctcgctttttgtgatggatgaaaatgacaatgctcccacagttacccttcccaaaaacatttcctacactttactgccaccttcgagtaatgtcaggacagtagtagctacagtgttggcaacagacagtgatgatggcatcaatgcagacctgaactacagcattgtgggaggaaatcccttcaagctgtttgaaattgatcccactagtggtgtggtttccttagtgggaaaactcacccaaaagcattatggcttgcacaggttggtggtgcaagtgaatgacagtgggcagccttcccagtccaccacgactctggtgcacgtgtttgtcaatgaaagtgtttctaatgcaactgcgattgactcccagatagctagaagtttgcacatcccactcacccaggatatagctggtgacccaagctatgaaattagcaaacagagactcagtattgtcattggcgtggttgctggcattatgacggtgattctaatcatcttaattgtagtgatggcaaggtactgcaggtccaaaaataaaaatggctatgaagccggcaaaaaagatcacgaagacttttttacaccccaacagcatgacaaatctaaaaagcctaaaaaggacaagaaaaacaaaaaatctaagcagcctctctacagcagcattgtcactgtggaggcttctaagccaaatggacagaggtatgatagtgtcaatgagaagctgtcagacagcccaagcatggggcgatacaggtccgttaatggtgggcccggcagtcctgacctggcaaggcattacaaatctagttccccattgcctactgttcagcttcatccccagtcaccaactgcaggaaaaaaacaccaggccgtacaagatctaccaccagccaacacatttgtgggagcaggagacaacatttcaattggatcagatcactgctctgagtacagctgtcaaaccaataacaagtacagcaaacagatgcgtctacatccatacattactgtgtttggctgaattccactctaatatgatgctccattatgcaccatactgtgatgacctttctactccgaaacctgctggagcctgcccttggccgtggggtgtcagccaatcactgcttgttccacttgttgtacattttatttttgagtctttttctttctcatatacagaaaaatagtatgaaaataaaataaatgtatgaaacagtattaatgcagaaatgtgctactaatggatgtctgagtcaccagaaattccattcttaaagaggcggttagcacctattagacgtaacagtgatgtcttttaaaaaatccaaaagcatattgcaacaataagtttgagactttgtgtgaacaaagggaaattcagcctcttatgtctttgtctttaatacattaaatactgattttgaataaaaatctaaattgatcaatatttttaagtgccatgtaatcacaggcctgtcagatagttttgttagagtgaaggataatatcttttgctcattctgtgtgtgtatttttaaatgctgttttgtgtgtttgtgtgtgtttccatatatgtgtgtgtgtgtgtgtgtatatatatatatatgctggaactttgagcaatatttataaaaatattgtctgtaaaacaagtttgagaaattaattttttatatttataatgggcactgtaatggattgatttttttcttaatcttgaaatagtgaccaagatatttatatcatttttgaatttattttttaattctttaagaaaatttagaacttttcactttcatttgctaaagtcactgtagtcacattcggaaggaatatgtggctttctgttctttatggactacgtttatcagaagtccatatttattaaacatcctatttgatgtcagataacgtaaactcaagcagcttcaaagagttcagcatgttacatattattgagagagcaagtgactgaattttagttgtataagcaatattataggtaggtcagggagtcctctggatggcccctctacctctttatgtttgtatgtttatgtctttatttgttatgtcgtatgtgtttatgagcctagaaaatagcctagaaaataagtgttccatatgtaaagtttaataattttgtaatacatttaccacgctgtctgccctattaaaattttccacaaatttgggaa

SEQ ID NO: 130033 - DNA, 3210 bp, Artificial Sequence
  derived and/or modified sequence
atgctgagaatgagaaccgccggctgggccagaggctggtgcctgggctgctgcctgctgctgcccctgagcctgagcctggccgccgccaagcagctgctgagatacagactggccgaggagggccccgccgacgtgagaatcggcaacgtggccagcgacctgggcatcgtgaccggcagcggcgaggtgaccttcagcctggagagcggcagcgagtacctgaagatcgacaacctgaccggcgagctgagcaccagcgagagaagaatcgacagagagaagctgccccagtgccagatgatcttcgacgagaacgagtgcttcctggacttcgaggtgagcgtgatcggccccagccagagctgggtggacctgttcgagggccaggtgatcgtgctggacatcaacgacaacacccccaccttccccagccccgtgctgaccctgaccgtggaggagaacagacccgtgggcaccctgtacctgctgcccaccgccaccgacagagacttcggcagaaacggcatcgagagatacgagctgctgcaggagcccggcggcggcggcagcggcggcgagagcagaagagccggcgccgccgacagcgccccctaccccggcggcggcggcaacggcgccagcggcggcggcagcggcggcagcaagagaagactggacgccagcgagggcggcggcggcaccaaccccggcggcagaagcagcgtgttcgagctgcaggtggccgacacccccgacggcgagaagcagccccagctgatcgtgaagggcgccctggacagagagcagagagacagctacgagctgaccctgagagtgagagacggcggcgacccccccagaagcagccaggccatcctgagagtgctgatcaccgacgtgaacgacaacagccccagattcgagaagagcgtgtacgaggccgacctggccgagaacagcgcccccggcacccccatcctgcagctgagagccgccgacctggacgtgggcgtgaacggccagatcgagtacgtgttcggcgccgccaccgagagcgtgagaagactgctgagactggacgagaccagcggctggctgagcgtgctgcacagaatcgacagagaggaggtgaaccagctgagattcaccgtgatggccagagacagaggccagccccccaagaccgacaaggccaccgtggtgctgaacatcaaggacgagaacgacaacgtgcccagcatcgagatcagaaagatcggcagaatccccctgaaggacggcgtggccaacgtggccgaggacgtgctggtggacacccccatcgccctggtgcaggtgagcgacagagaccagggcgagaacggcgtggtgacctgcaccgtggtgggcgacgtgcccttccagctgaagcccgccagcgacaccgagggcgaccagaacaagaagaagtacttcctgcacaccagcacccccctggactacgaggccaccagagagttcaacgtggtgatcgtggccgtggacagcggcagccccagcctgagcagcaacaacagcctgatcgtgaaggtgggcgacaccaacgacaacccccccatgttcggccagagcgtggtggaggtgtacttccccgagaacaacatccccggcgagagagtggccaccgtgctggccaccgacgccgacagcggcaagaacgccgagatcgcctacagcctggacagcagcgtgatgggcatcttcgccatcgaccccgacagcggcgacatcctggtgaacaccgtgctggacagagagcagaccgacagatacgagttcaaggtgaacgccaaggacaagggcatccccgtgctgcagggcagcaccaccgtgatcgtgcaggtggccgacaagaacgacaacgaccccaagttcatgcaggacgtgttcaccttctacgtgaaggagaacctgcagcccaacagccccgtgggcatggtgaccgtgatggacgccgacaagggcagaaacgccgagatgagcctgtacatcgaggagaacaacaacatcttcagcatcgagaacgacaccggcaccatctacagcaccatgagcttcgacagagagcaccagaccacctacaccttcagagtgaaggccgtggacggcggcgacccccccagaagcgccaccgccaccgtgagcctgttcgtgatggacgagaacgacaacgcccccaccgtgaccctgcccaagaacatcagctacaccctgctgccccccagcagcaacgtgagaaccgtggtggccaccgtgctggccaccgacagcgacgacggcatcaacgccgacctgaactacagcatcgtgggcggcaaccccttcaagctgttcgagatcgaccccaccagcggcgtggtgagcctggtgggcaagctgacccagaagcactacggcctgcacagactggtggtgcaggtgaacgacagcggccagcccagccagagcaccaccaccctggtgcacgtgttcgtgaacgagagcgtgagcaacgccaccgccatcgacagccagatcgccagaagcctgcacatccccctgacccaggacatcgccggcgaccccagctacgagatcagcaagcagagactgagcatcgtgatcggcgtggtggccggcatcatgaccgtgatcctgatcatcctgatcgtggtgatggccagatactgcagaagcaagaacaagaacggctacgaggccggcaagaaggaccacgaggacttcttcaccccccagcagcacgacaagagcaagaagcccaagaaggacaagaagaacaagaagagcaagcagcccctgtacagcagcatcgtgaccgtggaggccagcaagcccaacggccagagatacgacagcgtgaacgagaagctgagcgacagccccagcatgggcagatacagaagcgtgaacggcggccccggcagccccgacctggccagacactacaagagcagcagccccctgcccaccgtgcagctgcacccccagagccccaccgccggcaagaagcaccaggccgtgcaggacctgccccccgccaacaccttcgtgggcgccggcgacaacatcagcatcggcagcgaccactgcagcgagtacagctgccagaccaacaacaagtacagcaagcagatgagactgcacccctacatcaccgtgttcggctag

SEQ ID NO: 130034 - protein, 1070 aa, Artificial Sequence
  derived and/or modified sequence
MSPVRRWGSPCLFPLQLFSLCWVLSVAQSKTVRYSTFEEDAPGTVIGTLAEDLHMKVSGDTSFRLMKQFNSSLLRVREGDGQLTVGDAGLDRERLCGQAPQCVLAFDVVSFSQEQFRLVHVEVEVRDVNDHAPRFPRAQIPVEVSEGAAVGTRIPLEVPVDEDVGANGLQTVRLAEPHSPFRVELQTRADGAQCADLVLLQELDRESQAAYSLELVAQDGGRPPRSATAALSVRVLDANDHSPAFPQGAVAEVELAEDAPVGSLLLDLDAADPDEGPNGDVVFAFGARTPPEARRLFRLDPRSGRLTLAGPVDYERQDTYELDVRAQDRGPGPRAATCKVIVRIRDVNDNAPDIAITPLAAPGAPATSPFAAAAAAAALGGADASSPAGAGTPEAGATSLVPEGAARESLVALVSTSDRDSGANGQVRCALYGHEHFRLQPAYAGSYLVVTAASLDRERIAEYNLTLVAEDRGAPPLRTVRPYTVRVGDENDNAPLFTRPVYEVSVRENNPPGAYLATVAARDRDLGRNGQVTYRLLEAEVGRAGGAVSTYVSVDPATGAIYALRSFDYETLRQLDVRIQASDGGSPQLSSSALVQVRVLDQNDHAPVLVHPAPANGSLEVAVPGRTAKDTVVARVQARDADEGANGELAFELQQQEPREAFAIGRRTGEILLTGDLSQEPPGRVFRALLVISDGGRPPLTTTATVSFVVTAGGGRGPAAPASAGSPERSRPPGSRLGVSGSVLQWDTPLIVIIVLAGSCTLLLAAIIAIATTCNRRKKEVRKGGALREERPGAAGGGASAPGSPEEAARGAGPRPNMFDVLTFPGTGKAPFGSPAADAPPPAVAAAEVPGSEGGSATGESACHFEGQQRLRGAHAEPYGASPGFGKEPAPPVAVWKGHSFNTISGREAEKFSGKDSGKGDSDFNDSDSDISGDALKKDLINHMQSGLWACTAECKILGHSDRCWSPSCSGPNAHPSPHPPAQMSTFCKSTSLPRDPLRRDNYYQAQLPKTVGLQSVYEKVLHRDYDRTVTLLSPPRPGRLPDLQEIGVPLYQSPPGRYLSPKKGANENV

SEQ ID NO: 130035 - protein, 596 aa, Artificial Sequence
  derived and/or modified sequence
MSPVRRWGSPCLFPLQLFSLCWVLSVAQSKTVRYSTFEEDAPGTVIGTLAEDLHMKVSGDTSFRLMKQFNSSLLRVREGDGQLTVGDAGLDRERLCGQAPQCVLAFDVVSFSQEQFRLVHVEVEVRDVNDHAPVLVHPAPANGSLEVAVPGRTAKDTVVARVQARDADEGANGELAFELQQQEPREAFAIGRRTGEILLTGDLSQEPPGRVFRALLVISDGGRPPLTTTATVSFVVTAGGGRGPAAPASAGSPERSRPPGSRLGVSGSVLQWDTPLIVIIVLAGSCTLLLAAIIAIATTCNRRKKEVRKGGALREERPGAAGGGASAPGSPEEAARGAGPRPNMFDVLTFPGTGKAPFGSPAADAPPPAVAAAEVPGSEGGSATGESACHFEGQQRLRGAHAEPYGASPGFGKEPAPPVAVWKGHSFNTISGREAEKFSGKDSGKGDSDFNDSDSDISGDALKKDLINHMQSGLWACTAECKILGHSDRCWSPSCSGPNAHPSPHPPAQMSTFCKSTSLPRDPLRRDNYYQAQLPKTVGLQSVYEKVLHRDYDRTVTLLSPPRPGRLPDLQEIGVPLYQSPPGRYLSPKKGANENV

SEQ ID NO: 130036 - protein, 913 aa, Artificial Sequence
  derived and/or modified sequence
MSPVRRWGSPCLFPLQLFSLCWVLSVAQSKTVRYSTFEEDAPGTVIGTLAEDLHMKVSGDTSFRLMKQFNSSLLRVREGDGQLTVGDAGLDRERLCGQAPQCVLAFDVVSFSQEQFRLVHVEVEVRDVNDHAPRFPRAQIPVEVSEGAAVGTRIPLEVPVDEDVGANGLQTVRLAEPHSPFRVELQTRADGAQCADLVLLQELDRESQAAYSLELVAQDGGRPPRSATAALSVRVLDANDHSPAFPQGAVAEVELAEDAPVGSLLLDLDAADPDEGPNGDVVFAFGARTPPEARRLFRLDPRSGRLTLAGPVDYERQDTYELDVRAQDRGPGPRAATCKVIVRIRDVNDNAPDIAITPLAAPGAGNLTLRRNGQVTYRLLEAEVGRAGGAVSTYVSVDPATGAIYALRSFDYETLRQLDVRIQASDGGSPQLSSSALVQVRVLDQNDHAPVLVHPAPANGSLEVAVPGRTAKDTVVARVQARDADEGANGELAFELQQQEPREAFAIGRRTGEILLTGDLSQEPPGRVFRALLVISDGGRPPLTTTATVSFVVTAGGGRGPAAPASAGSPERSRPPGSRLGVSGSVLQWDTPLIVIIVLAGSCTLLLAAIIAIATTCNRRKKEVRKGGALREERPGAAGGGASAPGSPEEAARGAGPRPNMFDVLTFPGTGKAPFGSPAADAPPPAVAAAEVPGSEGGSATGESACHFEGQQRLRGAHAEPYGASPGFGKEPAPPVAVWKGHSFNTISGREAEKFSGKDSGKGDSDFNDSDSDISGDALKKDLINHMQSGLWACTAECKILGHSDRCWSPSCSGPNAHPSPHPPAQMSTFCKSTSLPRDPLRRDNYYQAQLPKTVGLQSVYEKVLHRDYDRTVTLLSPPRPGRLPDLQEIGVPLYQSPPGRYLSPKKGANENV

SEQ ID NO: 130037 - DNA, 3213 bp, Artificial Sequence
  derived and/or modified sequence
atgagccccgtgcgccgttggggctccccctgtttgttcccactgcagcttttctctctgtgctgggtgctgtccgtggcacagagcaagaccgtccgctattctacgtttgaggaagatgctccaggcaccgtgattggcaccctggccgaggatctgcatatgaaggttagcggagacacgtcttttaggctgatgaagcagttcaattctagcttgttgcgcgtgcgcgagggtgatgggcagctgactgtgggcgacgctggcttggatcgggaacgtctgtgtggacaggcccctcagtgtgtgctcgcctttgatgttgtgtctttctcacaggagcaatttcgcctggtccatgtggaggtcgaggtgagggatgttaatgaccatgcgccacgttttccgcgcgcacaaatcccggtagaagtgagcgagggggctgctgtgggtacacggatcccgctggaagtgcctgtggatgaagatgtgggagctaacggccttcagaccgtcaggcttgccgagcctcactccccatttcgggtggaacttcagacaagggccgatggggctcagtgcgcagacctggtgttgttacaagaacttgatcgtgagtcccaagcagcgtacagcctcgaactggtcgctcaggatggcggcaggcctcccagaagcgccacggccgctctttccgtgcgggtcttggacgctaacgatcacagtcctgccttcccacaaggcgcagtggctgaggttgaacttgccgaagacgcgccagtgggtagcctgttgcttgatctggacgctgctgatcctgacgagggtcccaacggagacgtagtgtttgccttcggtgcccgaacaccacctgaggcaaggcggctttttcgtctggatcctagaagtggacggctaactctggccggtcctgtcgattatgagaggcaggacacgtatgaattagatgtgcgagctcaagaccgtggtcccggccctcgtgcagctacctgtaaggtaatcgtccgaattagggatgtgaacgataatgcccctgacatcgccattacacctctagccgctcctggtgcaccggctacctccccatttgcagccgcggccgccgccgccgccctcggcggtgcagatgccagcagccctgccggagcaggcactcctgaggcgggtgcaaccagcctcgtgcccgagggagccgcgcgcgagagtctggtggccctggtgtcaaccagcgatcgcgacagcggagccaacggtcaggtgaggtgcgccctttacggacatgaacacttcagactacagccagcctacgccgggtcttacctggtcgtgactgctgcctctctggacagggagagaattgctgaatacaatctgaccctcgttgcggaagatagaggcgcccccccactgaggacagtgcgaccctacaccgttcgcgtgggcgatgagaacgataatgcccctctgtttacacggccggtatacgaggtatcagtgagggagaacaatcctccgggcgcataccttgccactgtagccgccagagatagagacctaggacggaacggacaggtaacgtaccgacttctcgaggccgaagtgggtagggccgggggagccgtgtctacttacgtttcagtcgatccagcaactggggcaatttacgctctcagaagtttcgactacgagaccctccgccaactggatgtcagaatccaggcatcagacggcggatcacctcagctgagctcatctgcacttgtgcaggtacgggttctcgatcaaaacgatcacgcccccgtcctggtccaccctgctccagccaatggtagcctggaggtagccgtgcccggcaggacagcaaaagacaccgtcgtggcacgggtacaagcacgcgatgctgatgagggggctaatggggagttagcgttcgaactgcagcaacaggagccaagggaagctttcgccattggcaggaggacaggagagatactgctcacaggcgatcttagccaggagcctccggggcgggtgttccgcgcccttcttgtgattagcgacggtgggcggccccctctcaccacaacagcaacggtgagttttgtggtgaccgctggtggcgggagggggcccgctgcccccgcctctgccgggtcccccgagaggtcacgaccacctggctcacgactcggagtaagtggcagcgtgttgcagtgggatacgcccctgatcgttatcatcgtgctcgcagggagctgtactctcctgcttgccgcaatcatcgctattgcgactacatgcaacagaagaaagaaagaggtcaggaaggggggtgctttacgtgaggagagaccgggggccgccggaggcggtgcctccgcacctgggtctcctgaagaagccgcccgaggggccggcccgcgacctaacatgtttgatgtgctgactttcccgggtacaggcaaggctccatttggaagccccgccgccgacgcacctcccccagccgtggccgcagctgaggtgccgggctcagaaggtggaagtgccactggtgaaagcgcatgccattttgagggacaacagcgtctgcggggtgctcatgccgaaccttatggtgcctctccaggcttcggtaaggagcctgcaccacccgttgcggtttggaaaggacacagctttaatactatctccgggagagaggctgaaaagtttagcgggaaggactctgggaagggggatagcgattttaatgattctgactccgacatttctggcgacgccctgaagaaggatctgattaatcatatgcagtctggcttatgggcgtgtacggccgaatgcaagatcctgggccactctgaccggtgttggtcgcctagctgcagcggacctaatgcacacccttcaccacaccctccagcccaaatgtctaccttttgcaagagcaccagtctgcccagagatcctctaagacgcgacaactactatcaagcacaactgcctaagaccgttggtttgcagagtgtgtacgaaaaggtcttgcacagggattatgataggactgtcaccctgctgagccctcctcgtccggggcgcttacctgatctgcaggaaataggggtgcccctataccagagtccacccggacgctatctttctcctaaaaagggcgccaatgagaacgtgtag

SEQ ID NO: 130038 - DNA, 1791 bp, Artificial Sequence
  derived and/or modified sequence
atgtcacccgtccggcgttggggctctccctgcttgtttcccttgcagctcttttctctgtgctgggtgctgtccgtagcccagagtaagaccgttagatattccacatttgaagaagacgcacccggcaccgttatcgggacacttgccgaggacctgcatatgaaagttagcggggatactagcttccgtcttatgaagcagttcaattcatcccttctgagggtgcgcgaaggagatgggcagctgacggtgggagatgccggactggaccgagagcggttgtgcggacaggcccctcagtgtgtcttggctttcgacgtggtgtctttttcacaggaacagtttaggttagtccatgtggaggtcgaagtccgtgacgtgaatgaccacgctccggttctcgtccacccggccccggctaacggttcactggaggtcgccgtgcccggtaggaccgccaaggacacggtggtcgcccgcgtacaggcccgcgacgccgatgaaggagccaatggagaattagcctttgagctgcagcagcaagaacccagggaggcctttgcaatcggccgacgcacaggcgagattcttttgacaggtgacctgtcccaggaacccccagggagagtgtttagagccttgttggtaatttcagacggtgggcgtccacctctgactaccacagccacagtctcttttgtggtgaccgccggcggcggcaggggaccagcagctcctgcttccgcagggagtcccgaaaggtccaggcctcctggttcccggctgggcgtcagcggaagcgtactgcagtgggataccccgttaatagtcataattgtgctggccggttcatgcaccctgctgctagctgctattatcgccatagctacaacctgtaatcgccggaagaaggaggtgcggaaaggcggagctctgagggaagagcgccctggggccgccgggggcggtgcaagcgcaccgggttctccggaagaggctgctagaggcgccggaccaagacccaacatgttcgatgttctgacattcccgggcacgggcaaagccccctttggaagcccagctgccgacgcacccccacccgctgtcgcagccgccgaggtacccggatctgaaggcggaagtgccaccggggagtctgcctgtcacttcgagggacagcaacgtctgcgtggggcccacgccgaaccctatggcgcctccccaggctttggtaaggaacctgccccccccgtagccgtgtggaaggggcactcattcaatacaatatctggccgggaagccgaaaagttttccggaaaagactctggcaagggagactctgacttcaacgattccgatagcgacatttctggggacgccctaaagaaggacctgattaaccatatgcagtcaggcctgtgggcttgtactgcggaatgcaagattctcggccactcagaccgatgctggtccccgtcatgctccggcccaaacgcgcaccccagcccacatcctcccgcccagatgagcaccttctgcaaaagtactagtttgcccagggaccctctgagaagggacaactattatcaggctcagctccccaagaccgtaggactccaatctgtgtatgagaaggttcttcaccgggactacgacagaacagtcaccctcttgtcccccccccggccgggaaggttgccggacttacaggaaataggggtgcctttgtaccagagcccacccggccggtatctgtccccaaaaaagggtgctaacgaaaacgtgtag

SEQ ID NO: 130039 - DNA, 2742 bp, Artificial Sequence
  derived and/or modified sequence
atgagcccagtgaggagatggggatccccgtgcctgttcccacttcagttattttcactctgctgggttctttcagttgcccagtccaagacagtgaggtacagcacttttgaggaagatgcccccgggacagtcatcgggaccctcgcagaagacttacatatgaaagttagtggagatacttcattccggttaatgaaacagttcaattccagcctgttgcgcgtgcgggaaggagacgggcagctgactgtcggagatgcggggctggatagggaacgcctgtgtggtcaggcccctcagtgcgtgctggcattcgatgtcgtcagctttagccaggaacaatttcgcttggtccacgtggaggtggaagtacgggacgtcaatgatcacgctcctagattcccaagggcacagatccccgtggaggtctcagagggagccgccgtcggcacccgcataccactcgaggtgccagtcgacgaggacgtcggggccaatggcctccagaccgtccgccttgccgaaccccattccccttttcgcgtggaattacaaacccgggccgatggtgctcagtgcgccgatctggtgctcctgcaagaactggatcgcgaaagccaggccgcatacagtctagagctggtagcacaggatgggggcaggccacctagaagtgccacagctgcgctgagcgtgagagtcctggacgccaatgaccactcccccgccttccctcagggagctgttgctgaggttgagctcgcagaagatgcccctgtcggaagcttgctactggatcttgacgcggctgaccccgacgagggacccaacggtgacgttgtttttgcgtttggggcccgcactcctcctgaggcccggaggctgtttagactggatccgcggagtggaagactaaccctggcagggcccgtagactatgagcgccaagatacctatgagctggatgttcgggcccaggaccgcggaccaggaccccgggccgccacatgtaaggtgattgttcgaatacgcgacgtgaacgacaatgcacccgacatcgcaattaccccactcgcagcgcctggcgctggcaacctcaccttgcgacggaacggtcaggttacttaccgtctgctggaagcagaagtcgggagggctgggggagccgtaagcacttacgtaagcgtggacccagcgactggggcaatttacgctttaaggagcttcgattatgagaccctgcggcaacttgacgtccggatccaggcgagcgatggggggtccccccagttgtcctccagcgcactggtccaggtgcgagtcctggatcagaacgaccatgctcccgtacttgtgcatccagccccggccaatgggagcctggaagtcgcggtcccagggagaacggcgaaggacacggtcgtcgcaagggtacaggctagggacgccgatgagggagctaacggtgagctggccttcgaactgcaacagcaagagcctcgcgaggcgttcgccataggacggaggactggagaaatcctcctcactggtgacctgtctcaggaacctccaggacgcgtgtttcgagccctgctggttatcagtgatggaggccggccacctctcaccaccacggctactgtctcattcgtggtgaccgcggggggtggaagaggccctgccgcacccgctagcgccggcagtccggaaaggtcacgtcccccaggatcaagactcggtgtatccgggagcgtgcttcagtgggatacccccctgatcgtgataattgtgctggccggcagttgcaccttgctgctggccgctattattgctatagccacgacctgtaatcgaagaaagaaggaagttaggaaaggtggggcgctgcgcgaagagcggccaggagccgcgggcggcggggctagcgcccctggcagccccgaggaagctgccagaggcgccggccctagacctaacatgttcgatgtcctgacatttcccggcactggcaaagccccttttgggagtcccgccgccgacgccccaccaccagctgtggcagctgcagaagtacctgggagcgaagggggtagcgctacaggtgaatcagcctgtcattttgagggacaacagcgacttcgaggcgcccacgccgagccatatggagctagccccggatttggaaaggagccagctcctcccgtggccgtgtggaagggtcattcattcaacactattagtggccgggaggctgagaagttttcagggaaggattccggcaaaggggacagtgatttcaatgactcagacagcgacatctcgggggatgcattgaaaaaggacctgataaaccacatgcagtctggcctgtgggcgtgcactgccgagtgcaaaattctcggccactctgacagatgctggtcaccgtcctgttcaggacctaacgctcacccctcccctcaccctcccgcccagatgtcaaccttctgtaagtctacatctctccctagggatcctctgcgaagagacaactattaccaggcccagctgcctaaaaccgtgggcctccagtccgtgtacgaaaaagtccttcaccgcgactacgaccgaacagtgaccttgctaagtcccccccggccaggtcggctccctgatctgcaggagataggagtccccctctatcagtcaccacccggccgttatctgagcccaaagaagggggcaaacgaaaacgtctag

SEQ ID NO: 130040 - DNA, 3213 bp, Artificial Sequence
  derived and/or modified sequence
atgagccctgtgcggcgctggggcagcccctgcctcttccccctgcagctgttcagcctgtgctgggtgctgtctgtggcccagagcaagacagtgcgctacagcacctttgaagaagatgcccctggcaccgtcatcggcaccctggccgaggacctgcacatgaaggtgtctggggacaccagcttccggctgatgaagcagttcaacagcagcctgctgcgggtgcgggagggagatggccagctgactgtgggagatgctggcctggaccgggagcggctgtgtggccaggccccccagtgtgtgctggcctttgatgtggtgtccttcagccaggagcagttccggctggtgcacgtggaggtggaggtgagagatgtgaatgaccacgccccccgcttcccccgggcccagatccctgtggaggtgtctgagggcgctgctgtgggcacccgcatccccctggaggtgcctgtggatgaagatgtgggcgccaacggcctgcagacagtgcggctggccgagccccacagccccttccgggtggagctgcagaccagggcagatggagcccagtgtgccgacctggtgctgctgcaggagctggaccgggagagccaggccgcctacagcctggagctggtggcccaggacggcggccggcccccaagaagtgccacagctgccctgtctgtgcgggtgctggatgccaatgaccacagccctgccttcccccagggcgctgtggccgaggtggagctggctgaagatgcccctgtgggcagcctgctgctggacctggatgctgctgaccctgatgagggccccaatggagatgtggtgtttgcctttggagcccggaccccacctgaggcccggcggctcttccggctggaccccaggagcggccgcctgaccctggccggccctgtggactatgaaaggcaggacacctatgagctggatgtgcgggcccaggaccggggccctggccccagggctgccacctgcaaggtgattgtgcgcatcagagatgtgaatgacaatgccccagacatcgccatcacccccctggccgcccctggggccccagccaccagcccctttgctgctgctgctgctgctgctgccctgggcggcgcagatgccagcagccctgctggggccggcaccccagaggccggggccaccagcctggtgcctgagggcgccgcccgggagagcctggtggccctggtgtccaccagtgaccgggacagcggggccaacggccaggtgcgctgtgccctgtatggccacgagcacttccggctgcagcctgcctatgccggcagctacctggtggtgacagctgccagcctggaccgggagagaattgctgagtacaacctgaccctggtggccgaggacagaggagccccacccctgaggacagtgcggccctacacagtgcgggtgggagatgaaaatgacaatgcccccctcttcaccaggcctgtgtatgaggtgtctgtgcgggagaacaaccccccaggggcctacctggccaccgtggccgcccgggaccgggacctgggcagaaatggccaggtgacctaccgcctgctggaggccgaggtgggccgggccggcggcgctgtgtccacctacgtgtctgtggaccctgccaccggggccatctatgccctgcggagctttgattatgagaccctgcggcagctggatgtgcgcatccaggccagtgatggcggcagcccccagctgagcagcagcgccctggtgcaggtgcgggtgctggaccagaatgaccacgcccctgtgctggtgcacccagccccagccaacggcagcctggaggtggccgtgcccggccgcacagccaaggacacagtggtggcccgggtgcaggccagagatgctgatgagggcgccaacggggagctggcctttgagctgcagcagcaggagccccgggaggcctttgccatcggccgcaggactggagagatcctgctgaccggggacctgagccaggagcccccaggccgggtcttccgggccctgctggtgatcagtgatggcggccggccccccctgaccaccacagccaccgtgtcctttgtggtgacagctgggggcggccggggccctgctgccccagccagcgctggcagccctgagaggagccggcccccaggcagccggctgggcgtgtctggctctgtgctgcagtgggacacccccctgattgtcatcatcgtgctggccggcagctgcaccctgctgctggccgccatcatcgccatcgccaccacctgcaacagaaggaagaaggaggtgaggaaaggaggagccctgcgggaggagaggcctggagctgctgggggcggggccagcgcccctggcagccctgaggaggccgcccggggggccggcccccggcccaacatgtttgatgtgctgaccttccctggcaccgggaaggcccccttcggcagccctgctgctgatgcccctcctcctgctgtggccgctgctgaggtgcccggcagcgagggcggcagcgccaccggggagagcgcctgccactttgagggccagcagaggctgcggggggcccacgccgagccctatggagccagccctggctttgggaaggagcccgcccctcctgtggccgtgtggaagggccacagcttcaacaccatcagcggccgggaggccgagaagttcagcggcaaggacagcgggaaaggagacagcgacttcaatgacagcgacagcgacatctctggagatgccctgaagaaggacctgatcaaccacatgcagagcggcctgtgggcctgcacagctgagtgcaagatcctgggccacagcgaccgctgctggagccccagctgcagcggccccaatgcccaccccagcccccaccccccagcccagatgagcaccttctgcaagagcaccagcctgccccgggaccccctgcggcgggacaactactaccaggcccagctgcccaagacagtgggcctgcagagcgtgtatgagaaggtgctgcaccgggactatgacagaacagtgaccctgctgagccccccccggcccggccgcctgcctgacctgcaggagattggagtgcccctgtaccagagccccccaggccgctacctgagccccaagaagggggccaatgaaaatgtgtag

SEQ ID NO: 130041 - DNA, 1791 bp, Artificial Sequence
  derived and/or modified sequence
atgagccctgtgcggcgctggggcagcccctgcctcttccccctgcagctgttcagcctgtgctgggtgctgtctgtggcccagagcaagacagtgcgctacagcacctttgaagaagatgcccctggcaccgtcatcggcaccctggccgaggacctgcacatgaaggtgtctggggacaccagcttccggctgatgaagcagttcaacagcagcctgctgcgggtgcgggagggagatggccagctgactgtgggagatgctggcctggaccgggagcggctgtgtggccaggccccccagtgtgtgctggcctttgatgtggtgtccttcagccaggagcagttccggctggtgcacgtggaggtggaggtgagagatgtgaatgaccacgcccctgtgctggtgcacccagccccagccaacggcagcctggaggtggccgtgcccggccgcacagccaaggacacagtggtggcccgggtgcaggccagagatgctgatgagggcgccaacggggagctggcctttgagctgcagcagcaggagccccgggaggcctttgccatcggccgcaggactggagagatcctgctgaccggggacctgagccaggagcccccaggccgggtcttccgggccctgctggtgatcagtgatggcggccggccccccctgaccaccacagccaccgtgtcctttgtggtgacagctgggggcggccggggccctgctgccccagccagcgctggcagccctgagaggagccggcccccaggcagccggctgggcgtgtctggctctgtgctgcagtgggacacccccctgattgtcatcatcgtgctggccggcagctgcaccctgctgctggccgccatcatcgccatcgccaccacctgcaacagaaggaagaaggaggtgaggaaaggaggagccctgcgggaggagaggcctggagctgctgggggcggggccagcgcccctggcagccctgaggaggccgcccggggggccggcccccggcccaacatgtttgatgtgctgaccttccctggcaccgggaaggcccccttcggcagccctgctgctgatgcccctcctcctgctgtggccgctgctgaggtgcccggcagcgagggcggcagcgccaccggggagagcgcctgccactttgagggccagcagaggctgcggggggcccacgccgagccctatggagccagccctggctttgggaaggagcccgcccctcctgtggccgtgtggaagggccacagcttcaacaccatcagcggccgggaggccgagaagttcagcggcaaggacagcgggaaaggagacagcgacttcaatgacagcgacagcgacatctctggagatgccctgaagaaggacctgatcaaccacatgcagagcggcctgtgggcctgcacagctgagtgcaagatcctgggccacagcgaccgctgctggagccccagctgcagcggccccaatgcccaccccagcccccaccccccagcccagatgagcaccttctgcaagagcaccagcctgccccgggaccccctgcggcgggacaactactaccaggcccagctgcccaagacagtgggcctgcagagcgtgtatgagaaggtgctgcaccgggactatgacagaacagtgaccctgctgagccccccccggcccggccgcctgcctgacctgcaggagattggagtgcccctgtaccagagccccccaggccgctacctgagccccaagaagggggccaatgaaaatgtgtag

SEQ ID NO: 130042 - DNA, 2742 bp, Artificial Sequence
  derived and/or modified sequence
atgagccctgtgcggcgctggggcagcccctgcctcttccccctgcagctgttcagcctgtgctgggtgctgtctgtggcccagagcaagacagtgcgctacagcacctttgaagaagatgcccctggcaccgtcatcggcaccctggccgaggacctgcacatgaaggtgtctggggacaccagcttccggctgatgaagcagttcaacagcagcctgctgcgggtgcgggagggagatggccagctgactgtgggagatgctggcctggaccgggagcggctgtgtggccaggccccccagtgtgtgctggcctttgatgtggtgtccttcagccaggagcagttccggctggtgcacgtggaggtggaggtgagagatgtgaatgaccacgccccccgcttcccccgggcccagatccctgtggaggtgtctgagggcgctgctgtgggcacccgcatccccctggaggtgcctgtggatgaagatgtgggcgccaacggcctgcagacagtgcggctggccgagccccacagccccttccgggtggagctgcagaccagggcagatggagcccagtgtgccgacctggtgctgctgcaggagctggaccgggagagccaggccgcctacagcctggagctggtggcccaggacggcggccggcccccaagaagtgccacagctgccctgtctgtgcgggtgctggatgccaatgaccacagccctgccttcccccagggcgctgtggccgaggtggagctggctgaagatgcccctgtgggcagcctgctgctggacctggatgctgctgaccctgatgagggccccaatggagatgtggtgtttgcctttggagcccggaccccacctgaggcccggcggctcttccggctggaccccaggagcggccgcctgaccctggccggccctgtggactatgaaaggcaggacacctatgagctggatgtgcgggcccaggaccggggccctggccccagggctgccacctgcaaggtgattgtgcgcatcagagatgtgaatgacaatgccccagacatcgccatcacccccctggccgcccctggggccggcaacctgaccctgcggagaaatggccaggtgacctaccgcctgctggaggccgaggtgggccgggccggcggcgctgtgtccacctacgtgtctgtggaccctgccactggagccatctatgccctgcggagctttgattatgagaccctgcggcagctggatgtgcgcatccaggccagtgatggcggcagcccccagctgagcagcagcgccctggtgcaggtgcgggtgctggaccagaatgaccacgcccctgtgctggtgcacccagccccagccaacggcagcctggaggtggccgtgcccggccgcacagccaaggacacagtggtggcccgggtgcaggccagagatgctgatgaaggagccaatggagagctggcctttgagctgcagcagcaggagccccgggaggcctttgccatcggcagaagaactggagagatcctgctgactggagacctgagccaggagcccccaggccgggtcttccgggccctgctggtgatcagtgatggcggccggccccccctgaccaccacagccaccgtgtcctttgtggtgacagctgggggcggccggggccctgctgccccagccagcgctggcagccctgagaggagcaggcctcctggcagccggctgggcgtgtctggctctgtgctgcagtgggacacccccctcatcgtcatcatcgtgctggccggcagctgcaccctgctgctggccgccatcatcgccatcgccaccacctgcaacagaaggaagaaggaggtgaggaagggcggggccctgcgggaggagaggcctggagctgctgggggcggggccagcgcccctggcagccctgaggaggccgcccggggagctggcccccggcccaacatgtttgatgtgctgaccttccctggcaccgggaaggcccccttcggcagccctgctgctgatgcccctcctcctgctgtggccgctgctgaggtgcccggcagcgagggcggcagcgccactggagagagcgcctgccactttgagggccagcagaggctgcggggggcccatgctgagccctacggggccagccctggctttgggaaggagcccgcccctcctgtggccgtgtggaagggccacagcttcaacaccatcagcggccgggaggccgagaagttcagcggcaaggacagcggcaagggggacagcgacttcaatgacagcgacagcgacatctctggagatgccctgaagaaggacctgatcaaccacatgcagagcggcctgtgggcctgcacagctgagtgcaagatcctgggccacagcgaccgctgctggagccccagctgcagcggccccaatgcccaccccagcccccaccccccagcccagatgagcaccttctgcaagagcaccagcctgccccgggaccccctgcggcgggacaactactaccaggcccagctgcccaagacagtgggcctgcagagcgtgtatgagaaggtgctgcaccgggactatgacagaacagtgaccctgctgagcccccccaggcctggccgcctgcctgacctgcaggagattggagtgcccctgtaccagagccccccaggccgctacctgagccccaagaagggggccaatgaaaatgtgtag

SEQ ID NO: 130043 - DNA, 3213 bp, Artificial Sequence
  derived and/or modified sequence
atgagccccgtgcggcggtggggcagcccctgcctgttccccctgcagctgttctcactgtgctgggttctctctgtggcacagagcaagaccgtccgttacagcaccttcgaggaagatgcccctggaacagtgatcggcacactggccgaggatctccacatgaaagtctctggtgatacgagctttcgactcatgaagcagtttaatagcagcttgctgagggtacgtgagggcgatggccagctaacagtgggcgacgcgggcctggaccgggagcgcctgtgcgggcaggcacctcaatgcgtgttggccttcgacgtcgtgtctttctctcaggaacaattccgcctcgtccatgtggaggtcgaggtcagagacgtcaacgatcacgcacccagattcccgcgtgcccagattcctgtcgaggtctccgaaggcgctgcggtgggcactcgcataccgcttgaggtcccggtggatgaagatgtaggggccaacggtctgcagaccgttcgcctggccgagccgcacagtccattccgcgtcgagctgcagactcgagctgatggcgcccaatgtgccgacctcgtgttgctgcaggaactggatcgagagagccaagcagcctattcgctggagctcgttgcacaggacggaggccgaccaccgagaagcgccacggccgccctgagcgtgagggtgctcgacgcaaacgatcactctcccgcgttccctcaaggcgcagtggctgaagtggagcttgccgaagacgctccggtaggatctctgctgctggatctggacgctgcagatcccgatgaaggtcctaacggcgatgtggtgttcgctttcggcgctaggactcccccagaggcccgcagattgttccgcctcgatccacggagcggaagactgacactggcaggaccggttgattatgaacgacaggatacgtacgagttggatgtcagggcacaggaccggggacctgggcctcgtgcagcaacctgcaaggttatcgtgcgcatccgcgatgttaacgataacgcacccgatatagctataacacctttggcagcccctggcgcgccagccacatcaccattcgctgccgctgcagctgcagctgctttagggggggccgacgcatcatcacctgcaggcgccggcacgccagaggctggggctacaagcctagtccccgagggcgccgctcgcgagtctttggtcgctctggtctcaactagcgatcgggattctggagcaaatggacaagtacgttgcgctctgtatggccacgagcatttcaggttacaacctgcttacgcagggtcctatctagttgtaacagctgcatcactggatcgagagaggatcgccgagtataatctgactttagtcgcagaggaccggggggcccccccactgaggacagttcggccatacaccgttagagtgggagatgaaaatgacaatgcacctctttttaccagacctgtgtacgaggtgtctgtcagggagaacaatcctcccggagcatacctcgccacagtggccgccagggaccgggatcttgggcgcaatggccaagttacttatcgcctgctggaagccgaggtgggccgagccgggggagccgtgagcacttacgtctcagtggatccagcaacaggggcgatttacgcgctgaggtcgtttgattacgaaactcttcgtcagctggacgtgcgtatccaggcaagcgatgggggttcccctcagctctctagtagcgctctcgtgcaggttcgcgtgctggatcaaaatgatcatgcccctgtgctcgttcaccctgctcctgctaacgggtctctggaggttgcggttcctggcaggactgcaaaagatacagtcgtggccagggtgcaggctagagatgctgacgagggcgccaatggcgagctcgccttcgagctccagcaacaagaaccgcgggaggcatttgccatcggcagacgcacaggcgaaattctcctgaccggagacctctctcaggagccgcccggccgcgttttccgggcgctgttggtaatttccgatggtgggaggcccccgttaactaccacagcaacggtgtcatttgtcgtcacagcaggaggcggccgaggacctgccgcacccgctagcgccggaagtccagagagatcacgaccccctggtagcaggctgggcgtgtccggaagcgtcctccagtgggacacgcctttaatcgtcattatcgtgctagccggtagctgtacattgctgctggcggctataattgccatcgccacgacctgtaatcggaggaagaaagaagtgcggaagggaggcgctctccgcgaagagagacccggagccgccggaggcggtgcttctgctccagggtcacccgaggaggccgcccgaggcgccggcccgcgcccgaatatgttcgatgtcttgactttcccaggtactggcaaggcaccttttggcagcccggccgcagatgccccacctcccgccgtggcagccgccgaggtgccagggtcagaagggggtagcgctacaggcgagtccgcctgtcatttcgaaggccagcagaggctccggggagcacatgcagagccatatggcgcctccccaggatttggcaaagaaccggcccctcctgtggcagtatggaaaggccacagctttaataccatctctggtagggaagccgaaaaattctccggcaaagatagtggaaagggagatagcgattttaacgactctgattcggacattagtggagatgcgttgaaaaaagatttgatcaaccatatgcagagcgggctatgggcttgtaccgctgaatgcaagattctgggacactccgatcggtgttggagcccgagttgctcagggcctaacgctcaccccagtcctcatcctcctgcccaaatgagtacattctgcaaatccaccagcctgccccgggaccctctcagaagagataattactaccaggcacagctcccgaaaactgtaggcctacagagcgtgtacgagaaagtcctgcatagagattatgatcgtaccgtgacactgctgagtccaccccgacccggacgtttacctgatctccaggagataggagtgccgctttatcagagcccgcctgggaggtatctctcaccgaaaaagggggccaacgagaacgtgtag

SEQ ID NO: 130044 - DNA, 1791 bp, Artificial Sequence
  derived and/or modified sequence
atgagccccgtgcggcggtggggcagcccctgcctgttccccctgcagttattcagcctctgctgggtgctctcagtcgcacagtccaaaactgtgcggtactctactttcgaggaagatgccccgggcaccgtgatcgggaccttagccgaagatttgcacatgaaggtaagcggggacactagctttaggctaatgaaacaatttaactcatctttactccgcgtccgagagggggacggacagctgacagtcggcgatgcaggactggacagggagcgcctatgtggtcaggccccgcaatgtgtgcttgccttcgacgtcgtgtccttctctcaggaacagtttagactggttcatgtcgaagtggaggtaagggatgtgaacgatcacgctcccgtgctggtgcatccagcccccgctaatggcagtctcgaagtcgcagtgcccggccgaaccgccaaggataccgttgtcgcacgcgtgcaggctcgcgacgcagatgagggcgcaaatggggaactggcttttgagttgcagcagcaggaacctagggaggcctttgcaattggacgtaggaccggagagattttgttgactggagacctaagccaagagccgcccgggcgggtgttccgcgccctgctggtgatttcggacgggggcaggcctccactaacaaccacggctaccgttagcttcgtcgtgaccgctggcggcgggcgggggccagcagctcccgcttccgccggatctcccgaacgttccaggccccctggctcaaggctcggcgtgtctggttccgtgctgcaatgggatacaccgcttatcgtgatcattgtgctggcgggatcctgcacgcttcttctggcagccattattgccatagccactacctgcaaccgacgaaagaaggaggtcaggaaagggggcgcactgagagaggaaagaccaggcgccgccgggggaggtgcatctgccccaggcagtcctgaggaagccgctcgtggcgctgggccaagaccgaacatgttcgatgtgctgaccttcccagggactggaaaggcgcctttcgggagcccggctgccgatgctccccctcctgccgtcgctgccgccgaggtcccagggagtgagggaggaagtgctactggcgagagtgcgtgccactttgagggacaacagaggttgaggggcgctcatgccgaaccatacggggctagcccaggcttcggcaaagagcccgctcctcccgtggcggtgtggaaagggcattccttcaataccattagtggaagggaggccgaaaaattcagtggtaaagacagcggtaaaggggactcggatttcaacgacagcgattcagacatcagcggagacgctcttaagaaggatctcatcaaccatatgcagagtggcctttgggcttgcaccgcagaatgcaagatcctggggcactcagatcgatgctggtccccctcctgctccgggccaaacgcccacccttcgcctcacccccctgctcagatgtccaccttctgcaagtcaacttcccttccacgggatcctttgcggcgagataactattatcaggctcaacttcccaagaccgtaggactgcagtcagtatacgagaaggttctgcaccgcgattacgatagaactgtgacacttctgagcccgcctagaccagggcgtctcccggatcttcaggagatcggggtgccgctgtaccagtcacctccaggaagatatttaagtcctaaaaagggcgctaacgagaatgtgtag

SEQ ID NO: 130045 - DNA, 2742 bp, Artificial Sequence
  derived and/or modified sequence
atgagccccgtgcggcggtggggcagcccctgcctgttccccctgcagcttttttctttgtgttgggtgctaagcgttgcacagagcaagaccgtccggtacagtacattcgaagaagacgccccaggcacggtgatcggtaccctggctgaagaccttcatatgaaggtgtctggcgatacttccttcaggctgatgaagcagttcaacagcagcttgcttagagtgcgcgagggggacgggcagctcactgtgggcgacgccggcctggatagggagcggctgtgcggccaggctcctcagtgcgtgctggcatttgacgtggtgagtttttcccaagagcaattccgacttgtacacgtggaagtggaagtacgggatgttaacgatcatgcacctcgcttcccacgcgcacaaataccggtggaggtgtctgaaggagccgccgttggcaccagaattccacttgaagtgcccgtggatgaggacgttggtgcgaatggactgcagaccgtgaggctggcggagccccacagcccattcagggttgaactacaaactagggccgacggggcacaatgtgctgatctggtgcttcttcaggaactggacagggaatcccaggccgcttatagcttagagctcgttgcccaggatggtgggaggccacctagaagcgccacggccgccctttccgtgagggtccttgacgccaacgaccactcccctgcattcccacagggagccgtggcagaagtggagctggcagaggacgcccccgtgggcagtttgttgctggatcttgacgctgctgaccccgacgagggccctaatggtgacgtggtattcgcctttggagcccgcaccccgcccgaggctaggaggctttttcggttagaccctcgcagcggtaggctgacacttgcgggacccgttgactacgaaagacaagatacctacgagcttgacgtcagagcccaggacagaggacccgggccgcgggccgcgacgtgtaaagtcattgtccgaattagggacgtgaacgacaacgcccctgacattgccataaccccccttgccgcccctggggccgggaatttaactcttcgccgaaacggccaagtgacttacaggctgttagaggcagaagtgggcagggcgggcggggccgtgtctacatacgtgtcagtcgacccagccaccggcgccatctacgccctaaggagcttcgattatgagaccttgcgccagttggatgttagaattcaggcaagcgatggtggcagtcctcagttaagtagtagtgcactggtgcaggttagggttctggatcagaacgatcacgctccggtgctggtccacccggcccctgcaaatggctccttggaagtggccgtccccgggcgcacggctaaagatactgttgtggcacgtgttcaggccagggatgccgatgagggtgcgaatggggaattggccttcgaacttcagcagcaagagccaagggaagcgtttgccattggtcgcagaaccggggaaatcttgctgacaggtgatctaagccaagaacccccaggccgagtgtttagagcccttcttgtgattagcgatggaggcagaccccccctgactaccaccgcaacagtgagctttgtggtcaccgctgggggtggcaggggacccgcggcccctgcctctgcaggctcacctgaaagaagtcgaccacccggatcaagactaggcgtgtccggctcagtgcttcagtgggatacaccattgattgtaatcattgtcttggctgggagctgtacgttgctgctggctgcaattattgccatcgcaacaacatgcaaccgccgtaagaaagaagtgcgcaagggtggcgctctgcgggaagagcgcccaggagctgccggtggaggtgcctctgcccctgggtctcctgaggaggccgcgagaggcgccggcccacggcctaacatgttcgatgttctgacatttcccgggactggtaaagctcccttcgggtctcccgcagccgacgcgccgcccccagcggttgccgcagccgaggtcccggggtctgagggagggagcgccacaggtgaaagtgcatgccactttgagggccaacagaggctgagaggcgcgcatgccgagccctacggtgcctcaccaggtttcggcaaggagccggccccccctgtagccgtgtggaaaggccactcttttaacaccatcagtggtcgggaagctgagaagttcagtggcaaagactctggaaaaggagattccgacttcaatgacagtgattctgatatctctggtgacgcactgaagaaagatcttatcaatcatatgcagagcggattgtgggcgtgcacagccgagtgcaaaattctggggcattcagatcgctgttggtctccaagttgcagtggacccaatgcacatccaagcccccacccaccagcccaaatgtctactttctgtaagtctacaagcctgcctagagatccactgcggagagataactattaccaggctcaactcccgaaaactgttgggctgcagagcgtctacgagaaagtgttgcatcgggactacgatcgtacagtgacactcctgtcccccccaaggcccggaagattgcctgatctccaggagatcggggtgccgctttatcaatctccccctggtcgctacctgagtcctaagaagggtgccaacgagaatgtgtag

SEQ ID NO: 130046 - DNA, 3213 bp, Artificial Sequence
  derived and/or modified sequence
atgagtccggtgaggcggtggggctcaccctgcctgtttccattacagttatttagtctttgctgggtgcttagcgtcgcacagtccaaaaccgtgcgctacagcacttttgaggaagacgcacccggaacagtgatcggcacgctggcggaagatctgcatatgaaggttagtggagacacctcattcaggctcatgaaacagtttaatagttccctcctccgggtgcgcgagggagatgggcagttgactgtaggagatgctggtcttgatagagaacggctgtgcgggcaggcaccacaatgtgtgcttgcctttgatgttgtgtcattttctcaagaacagtttcgattggtccatgtcgaagtggaagtcagggatgtaaacgatcatgcccctaggtttccgcgtgcacagataccagtggaggtaagtgagggagctgccgttggcacgagaattccactcgaagtccccgtcgatgaggatgtcggcgctaatggtctgcagacagtccggttggcagaaccgcactctccattccgcgtggaactccagacacgggcagacggggcacagtgcgccgatctagtgcttctccaggagctcgatagggagtcccaggcagcctattcactcgaactggtggcccaggacggcggaaggcccccacgctcagctactgccgctctctctgtacgtgtgttggatgcgaacgaccactcacctgctttccctcagggcgctgtggccgaggtagagctagcagaagacgcacctgtgggatccctgctgctggatctagatgccgctgaccctgacgaaggccctaacggcgatgtggtatttgcatttggcgctcggacccctcccgaggccagacgcctgtttcggctggacccgagatcaggcagacttacactggccggacctgtcgactatgaacgccaggacacctacgagctcgacgtgcgggctcaggatcggggtcccggacctcgcgctgcaacttgcaaagtcatcgtgcggatccgtgatgtgaatgataacgccccagacatagctatcactcctttggccgctccaggagcaccggcaaccagccccttcgccgcagctgcagccgcagccgcactgggcggagcggatgcatcctcacccgcaggagccggaacaccagaggccggtgctacgagtttagtgcctgaaggtgctgcccgagagtctctggtggcgctggtttccacatcggaccgcgattctggggctaacggccaggtgcggtgcgccctctacggacacgagcacttccggttgcaacctgcctacgctggcagctatctggtggtcaccgcagctagcctagacagggagaggatcgccgagtacaatctcaccctagtagcggaggaccggggtgccccaccactgagaaccgtgaggccgtatacggtcagggttggcgatgaaaacgataacgctcctttgtttactcgtccggtctatgaggtgtcagtacgcgaaaacaatcccccaggagcttatctggctacagttgcagctcgtgaccgggacctgggaagaaatgggcaggtgacataccgtttgctagaggctgaggtcggcagagctggtggcgctgtctccacctacgtgagtgtggaccccgctaccggtgccatctatgctctgcgctcattcgactatgagactttacgccagttggacgtcagaatccaagccagcgacgggggaagcccacaactcagctcatccgccctggttcaggtcagagtccttgaccagaatgatcacgcacccgtcctcgtgcacccagcacccgctaacggatctttggaggtggccgtgccaggtaggactgctaaagatacagtggtggcaagagtacaagcacgggatgcagacgaaggtgcaaacggtgaactggccttcgagctccagcagcaagagccaagggaggcttttgccattggaagacgtactggcgaaatactgcttacaggggacctgtcccaggaaccacctgggcgagtgttccgtgccctgctggtgatctcagacgggggacggccaccacttacaaccacggcaaccgtatctttcgtcgttactgctgggggaggacgcggacccgctgcacccgctagcgctgggtctcctgaacgctctcgccctcccggttctcgcctgggggtgtccggaagtgtgttgcagtgggacacccccttgatcgtgatcattgtcctcgctggctcttgcacgctgctgctggcagccattatcgctatcgctactacttgcaatagacgcaaaaaagaggtaaggaagggtggagctctgcgggaagagaggcctggggctgcgggtggtggagcatccgccccagggtctccggaagaggccgctcggggagcaggacctaggccgaatatgtttgacgttctgacattccccggtactgggaaggctccttttggatcccctgccgcagacgcgcctccgcctgctgttgccgctgccgaagtgccaggcagcgaagggggttctgccaccggggagtctgcctgtcacttcgaaggtcagcagaggttacgaggcgctcatgccgaaccatatggagcaagccccggattcgggaaggaacctgcaccaccagtagctgtgtggaaagggcatagtttcaacaccatcagcggtcgggaggccgagaaattctctgggaaggattcgggtaagggcgactcagattttaacgattctgatagcgacatttctggagacgctctgaagaaggacctgataaatcacatgcagagtgggctgtgggcttgtacagcagagtgcaagatcttagggcactctgacagatgctggagcccctcatgtagcggcccaaacgcacatcctagtccacaccccccagcgcagatgagtactttttgcaagtccacctctcttcctcgcgaccccctgaggcgagataattattatcaggcacaactgcctaaaactgtgggactacaatctgtatatgagaaggtgctgcatagagactatgaccggaccgtgactctgctgagccctcccagacctggcaggctcccggacctccaggagatcggcgtcccgctgtatcagagtcctccagggcgttacctcagccctaagaagggtgccaatgagaacgtgtag

SEQ ID NO: 130047 - DNA, 1791 bp, Artificial Sequence
  derived and/or modified sequence
atgtctccggtgaggaggtggggttcaccctgcctgttcccactccagctcttttcgctctgctgggtgctgagcgtggctcagtccaaaaccgtgagatacagtacgtttgaagaggatgcaccaggcacagtgatcggcactctggctgaggacttacacatgaaggtatctggcgatactagcttccggctgatgaaacagtttaacagctctctgctgagagtgcgcgagggagatggccaacttactgtcggcgacgctggccttgatagggagcgcctgtgtggccaagcaccccaatgtgtgcttgcctttgatgtcgtcagcttctctcaggagcagttccggcttgtgcatgtcgaggttgaagtcagggatgtcaacgatcacgctccagtgctggtccatcccgctccagcaaatgggtcacttgaggtggccgtgccagggcgaactgcaaaggataccgtcgtggcgcgagtgcaggctagagatgccgacgaaggagctaacggcgaactagcgttcgaacttcagcagcaggaaccacgggaggcatttgctattggacggcgaaccggcgaaattcttctcacaggcgatttgtcccaggagccaccagggcgagtgttcagggctctgctggtcatctccgatggcggacgcccaccactcacaaccacagccaccgtgtcctttgtggtcactgccggtggaggaagaggacccgcagccccagccagcgccggttcacccgaacgctccagaccgccaggttcaaggcttggagtcagcggctccgtgctacagtgggacaccccgcttattgttatcattgtattggctggatcttgcactctgttactggccgctatcattgctattgccaccacctgcaaccgcaggaagaaggaagttaggaaagggggtgccctgcgtgaggaacgaccgggagcagcgggtggcggagccagtgccccaggctcacccgaagaagctgcacggggtgccggacctagaccaaatatgttcgatgtgctgacattccctgggaccggtaaagccccatttgggtctccagcagccgacgctccacctcctgcggtcgccgctgccgaggtgccgggttccgaagggggatcagccactggcgaaagcgcgtgtcactttgagggtcagcaacggctgagaggcgcacacgccgagccctatggcgcttcacccggattcggtaaagagccagcaccccctgtggcagtgtggaaaggacatagcttcaacactataagtgggagagaggctgagaaattttctggaaaggattctggtaaaggagattctgattttaatgattcagactccgatataagtggtgatgctctgaagaaagatctgataaatcacatgcagagcggactttgggcatgtactgctgagtgtaaaattctgggtcattcagacaggtgttggagcccctcatgttccggacctaacgctcacccttccccacacccaccggctcaaatgagcaccttttgtaagtccacaagtctgcctagagaccctctccgacgtgataattattaccaagcccagctcccaaagacggttggcctgcagagcgtgtacgagaaagtgctgcaccgcgactatgataggaccgtaaccttgctgagcccccctcgaccaggccgactgccagacctccaggagatcggcgtgcctctctatcagtcaccgcctggaagatatctttccccaaagaaaggagctaacgagaatgtgtag

SEQ ID NO: 130048 - DNA, 2742 bp, Artificial Sequence
  derived and/or modified sequence
atgagcccagtacggaggtggggttcaccttgcctgtttcccttgcagctgttctcattatgttgggtactctcagttgctcaatctaagaccgtacggtattctacattcgaggaagacgctccaggcacagtcataggtaccctggccgaggatctgcatatgaaggtaagcggcgacacatcctttagactgatgaagcaattcaatagctctctgctgagggtgcgagaaggggacggacagttgaccgtgggggacgcaggccttgatagagagcgcttgtgcggacaggccccacagtgtgtgcttgccttcgatgtggtgtccttttctcaggaacaatttaggctggtgcatgttgaggtggaagtgcgtgacgtaaatgaccatgcccctaggtttccaagggcacaaatcccagtggaggtatctgagggagctgctgtggggaccaggattcccttggaggttccagtcgatgaagacgtgggggctaatggcctccagaccgttaggttagccgaaccgcactccccttttcgagtggagctgcaaactagggccgatggggctcaatgcgctgacctggtgttgctgcaggagttggaccgtgagtcacaggccgcatactcactcgagctcgtggctcaagacggagggagacctcccagatccgctactgcagccctgtcagtcagggtgttggacgctaacgaccactcccctgcattcccacagggtgcggtggccgaagtggaactggccgaggacgcacccgtaggcagcctcctgctggacctggacgctgctgacccagacgaaggtcccaatggcgacgttgtctttgcctttggcgctcggactcctcccgaagcccgacgacttttccggttagaccctcggtcaggtaggctcactctagccggtccagtggattatgagaggcaggatacctacgagctggacgttcgggctcaagatcggggaccgggaccacgcgctgctacctgtaaggtgattgtgaggattagggatgtaaatgacaacgccccagatattgccattactcccctcgccgctcctggcgctggtaaccttaccctgagacggaatggacaggttacttaccggctcctcgaggcagaagtagggcgtgctggtggggctgtgtctacatatgtgtcagtagatccggctaccggcgcaatttacgccctgaggtcctttgactatgaaacgctgagacaattggacgtacgcatccaagctagcgacgggggaagcccacagctttcctcatctgctctggtccaggttcgggtgttggatcagaatgaccacgcgcctgttcttgtgcatccagccccagctaatgggagtttggaggtagccgtgcctggaagaaccgccaaagacaccgtggttgcccgtgtccaagcgagagacgctgacgaaggcgcaaatggcgagcttgctttcgaactgcagcagcaagaacccagagaagcattcgctatcggccgacgtaccggcgagatcctgctcactggcgacctcagtcaggagcctcccggtagggtatttagagcgctgctagtgatttcggatggcggtcggcctccactcaccacgaccgcaacagtgtcttttgtagtaaccgcagggggagggagaggccctgcggcacctgcaagcgctggatcccctgaaagatcaaggccacccggatcacggttaggtgtctctggctccgtgctgcagtgggatacgcctttgatcgtgataattgtgctggcaggtagctgcacactcctgcttgccgctatcatagccatagctacaacctgcaacaggagaaagaaagaggtaaggaagggaggagctctgcgcgaagagcggcctggtgccgctggagggggagcaagcgcccctggaagtccagaggaagccgctcgtggggcaggtcccaggccaaatatgtttgatgtgcttacctttccaggcacagggaaagccccatttggatcccctgcagcagatgcccctcccccagctgtggccgctgcagaagtccccggatccgaaggcggtagtgccacaggagagtcagcatgtcatttcgaaggacagcagaggctaaggggagctcatgccgagccatatggtgcctcacctggcttcggtaaggagccggctccgccagtggccgtgtggaaagggcactcctttaacaccatctctggcagggaagctgagaaatttagcggaaaagactcaggtaaaggcgattccgactttaatgacagtgattccgatatctctggagacgccttaaagaaagatttgatcaaccatatgcaatcgggtctctgggcttgcactgccgaatgtaagatcctcggacattccgacaggtgttggtccccatcttgctctgggcctaatgcgcacccaagcccacacccccctgcgcagatgtcgaccttctgcaaaagcaccagcctgcctcgggaccccttaaggagggacaactactatcaggcccagcttcctaagaccgtaggtctgcaatcagtttacgaaaaagtcttgcatcgtgattatgacagaaccgtgacactcctgtcccctcctagacccggacggctgcctgacctccaagagattggagtccctctctaccagagtcccccaggaagatatctctctccaaagaagggcgctaacgaaaacgtgtag

SEQ ID NO: 130049 - DNA, 4003 bp, Artificial Sequence
  derived and/or modified sequence
agcttctgtaagagacggagaggcgcagagtgagggcgggtccgcgcgtcctcagagcccgctggaggctcggagctgctacccgcagacttctcccgcacagggctcgcaaagagcgtgattccgagagcctgagactgacgcccgacctggaaaccagagaagacttccttagcctttcggatcgcacttgaggctggaggcatgagtcctgtgaggcgttggggcagcccctgccttttccccttgcagctcttcagcctctgctgggtgctctcagtggcccagagcaaaacagtccgatacagcaccttcgaggaggatgcccccggcacggtcatcgggaccctggccgaggacctgcatatgaaagtatcgggtgacacaagcttccgcctgatgaagcaattcaacagctctctgctccgggtgcgcgaaggcgacgggcagctgaccgtcggggacgccggcctggaccgcgagcggctgtgtggccaggccccgcagtgcgtgctggccttcgatgtggtcagcttctcgcaggagcagttccggctggtgcacgtggaggtagaggtgagggacgtcaacgaccacgcgccgcgcttccccagggcccagatcccggtagaggtgtccgagggtgcggcagtgggcacgcgcatccccttggaggtgccggtggacgaggacgtgggcgccaacgggctgcagaccgtgcgcctggccgagccgcacagcccctttcgcgtggagctgcagacgcgagcggacggcgctcagtgcgcagacctggtgctgctgcaggagctggaccgcgagagccaggccgcctacagcctggagctggtggcccaggacggcggccgcccgccgcgctccgccacggctgccctcagcgtgcgcgtcctggatgcgaatgaccacagcccggccttcccgcagggcgccgtggccgaagtggagctggcggaagacgcgcccgtgggctccctgcttctcgacctggacgcagccgaccccgacgagggacctaacggcgacgtggtgttcgcatttggcgcccgcaccccgccggaggcgcgccgcctctttcggcttgacccgcgatcaggccgcctcaccctggccgggcccgtggactacgagcgtcaggacacctacgagctggacgtgcgggcgcaggaccgcggacccgggccccgcgctgccacctgcaaggtcatcgtgcgcatccgagacgtcaatgacaacgcacccgacatcgccatcaccccgctggccgccccaggcgcgccggcaacctcacccttcgccgctgccgccgccgccgctgcactcgggggagcggacgctagctcgccggcgggagccgggacgccggaggctggtgccacttcgctggtgccggagggggcggcgcgcgagagcctggtggccctggtcagcacctcggacagggactcgggcgccaacgggcaagtgcgctgcgccctctatgggcacgagcacttccggctgcagccggcctacgcgggcagctacctggtggtgaccgcggcgtcgctggaccgcgaacgcatcgccgagtacaacttgacgctggtggccgaggatcgcggcgcgcccccgctgcgcacagtgcggccctacacggtgcgtgtgggcgacgagaacgacaacgcgccgctcttcacgcggccggtctatgaggtgtcggtgcgcgagaacaacccgccaggcgcctacctggccacggtggccgcccgcgaccgggacctgggccgcaacggccaggtcacctaccggctgctggaggccgaggtgggccgcgccgggggcgccgtgtccacttatgtctcggtggacccagctaccggagccatctacgcgctgcgcagcttcgactatgagacgctgcgccaactcgacgttcgcatccaagctagcgacggcggctcccctcagctttccagcagcgccctagtgcaagtgcgcgtgctggaccagaacgaccatgcgccagtcctggtgcacccggcgccagccaatggctccctagaagtggcggtgcctgggcgcaccgcaaaggacacggttgtggcccgtgtgcaggcccgggatgcagacgagggagccaacggggagctggcgttcgagctgcagcagcaggagccgcgcgaagccttcgccatcggccgccgcacgggggagatactgctcaccggcgacctctcgcaggagccacccggtcgcgtgttcagggcgctcctggtcatatccgacggcggccgtcccccgctcaccaccaccgcaactgtcagcttcgtggtaacagcagggggcgggcgtgggccggctgcgcctgccagtgcaggaagcccggagcgttcccgcccgcctggctctcggctcggggtgtccgggtcggtgctgcaatgggacacgccgctgatcgtcatcatcgtgctggccgggagctgcacgctgctgctggccgccatcatcgccatcgccaccacctgcaaccgccgcaagaaggaggtgcgcaaagggggggccctccgggaagagcggcccggggcggcgggcggcggagcctcggctcccggctccccggaggaggccgcccggggagccgggcccaggcccaacatgttcgacgtgctcaccttccctggcaccggcaaagcgccctttggcagccccgcggcggacgcgcctccgcctgcggtcgccgcggccgaagtgccgggctcagagggcggcagcgccactggggaaagcgcctgtcacttcgaggggcagcagcggctccgcggcgcgcacgccgagccctacggtgcctccccgggttttggaaaggagccggcgccccctgtggcggtgtggaaaggacactccttcaacaccatttctggcagagaagcagagaagttcagcggcaaagacagcggtaaaggggacagtgatttcaacgacagcgattccgacatcagcggggacgctctgaaaaaggatctcatcaaccacatgcagagtggactgtgggcgtgcaccgctgagtgtaagatcctgggccactctgaccgctgctggagcccatcctgcagcgggcccaacgcacatccatcgcctcacccaccagcccagatgtcaaccttctgtaagagcacgtcactgcctcgggatcctctgcgcagggacaattactaccaggcccagctgcccaagacagtggggctgcagagcgtctatgagaaagtactgcacagagactatgacaggacagtcactctgctctcccctccccgtccagggaggctcccagacctgcaggagattggagtacccctctaccagtcccctcctggcaggtacctgtccccgaagaagggagccaatgaaaatgtgtaatcccatgctgcatgtcttcacacatatacaggtcactccgagaagcccctaagttattgaccggtttcagtgttgtatatataaatatgcaagatgtgccttacaatgaagttgttggaagctatttccaatcacattggtactgtttggtatttgcaaacaaaaatgtagttaatgtaatttttatgaaatgtgtgcagtatttaatttttcttatgctattgactttgatttcaattgcggcttgccattttcttagtgtttttaacctgtacattgtgtaatgtaatgtttgtatataatgaaattttgttatatttttatataataaaagctaaagtggaagttattgccaaaggaactgtctgtaagacaaaaaacaaaacatgttggaattacttaattgaaatttatctttcacctgaaacaacctagtgtttgagaaattttgccttgccaagtataacttgtatatcttgactctgtggtagatttcaagttcaatgttatttaattacatttggttttccgtaaaccgtgtcacttataagcacagtaataaaagatttgtcatgtgtttgaagaa

SEQ ID NO: 130050 - DNA, 2415 bp, Artificial Sequence
  derived and/or modified sequence
agcttctgtaagagacggagaggcgcagagtgagggcgggtccgcgcgtcctcagagcccgctggaggctcggagctgctacccgcagacttctcccgcacagggctcgcaaagagcgtgattccgagagcctgagactgacgcccgacctggaaaccagagaagacttccttagcctttcggatcgcacttgaggctggaggcatgagtcctgtgaggcgttggggcagcccctgccttttccccttgcagctcttcagcctctgctgggtgctctcagtggcccagagcaaaacagtccgatacagcaccttcgaggaggatgcccccggcacggtcatcgggaccctggccgaggacctgcatatgaaagtatcgggtgacacaagcttccgcctgatgaagcaattcaacagctctctgctccgggtgcgcgaaggcgacgggcagctgaccgtcggggacgccggcctggaccgcgagcggctgtgtggccaggccccgcagtgcgtgctggccttcgatgtggtcagcttctcgcaggagcagttccggctggtgcacgtggaggtagaggtgagggacgtcaacgaccacgcgccagtcctggtgcacccggcgccagccaatggctccctagaagtggcggtgcctgggcgcaccgcaaaggacacggttgtggcccgtgtgcaggcccgggatgcagacgagggagccaacggggagctggcgttcgagctgcagcagcaggagccgcgcgaagccttcgccatcggccgccgcacgggggagatactgctcaccggcgacctctcgcaggagccacccggtcgcgtgttcagggcgctcctggtcatatccgacggcggccgtcccccgctcaccaccaccgcaactgtcagcttcgtggtaacagcagggggcgggcgtgggccggctgcgcctgccagtgcaggaagcccggagcgttcccgcccgcctggctctcggctcggggtgtccgggtcggtgctgcaatgggacacgccgctgatcgtcatcatcgtgctggccgggagctgcacgctgctgctggccgccatcatcgccatcgccaccacctgcaaccgccgcaagaaggaggtgcgcaaagggggggccctccgggaagagcggcccggggcggcgggcggcggagcctcggctcccggctccccggaggaggccgcccggggagccgggcccaggcccaacatgttcgacgtgctcaccttccctggcaccggcaaagcgccctttggcagccccgcggcggacgcgcctccgcctgcggtcgccgcggccgaagtgccgggctcagagggcggcagcgccactggggaaagcgcctgtcacttcgaggggcagcagcggctccgcggcgcgcacgccgagccctacggtgcctccccgggttttggaaaggagccggcgccccctgtggcggtgtggaaaggacactccttcaacaccatttctggcagagaagcagagaagttcagcggcaaagacagcggtaaaggggacagtgatttcaacgacagcgattccgacatcagcggggacgctctgaaaaaggatctcatcaaccacatgcagagtggactgtgggcgtgcaccgctgagtgtaagatcctgggccactctgaccgctgctggagcccatcctgcagcgggcccaacgcacatccatcgcctcacccaccagcccagatgtcaaccttctgtaagagcacgtcactgcctcgggatcctctgcgcagggacaattactaccaggcccagctgcccaagacagtggggctgcagagcgtctatgagaaagtactgcacagagactatgacaggacagtcactctgctctcccctccccgtccagggaggctcccagacctgcaggagattggagtacccctctaccagtcccctcctggcaggtacctgtccccgaagaagggagccaatgaaaatgtgtaatcccatgctgcatgtcttcacacatatacaggtcactccgagaagcccctaagttattgaccggtttcagtgttgtatatataaatatgcaagatgtgccttacaatgaagttgttggaagctatttccaatcacattggtactgtttggtatttgcaaacaaaaatgtagttaatgtaatttttatgaaatgtgtgcagtatttaatttttcttatgctattgactttgatttcaattgcggcttgccattttcttagtgtttttaacctgtacattgtgtaatgtaatgtttgtatataatgaaattttgttatatttttatataataaaagctaaagtggaagttattgccaaaggaactgtctgtaagacaaaaaacaaaacatgttggaattacttaattgaaatttatctttca

SEQ ID NO: 130051 - DNA, 3103 bp, Artificial Sequence
  derived and/or modified sequence
agcttctgtaagagacggagaggcgcagagtgagggcgggtccgcgcgtcctcagagcccgctggaggctcggagctgctacccgcagacttctcccgcacagggctcgcaaagagcgtgattccgagagcctgagactgacgcccgacctggaaaccagagaagacttccttagcctttcggatcgcacttgaggctggaggcatgagtcctgtgaggcgttggggcagcccctgccttttccccttgcagctcttcagcctctgctgggtgctctcagtggcccagagcaaaacagtccgatacagcaccttcgaggaggatgcccccggcacggtcatcgggaccctggccgaggacctgcatatgaaagtatcgggtgacacaagcttccgcctgatgaagcaattcaacagctctctgctccgggtgcgcgaaggcgacgggcagctgaccgtcggggacgccggcctggaccgcgagcggctgtgtggccaggccccgcagtgcgtgctggccttcgatgtggtcagcttctcgcaggagcagttccggctggtgcacgtggaggtagaggtgagggacgtcaacgaccacgcgccgcgcttccccagggcccagatcccggtagaggtgtccgagggtgcggcagtgggcacgcgcatccccttggaggtgccggtggacgaggacgtgggcgccaacgggctgcagaccgtgcgcctggccgagccgcacagcccctttcgcgtggagctgcagacgcgagcggacggcgctcagtgcgcagacctggtgctgctgcaggagctggaccgcgagagccaggccgcctacagcctggagctggtggcccaggacggcggccgcccgccgcgctccgccacggctgccctcagcgtgcgcgtcctggatgcgaatgaccacagcccggccttcccgcagggcgccgtggccgaagtggagctggcggaagacgcgcccgtgggctccctgcttctcgacctggacgcagccgaccccgacgagggacctaacggcgacgtggtgttcgcatttggcgcccgcaccccgccggaggcgcgccgcctctttcggcttgacccgcgatcaggccgcctcaccctggccgggcccgtggactacgagcgtcaggacacctacgagctggacgtgcgggcgcaggaccgcggacccgggccccgcgctgccacctgcaaggtcatcgtgcgcatccgagacgtcaatgacaacgcacccgacatcgccatcaccccgctggccgccccaggcgccggcaacctcacccttcgccgcaacggccaggtcacctaccggctgctggaggccgaggtgggccgcgccgggggcgccgtgtccacttatgtctcggtggacccagctaccggagccatctacgcgctgcgcagcttcgactatgagacgctgcgccaactcgacgttcgcatccaagctagcgacggcggctcccctcagctttccagcagcgccctagtgcaagtgcgcgtgctggaccagaacgaccatgcgccagtcctggtgcacccggcgccagccaatggctccctagaagtggcggtgcctgggcgcaccgcaaaggacacggttgtggcccgtgtgcaggcccgggatgcagacgagggagccaacggggagctggcgttcgagctgcagcagcaggagccgcgcgaagccttcgccatcggccgccgcacgggggagatactgctcaccggcgacctctcgcaggagccacccggtcgcgtgttcagggcgctcctggtcatatccgacggcggccgtcccccgctcaccaccaccgcaactgtcagcttcgtggtaacagcagggggcgggcgtgggccggctgcgcctgccagtgcaggaagcccggagcgttcccgcccgcctggctctcggctcggggtgtccgggtcggtgctgcaatgggacacgccgctgatcgtcatcatcgtgctggccgggagctgcacgctgctgctggccgccatcatcgccatcgccaccacctgcaaccgccgcaagaaggaggtgcgcaaagggggggccctccgggaagagcggcccggggcggcgggcggcggagcctcggctcccggctccccggaggaggccgcccggggagccgggcccaggcccaacatgttcgacgtgctcaccttccctggcaccggcaaagcgccctttggcagccccgcggcggacgcgcctccgcctgcggtcgccgcggccgaagtgccgggctcagagggcggcagcgccactggggaaagcgcctgtcacttcgaggggcagcagcggctccgcggcgcgcacgccgagccctacggtgcctccccgggttttggaaaggagccggcgccccctgtggcggtgtggaaaggacactccttcaacaccatttctggcagagaagcagagaagttcagcggcaaagacagcggtaaaggggacagtgatttcaacgacagcgattccgacatcagcggggacgctctgaaaaaggatctcatcaaccacatgcagagtggactgtgggcgtgcaccgctgagtgtaagatcctgggccactctgaccgctgctggagcccatcctgcagcgggcccaacgcacatccatcgcctcacccaccagcccagatgtcaaccttctgtaagagcacgtcactgcctcgggatcctctgcgcagggacaattactaccaggcccagctgcccaagacagtggggctgcagagcgtctatgagaaagtactgcacagagactatgacaggacagtcactctgctctcccctccccgtccagggaggctcccagacctgcaggagattggagtacccctctaccagtcccctcctggcaggtacctgtccccgaagaagggagccaatgaaaatgtgtaatcccatgctgcatgtcttcacacatatacaggtcactccgagaagcccctaagttattgaccggtttcagtgttgtatatataaatatgcaagatgtgccttacaatgaagttgttggaagctatttccaatcacattggtactgtttggtatttgc

SEQ ID NO: 130052 - DNA, 3213 bp, Artificial Sequence
  derived and/or modified sequence
atgagccccgtgagaagatggggcagcccctgcctgttccccctgcagctgttcagcctgtgctgggtgctgagcgtggcccagagcaagaccgtgagatacagcaccttcgaggaggacgcccccggcaccgtgatcggcaccctggccgaggacctgcacatgaaggtgagcggcgacaccagcttcagactgatgaagcagttcaacagcagcctgctgagagtgagagagggcgacggccagctgaccgtgggcgacgccggcctggacagagagagactgtgcggccaggccccccagtgcgtgctggccttcgacgtggtgagcttcagccaggagcagttcagactggtgcacgtggaggtggaggtgagagacgtgaacgaccacgcccccagattccccagagcccagatccccgtggaggtgagcgagggcgccgccgtgggcaccagaatccccctggaggtgcccgtggacgaggacgtgggcgccaacggcctgcagaccgtgagactggccgagccccacagccccttcagagtggagctgcagaccagagccgacggcgcccagtgcgccgacctggtgctgctgcaggagctggacagagagagccaggccgcctacagcctggagctggtggcccaggacggcggcagaccccccagaagcgccaccgccgccctgagcgtgagagtgctggacgccaacgaccacagccccgccttcccccagggcgccgtggccgaggtggagctggccgaggacgcccccgtgggcagcctgctgctggacctggacgccgccgaccccgacgagggccccaacggcgacgtggtgttcgccttcggcgccagaaccccccccgaggccagaagactgttcagactggaccccagaagcggcagactgaccctggccggccccgtggactacgagagacaggacacctacgagctggacgtgagagcccaggacagaggccccggccccagagccgccacctgcaaggtgatcgtgagaatcagagacgtgaacgacaacgcccccgacatcgccatcacccccctggccgcccccggcgcccccgccaccagccccttcgccgccgccgccgccgccgccgccctgggcggcgccgacgccagcagccccgccggcgccggcacccccgaggccggcgccaccagcctggtgcccgagggcgccgccagagagagcctggtggccctggtgagcaccagcgacagagacagcggcgccaacggccaggtgagatgcgccctgtacggccacgagcacttcagactgcagcccgcctacgccggcagctacctggtggtgaccgccgccagcctggacagagagagaatcgccgagtacaacctgaccctggtggccgaggacagaggcgccccccccctgagaaccgtgagaccctacaccgtgagagtgggcgacgagaacgacaacgcccccctgttcaccagacccgtgtacgaggtgagcgtgagagagaacaacccccccggcgcctacctggccaccgtggccgccagagacagagacctgggcagaaacggccaggtgacctacagactgctggaggccgaggtgggcagagccggcggcgccgtgagcacctacgtgagcgtggaccccgccaccggcgccatctacgccctgagaagcttcgactacgagaccctgagacagctggacgtgagaatccaggccagcgacggcggcagcccccagctgagcagcagcgccctggtgcaggtgagagtgctggaccagaacgaccacgcccccgtgctggtgcaccccgcccccgccaacggcagcctggaggtggccgtgcccggcagaaccgccaaggacaccgtggtggccagagtgcaggccagagacgccgacgagggcgccaacggcgagctggccttcgagctgcagcagcaggagcccagagaggccttcgccatcggcagaagaaccggcgagatcctgctgaccggcgacctgagccaggagccccccggcagagtgttcagagccctgctggtgatcagcgacggcggcagaccccccctgaccaccaccgccaccgtgagcttcgtggtgaccgccggcggcggcagaggccccgccgcccccgccagcgccggcagccccgagagaagcagaccccccggcagcagactgggcgtgagcggcagcgtgctgcagtgggacacccccctgatcgtgatcatcgtgctggccggcagctgcaccctgctgctggccgccatcatcgccatcgccaccacctgcaacagaagaaagaaggaggtgagaaagggcggcgccctgagagaggagagacccggcgccgccggcggcggcgccagcgcccccggcagccccgaggaggccgccagaggcgccggccccagacccaacatgttcgacgtgctgaccttccccggcaccggcaaggcccccttcggcagccccgccgccgacgcccccccccccgccgtggccgccgccgaggtgcccggcagcgagggcggcagcgccaccggcgagagcgcctgccacttcgagggccagcagagactgagaggcgcccacgccgagccctacggcgccagccccggcttcggcaaggagcccgccccccccgtggccgtgtggaagggccacagcttcaacaccatcagcggcagagaggccgagaagttcagcggcaaggacagcggcaagggcgacagcgacttcaacgacagcgacagcgacatcagcggcgacgccctgaagaaggacctgatcaaccacatgcagagcggcctgtgggcctgcaccgccgagtgcaagatcctgggccacagcgacagatgctggagccccagctgcagcggccccaacgcccaccccagcccccacccccccgcccagatgagcaccttctgcaagagcaccagcctgcccagagaccccctgagaagagacaactactaccaggcccagctgcccaagaccgtgggcctgcagagcgtgtacgagaaggtgctgcacagagactacgacagaaccgtgaccctgctgagcccccccagacccggcagactgcccgacctgcaggagatcggcgtgcccctgtaccagagcccccccggcagatacctgagccccaagaagggcgccaacgagaacgtgtag

SEQ ID NO: 130053 - DNA, 1791 bp, Artificial Sequence
  derived and/or modified sequence
atgagccccgtgagaagatggggcagcccctgcctgttccccctgcagctgttcagcctgtgctgggtgctgagcgtggcccagagcaagaccgtgagatacagcaccttcgaggaggacgcccccggcaccgtgatcggcaccctggccgaggacctgcacatgaaggtgagcggcgacaccagcttcagactgatgaagcagttcaacagcagcctgctgagagtgagagagggcgacggccagctgaccgtgggcgacgccggcctggacagagagagactgtgcggccaggccccccagtgcgtgctggccttcgacgtggtgagcttcagccaggagcagttcagactggtgcacgtggaggtggaggtgagagacgtgaacgaccacgcccccgtgctggtgcaccccgcccccgccaacggcagcctggaggtggccgtgcccggcagaaccgccaaggacaccgtggtggccagagtgcaggccagagacgccgacgagggcgccaacggcgagctggccttcgagctgcagcagcaggagcccagagaggccttcgccatcggcagaagaaccggcgagatcctgctgaccggcgacctgagccaggagccccccggcagagtgttcagagccctgctggtgatcagcgacggcggcagaccccccctgaccaccaccgccaccgtgagcttcgtggtgaccgccggcggcggcagaggccccgccgcccccgccagcgccggcagccccgagagaagcagaccccccggcagcagactgggcgtgagcggcagcgtgctgcagtgggacacccccctgatcgtgatcatcgtgctggccggcagctgcaccctgctgctggccgccatcatcgccatcgccaccacctgcaacagaagaaagaaggaggtgagaaagggcggcgccctgagagaggagagacccggcgccgccggcggcggcgccagcgcccccggcagccccgaggaggccgccagaggcgccggccccagacccaacatgttcgacgtgctgaccttccccggcaccggcaaggcccccttcggcagccccgccgccgacgcccccccccccgccgtggccgccgccgaggtgcccggcagcgagggcggcagcgccaccggcgagagcgcctgccacttcgagggccagcagagactgagaggcgcccacgccgagccctacggcgccagccccggcttcggcaaggagcccgccccccccgtggccgtgtggaagggccacagcttcaacaccatcagcggcagagaggccgagaagttcagcggcaaggacagcggcaagggcgacagcgacttcaacgacagcgacagcgacatcagcggcgacgccctgaagaaggacctgatcaaccacatgcagagcggcctgtgggcctgcaccgccgagtgcaagatcctgggccacagcgacagatgctggagccccagctgcagcggccccaacgcccaccccagcccccacccccccgcccagatgagcaccttctgcaagagcaccagcctgcccagagaccccctgagaagagacaactactaccaggcccagctgcccaagaccgtgggcctgcagagcgtgtacgagaaggtgctgcacagagactacgacagaaccgtgaccctgctgagcccccccagacccggcagactgcccgacctgcaggagatcggcgtgcccctgtaccagagcccccccggcagatacctgagccccaagaagggcgccaacgagaacgtgtag

SEQ ID NO: 130054 - DNA, 2742 bp, Artificial Sequence
  derived and/or modified sequence
atgagccccgtgagaagatggggcagcccctgcctgttccccctgcagctgttcagcctgtgctgggtgctgagcgtggcccagagcaagaccgtgagatacagcaccttcgaggaggacgcccccggcaccgtgatcggcaccctggccgaggacctgcacatgaaggtgagcggcgacaccagcttcagactgatgaagcagttcaacagcagcctgctgagagtgagagagggcgacggccagctgaccgtgggcgacgccggcctggacagagagagactgtgcggccaggccccccagtgcgtgctggccttcgacgtggtgagcttcagccaggagcagttcagactggtgcacgtggaggtggaggtgagagacgtgaacgaccacgcccccagattccccagagcccagatccccgtggaggtgagcgagggcgccgccgtgggcaccagaatccccctggaggtgcccgtggacgaggacgtgggcgccaacggcctgcagaccgtgagactggccgagccccacagccccttcagagtggagctgcagaccagagccgacggcgcccagtgcgccgacctggtgctgctgcaggagctggacagagagagccaggccgcctacagcctggagctggtggcccaggacggcggcagaccccccagaagcgccaccgccgccctgagcgtgagagtgctggacgccaacgaccacagccccgccttcccccagggcgccgtggccgaggtggagctggccgaggacgcccccgtgggcagcctgctgctggacctggacgccgccgaccccgacgagggccccaacggcgacgtggtgttcgccttcggcgccagaaccccccccgaggccagaagactgttcagactggaccccagaagcggcagactgaccctggccggccccgtggactacgagagacaggacacctacgagctggacgtgagagcccaggacagaggccccggccccagagccgccacctgcaaggtgatcgtgagaatcagagacgtgaacgacaacgcccccgacatcgccatcacccccctggccgcccccggcgccggcaacctgaccctgagaagaaacggccaggtgacctacagactgctggaggccgaggtgggcagagccggcggcgccgtgagcacctacgtgagcgtggaccccgccaccggcgccatctacgccctgagaagcttcgactacgagaccctgagacagctggacgtgagaatccaggccagcgacggcggcagcccccagctgagcagcagcgccctggtgcaggtgagagtgctggaccagaacgaccacgcccccgtgctggtgcaccccgcccccgccaacggcagcctggaggtggccgtgcccggcagaaccgccaaggacaccgtggtggccagagtgcaggccagagacgccgacgagggcgccaacggcgagctggccttcgagctgcagcagcaggagcccagagaggccttcgccatcggcagaagaaccggcgagatcctgctgaccggcgacctgagccaggagccccccggcagagtgttcagagccctgctggtgatcagcgacggcggcagaccccccctgaccaccaccgccaccgtgagcttcgtggtgaccgccggcggcggcagaggccccgccgcccccgccagcgccggcagccccgagagaagcagaccccccggcagcagactgggcgtgagcggcagcgtgctgcagtgggacacccccctgatcgtgatcatcgtgctggccggcagctgcaccctgctgctggccgccatcatcgccatcgccaccacctgcaacagaagaaagaaggaggtgagaaagggcggcgccctgagagaggagagacccggcgccgccggcggcggcgccagcgcccccggcagccccgaggaggccgccagaggcgccggccccagacccaacatgttcgacgtgctgaccttccccggcaccggcaaggcccccttcggcagccccgccgccgacgcccccccccccgccgtggccgccgccgaggtgcccggcagcgagggcggcagcgccaccggcgagagcgcctgccacttcgagggccagcagagactgagaggcgcccacgccgagccctacggcgccagccccggcttcggcaaggagcccgccccccccgtggccgtgtggaagggccacagcttcaacaccatcagcggcagagaggccgagaagttcagcggcaaggacagcggcaagggcgacagcgacttcaacgacagcgacagcgacatcagcggcgacgccctgaagaaggacctgatcaaccacatgcagagcggcctgtgggcctgcaccgccgagtgcaagatcctgggccacagcgacagatgctggagccccagctgcagcggccccaacgcccaccccagcccccacccccccgcccagatgagcaccttctgcaagagcaccagcctgcccagagaccccctgagaagagacaactactaccaggcccagctgcccaagaccgtgggcctgcagagcgtgtacgagaaggtgctgcacagagactacgacagaaccgtgaccctgctgagcccccccagacccggcagactgcccgacctgcaggagatcggcgtgcccctgtaccagagcccccccggcagatacctgagccccaagaagggcgccaacgagaacgtgtag

SEQ ID NO: 130055 - protein, 622 aa, Artificial Sequence
  derived and/or modified sequence
MPPQLQNGLNLSAKVVQGSLDSLPQAVREFLENNAELCQPDHIHICDGSEEENGRLLGQMEEEGILRRLKKYDNCWLALTDPRDVARIESKTVIVTQEQRDTVPIPKTGLSQLGRWMSEEDFEKAFNARFPGCMKGRTMYVIPFSMGPLGSPLSKIGIELTDSPYVVASMRIMTRMGTPVLEAVGDGEFVKCLHSVGCPLPLQKPLVNNWPCNPELTLIAHLPDRREIISFGSGYGGNSLLGKKCFALRMASRLAKEEGWLAEHMLILGITNPEGEKKYLAAAFPSACGKTNLAMMNPSLPGWKVECVGDDIAWMKFDAQGHLRAINPENGFFGVAPGTSVKTNPNAIKTIQKNTIFTNVAETSDGGVYWEGIDEPLASGVTITSWKNKEWSSEDGEPCAHPNSRFCTPASQCPIIDAAWESPEGVPIEGIIFGGRRPAGVPLVYEALSWQHGVFVGAAMRSEATAAAEHKGKIIMHDPFAMRPFFGYNFGKYLAHWLSMAQHPAAKLPKIFHVNWFRKDKEGKFLWPGFGENSRVLEWMFNRIDGKASTKLTPIGYIPKEDALNLKGLGHINMMELFSISKEFWEKEVEDIEKYLEDQVNADLPCEIEREILALKQRISQM

SEQ ID NO: 130056 - protein, 304 aa, Artificial Sequence
  derived and/or modified sequence
TTGHLRAINPENGFFGVAPGTSVKTNPNAIKTIQKNTIFTNVAETSDGGVYWEGIDEPLASGVTITSWKNKEWSSEDGEPCAHPNSRFCTPASQCPIIDAAWESPEGVPIEGIIFGGRRPAGVPLVYEALSWQHGVFVGAAMRSEATAAAEHKGKIIMHDPFAMRPFFGYNFGKYLAHWLSMAQHPAAKLPKIFHVNWFRKDKEGKFLWPGFGENSRVLEWMFNRIDGKASTKLTPIGYIPKEDALNLKGLGHINMMELFSISKEFWEKEVEDIEKYLEDQVNADLPCEIEREILALKQRISQM

SEQ ID NO: 130057 - protein, 305 aa, Artificial Sequence
  derived and/or modified sequence
MTTGHLRAINPENGFFGVAPGTSVKTNPNAIKTIQKNTIFTNVAETSDGGVYWEGIDEPLASGVTITSWKNKEWSSEDGEPCAHPNSRFCTPASQCPIIDAAWESPEGVPIEGIIFGGRRPAGVPLVYEALSWQHGVFVGAAMRSEATAAAEHKGKIIMHDPFAMRPFFGYNFGKYLAHWLSMAQHPAAKLPKIFHVNWFRKDKEGKFLWPGFGENSRVLEWMFNRIDGKASTKLTPIGYIPKEDALNLKGLGHINMMELFSISKEFWEKEVEDIEKYLEDQVNADLPCEIEREILALKQRISQM

SEQ ID NO: 130058 - DNA, 1869 bp, Artificial Sequence
  derived and/or modified sequence
atgccgcctcagctgcagaacggccttaatctgtccgccaaagtggtgcaggggtccctggattcactgccacaagccgtacgggaattcctggagaacaatgcggagttgtgtcagccagatcatatacacatctgcgatgggtcagaagaggagaacggacggctgctggggcagatggaggaagagggcatcctccggcgtctgaagaagtacgacaattgctggctggccctaactgatcccagagatgtcgcgcgcatcgaatccaaaacagtgatcgtcacgcaggagcagagggacactgtgcccatcccaaagacagggctgtctcagttgggccgctggatgagcgaagaagatttcgaaaaggcattcaacgcacgttttcccggatgcatgaaggggcgcaccatgtatgtcattccctttagtatgggcccgctgggatcacccctctccaagattggtattgagctgaccgacagtccgtacgttgtcgccagtatgcggatcatgactcggatggggacgccagttttggaggcagtcggggatggagagtttgtgaagtgtttacactccgtgggatgtccactgcctttgcaaaagccactggtgaacaactggccctgcaaccctgagcttacgcttattgcccacttacccgaccgccgcgaaattatctccttcgggtccgggtatgggggcaactctcttttaggaaagaagtgctttgccctgagaatggcctcacggttggcaaaagaggaaggctggcttgccgaacacatgctgattctgggtatcacaaaccccgagggggaaaagaaatatttagctgcagcctttccctcagcttgcgggaaaacaaacctggcaatgatgaacccaagccttccgggctggaaggtggagtgcgtgggagatgacattgcctggatgaagtttgacgcccaaggacacctgagggccattaatcccgagaacggcttcttcggcgtggcccctgggacttcagttaaaaccaatcccaatgccataaagaccattcaaaagaacaccattttcactaatgtggcggagaccagtgacgggggggtgtattgggaggggatcgacgagccgctggcttctggagtgacaattaccagttggaaaaacaaggaatggtctagcgaggatggagaaccttgcgcacaccctaattctagattctgcactcctgcctcccaatgtccaatcattgacgcggcctgggagagccccgagggggtgccgatagagggcataatattcggaggcaggcggcctgccggagtgccacttgtatatgaggcgctgagctggcaacacggcgttttcgtgggggcggccatgagaagtgaagccaccgccgccgccgaacacaagggtaaaattattatgcacgatcccttcgccatgcggcctttcttcggctacaactttggtaagtatcttgcacactggctgagcatggctcagcatccagcagcgaaactgcctaagatcttccatgtaaactggtttagaaaagataaagaaggaaagtttctatggcctggatttggagagaatagcagggttttggagtggatgttcaaccgcatagacgggaaggcatcaacaaaactcaccccaatcggttatatacctaaggaagatgcactgaacctcaaaggtctcggacatataaatatgatggagctcttctcaatctctaaagaattctgggaaaaggaagtcgaagatatcgaaaagtacctggaagatcaagtgaatgccgacctgccctgcgaaattgagcgagagatacttgccctgaaacagagaataagccagatgtag

SEQ ID NO: 130059 - DNA, 1869 bp, Artificial Sequence
  derived and/or modified sequence
atgccaccccagctgcagaatggcctgaacctgagcgccaaggtggtgcagggcagcctggacagcctgccccaggccgtgcgggagttcctggagaacaatgctgagctgtgccagcctgaccacatccacatctgtgatggcagcgaggaggagaatggccgcctgctgggccagatggaggaggagggcatcctgcggcggctgaagaagtatgacaactgctggctggccctgacagaccccagagatgtggcccgcatcgagagcaagacagtcatcgtgacccaggagcagagggacacagtgcccatccccaagacaggcctgagccagctgggccgctggatgtctgaggaggactttgagaaggccttcaatgcccgcttccctggctgcatgaagggccgcaccatgtatgtgatccccttctccatgggccccctgggcagccccctgagcaagattggcatcgagctgacagacagcccctacgtggtggcctccatgaggatcatgaccaggatgggcacccctgtgctggaggccgtgggagatggagaatttgtgaagtgcctgcacagcgtgggctgccccctgcccctgcagaagcccctggtgaacaactggccctgcaaccctgagctgaccctgattgcccacctgcctgacagaagagagatcatcagctttggaagtggctatggaggcaacagcctgctgggcaagaagtgctttgccctgaggatggccagccggctggccaaggaggagggctggctggccgagcacatgctgatcctgggcatcaccaaccctgagggggagaagaagtacctggccgccgccttccccagcgcctgtgggaagaccaacctggccatgatgaaccccagcctgcccggctggaaggtggagtgtgtgggagatgacatcgcctggatgaagtttgatgcccagggccacctgcgggccatcaacccagaaaatggcttctttggagtggcccctggcacctctgtgaagaccaaccccaatgccatcaagaccatccagaagaacaccatcttcaccaacgtggccgagaccagtgatggaggagtgtactgggagggcattgatgagcccctggccagcggcgtgaccatcacctcctggaagaacaaggagtggagcagtgaagatggagagccctgtgcccaccccaacagccgcttctgcaccccagccagccagtgccccatcattgatgctgcctgggagagccctgagggcgtgcccatcgagggcatcatctttggaggccggcggcctgctggggtgcccctggtgtatgaggccctgtcctggcagcacggcgtgtttgtgggcgccgccatgaggtctgaggccacagctgctgctgagcacaagggcaagatcatcatgcatgacccctttgccatgaggcccttcttcggctacaactttgggaagtacctggcccactggctgtccatggcccagcaccctgctgccaagctgcccaagatcttccacgtgaactggttcaggaaggacaaggagggcaagttcctgtggccaggctttggagagaacagccgggtgctggagtggatgttcaacagaattgatggcaaggccagcaccaagctgacccccatcggctacatccccaaggaggatgccctgaacctgaagggcctgggccacatcaacatgatggagctgttcagcatcagcaaggagttctgggagaaggaggtggaggacatcgagaagtacctggaggaccaggtgaatgctgacctgccctgtgaaattgaaagagagatcctggccctgaagcagaggatcagccagatgtag

SEQ ID NO: 130060 - DNA, 1869 bp, Artificial Sequence
  derived and/or modified sequence
atgcccccccagctgcagaacggcctgaacctgagcgccaaggtggtccagggctcactcgactctcttccccaggcagtgcgggagtttctggaaaacaacgctgagctgtgtcagccagaccacattcacatctgcgacgggagcgaagaggagaacgggcggctactgggacaaatggaagaagagggcatattgcggcggctcaaaaaatatgacaactgctggttagccctcaccgacccccgagacgtagcccgtatcgagagcaaaacagttatcgtgacacaggagcagcgagatacagtcccaattcctaagacagggctttcccaattgggccgatggatgtccgaggaggattttgaaaaggcttttaacgcacggtttcccggctgcatgaaagggcgcacgatgtacgtgatcccgttcagtatgggcccactgggctcacccctgtctaaaattgggattgaattaaccgactctccctacgtcgtcgcctccatgaggatcatgacccggatgggaactcctgtgctggaagctgttggcgacggcgagttcgtcaagtgcctgcacagtgttggctgtcccctccctcttcagaagccactcgttaacaactggccatgcaacccagaacttactcttatcgcccacctccctgatcgtagagagataatctccttcgggtccggttatggcggcaactccttacttggaaaaaagtgttttgcacttcgtatggcctcccgcctcgccaaggaggaaggttggctggctgaacacatgcttatcctggggattactaatccagaaggggagaaaaaatatctggctgcagccttccccagtgcgtgtggtaaaaccaatctggccatgatgaatccctcacttcctggctggaaagtggagtgcgttggggacgatattgcctggatgaagtttgacgctcaaggccacctgcgcgccataaatcccgaaaacggctttttcggagttgcacccggaacgtcagtgaagactaatcctaatgctatcaagactattcagaaaaacacaattttcaccaacgttgccgaaacttctgacggtggagtttactgggaggggatcgacgagcctctggcttctggcgtgaccatcacctcttggaaaaacaaggaatggagctcagaggacggggagccatgtgcacatcccaactctaggttttgtacaccagcctcccagtgtccaattatagacgcagcttgggagtctccagaaggggtacccatcgagggtattatatttggcggccgccggccggccggtgttcccctcgtgtacgaagcactgagttggcagcacggagtcttcgttggtgccgctatgcggagcgaagcgacagcagccgccgagcataaaggtaaaatcatcatgcatgatccattcgccatgcggcccttttttggctacaacttcggaaaatacctagctcattggctgtcaatggcacagcaccccgccgccaagctccctaagattttccacgttaattggttccggaaagataaagagggcaaatttctgtggccgggttttggggagaattctcgggtcctagagtggatgttcaaccgcattgatggaaaggcctctaccaagctgacacctattggctatatcccaaaagaagacgccctcaacctgaagggactaggccacatcaacatgatggaactgttctccatttcaaaggaattttgggaaaaggaggtggaggatatcgaaaagtaccttgaagatcaagttaatgccgaccttccatgcgaaatcgaacgtgaaattcttgccctaaagcagcgcatttcccagatgtag

SEQ ID NO: 130061 - DNA, 2686 bp, Artificial Sequence
  derived and/or modified sequence
atttaaagctgggaggttctgccaccaagcacggccttcccactgggaacacaaacttgctggcgggaagagcccggaaagaaacctgtggatctcccttcgagatcatccaaagagaagaaaggtgacctcacattcgtgccccttagcagcactctgcagaaatgcctcctcagctgcaaaacggcctgaacctctcggccaaagttgtccagggaagcctggacagcctaccccaggcagtgagggagtttctcgagaataacgctgagctgtgtcagcctgatcacatccacatctgtgacggctctgaggaggagaatgggcggcttctgggccagatggaggaagagggcatcctcaggcggctgaagaagtatgacaactgctggttggctctcactgaccccagggatgtggccaggatcgaaagcaagacggttatcgtcacccaagagcaaagagacacagtgcccatccccaaaacaggcctcagccagctcggtcgctggatgtcagaggaggattttgagaaagcgttcaatgccaggttcccagggtgcatgaaaggtcgcaccatgtacgtcatcccattcagcatggggccgctgggctcgcctctgtcaaagatcggcatcgagctgacggattcaccctacgtggtggccagcatgcggatcatgacgcggatgggcacgcccgtcctggaagcagtgggcgatggggagtttgtcaaatgcctccattctgtggggtgccctctgcctttacaaaagcctttggtcaacaactggccctgcaacccggagctgacgctcatcgcccacctgcctgaccgcagagagatcatctcctttggcagtgggtacggcgggaactcgctgctcgggaagaagtgctttgctctcaggatggccagccggctggccaaggaggaagggtggctggcagagcacatgctgattctgggtataaccaaccctgagggtgagaagaagtacctggcggccgcatttcccagcgcctgcgggaagaccaacctggccatgatgaaccccagcctccccgggtggaaggttgagtgcgtcggggatgacattgcctggatgaagtttgacgcacaaggtcatttaagggccatcaacccagaaaatggctttttcggtgtcgctcctgggacttcagtgaagaccaaccccaatgccatcaagaccatccagaagaacacaatctttaccaatgtggccgagaccagcgacgggggcgtttactgggaaggcattgatgagccgctagcttcaggtgtcaccatcacgtcctggaagaataaggagtggagctcagaggatggggaaccttgtgcccaccccaactcgaggttctgcacccctgccagccagtgccccatcattgatgctgcctgggagtctccggaaggtgttcccattgaaggcattatctttggaggccgtagacctgctggtgtccctctagtctatgaagctctcagctggcaacatggagtctttgtgggggcggccatgagatcagaggccacagcggctgcagaacataaaggcaaaatcatcatgcatgacccctttgccatgcggcccttctttggctacaacttcggcaaatacctggcccactggcttagcatggcccagcacccagcagccaaactgcccaagatcttccatgtcaactggttccggaaggacaaggaaggcaaattcctctggccaggctttggagagaactccagggtgctggagtggatgttcaaccggatcgatggaaaagccagcaccaagctcacgcccataggctacatccccaaggaggatgccctgaacctgaaaggcctggggcacatcaacatgatggagcttttcagcatctccaaggaattctgggagaaggaggtggaagacatcgagaagtatctggaggatcaagtcaatgccgacctcccctgtgaaatcgagagagagatccttgccttgaagcaaagaataagccagatgtaatcagggcctgagtgctttacctttaaaatcattccctttcccatccataaggtgcagtaggagcaagagagggcaagtgttcccaaattgacgccaccataataatcatcaccacaccgtgagcagatctgaaaggcacactttgatttttttaaggataagaaccacagaacactgggtagtagctaatgaaattgagaagggaaatcttagcatgcctccaaaaattcacatccaatgcatagtttgttcaaatttaaggttactcaggcattgatcttttcagtgttttttcactttagctatgtggattagctagaatgcacaccaaaaaaatacttgagctgtatatatatatgtgtgtgtgtgtgtgtgtgtgtgtgtgtgtgtgtgcatgtatgtgcacatgtgtctgtgtggtatatttgtgtatgtgtatttgtatgtactgttattgaaaatatatttaatacctttggaaaaatcttgggcaagatgacctactagttttccttgaaaaaaagttgctttgttattaatattgtgcttaaattatttttatacaccattgttccttacctttacataattgcaatatttcccccttactacttcttggaaaaaaattacaaaatgaagttttatagaaaaga

SEQ ID NO: 130062 - DNA, 1869 bp, Artificial Sequence
  derived and/or modified sequence
atgccaccccagttgcagaacggcttgaatctaagcgcaaaagtagtgcagggctccctggactcattgcctcaggccgtgagagagttcctggagaataacgccgagctttgtcagccggatcacatccacatctgtgacggcagcgaggaagaaaacgggcgtttgcttggccagatggaggaggaaggcatccttcggaggctgaaaaagtatgataactgctggctcgccctaaccgacccaagggacgtggccagaattgagtccaaaacggttatcgtgacgcaggagcaacgtgacacagtgcccatccccaagaccggcctttcacagctggggagatggatgtccgaggaggactttgagaaagccttcaacgccagattcccgggttgtatgaagggcagaaccatgtatgtgattcctttttccatgggtcctctgggtagtccgcttagtaagataggaatcgagttaacggatagcccctatgttgtggctagcatgcgcattatgacacggatgggcaccccggtactggaggccgttggcgacggcgagtttgtgaaatgccttcactcagtgggttgcccactgccactccagaagcccctcgtcaacaactggccctgtaatcccgaactgacactgatcgctcatctgccagaccgccgagaaattatcagttttggttccggctatgggggtaattcactcctgggaaaaaaatgctttgctctgcgcatggccagcagactggcaaaggaggaagggtggctagcagaacacatgctgatattaggtataactaatccagagggagaaaaaaaatatttagccgctgcctttcccagcgcctgtgggaaaacgaatctagccatgatgaatccctcgttgcctggctggaaggtggagtgcgtgggggatgatattgcatggatgaagtttgatgcgcaggggcacctcagagctattaatccagaaaatggattctttggtgtggcccctggaaccagcgtgaaaacgaaccccaatgccattaaaactattcagaagaatacaatctttactaacgttgccgaaaccagcgacggcggagtgtattgggaaggaattgatgagcctttagcttccggagtaacaatcaccagttggaagaacaaggaatggtcttccgaggatggtgagccttgcgcgcatccgaattccaggttttgtactcctgcgagtcagtgtcctatcattgatgcggcatgggagtctcctgagggcgtgcctatcgaaggtataatttttgggggaaggagacctgccggagtgccacttgtgtatgaagccctcagttggcaacacggcgtgtttgtgggggcagcaatgcgctcagaagccacagctgcagccgaacataagggcaagattatcatgcatgatccttttgccatgcgacccttctttggctacaacttcggcaagtacctcgcccactggttatccatggcccagcacccagctgccaaacttcctaagatattccacgttaattggttcaggaaggacaaggaagggaaatttctttggccagggttcggtgagaactctcgggtactagagtggatgttcaatcggatcgacggcaaggcgtccaccaagctgacgcccataggctatatacctaaagaagatgcacttaacctgaaaggactcggacatattaacatgatggagctgtttagcatttcaaaagaattttgggagaaggaagttgaggacatcgagaagtatcttgaggaccaggttaacgcagacctgccgtgcgaaatcgagcgcgaaattttggccttaaaacagagaatcagccaaatgtag

SEQ ID NO: 130063 - DNA, 1869 bp, Artificial Sequence
  derived and/or modified sequence
atgcccccccagctgcagaacggcctgaacctgagcgccaaggtggtgcagggcagcctggacagcctgccccaggccgtgagagagttcctggagaacaacgccgagctgtgccagcccgaccacatccacatctgcgacggcagcgaggaggagaacggcagactgctgggccagatggaggaggagggcatcctgagaagactgaagaagtacgacaactgctggctggccctgaccgaccccagagacgtggccagaatcgagagcaagaccgtgatcgtgacccaggagcagagagacaccgtgcccatccccaagaccggcctgagccagctgggcagatggatgagcgaggaggacttcgagaaggccttcaacgccagattccccggctgcatgaagggcagaaccatgtacgtgatccccttcagcatgggccccctgggcagccccctgagcaagatcggcatcgagctgaccgacagcccctacgtggtggccagcatgagaatcatgaccagaatgggcacccccgtgctggaggccgtgggcgacggcgagttcgtgaagtgcctgcacagcgtgggctgccccctgcccctgcagaagcccctggtgaacaactggccctgcaaccccgagctgaccctgatcgcccacctgcccgacagaagagagatcatcagcttcggcagcggctacggcggcaacagcctgctgggcaagaagtgcttcgccctgagaatggccagcagactggccaaggaggagggctggctggccgagcacatgctgatcctgggcatcaccaaccccgagggcgagaagaagtacctggccgccgccttccccagcgcctgcggcaagaccaacctggccatgatgaaccccagcctgcccggctggaaggtggagtgcgtgggcgacgacatcgcctggatgaagttcgacgcccagggccacctgagagccatcaaccccgagaacggcttcttcggcgtggcccccggcaccagcgtgaagaccaaccccaacgccatcaagaccatccagaagaacaccatcttcaccaacgtggccgagaccagcgacggcggcgtgtactgggagggcatcgacgagcccctggccagcggcgtgaccatcaccagctggaagaacaaggagtggagcagcgaggacggcgagccctgcgcccaccccaacagcagattctgcacccccgccagccagtgccccatcatcgacgccgcctgggagagccccgagggcgtgcccatcgagggcatcatcttcggcggcagaagacccgccggcgtgcccctggtgtacgaggccctgagctggcagcacggcgtgttcgtgggcgccgccatgagaagcgaggccaccgccgccgccgagcacaagggcaagatcatcatgcacgaccccttcgccatgagacccttcttcggctacaacttcggcaagtacctggcccactggctgagcatggcccagcaccccgccgccaagctgcccaagatcttccacgtgaactggttcagaaaggacaaggagggcaagttcctgtggcccggcttcggcgagaacagcagagtgctggagtggatgttcaacagaatcgacggcaaggccagcaccaagctgacccccatcggctacatccccaaggaggacgccctgaacctgaagggcctgggccacatcaacatgatggagctgttcagcatcagcaaggagttctgggagaaggaggtggaggacatcgagaagtacctggaggaccaggtgaacgccgacctgccctgcgagatcgagagagagatcctggccctgaagcagagaatcagccagatgtag

SEQ ID NO: 130064 - protein, 449 aa, Artificial Sequence
  derived and/or modified sequence
MLPAATASLLGPLLTACALLPFAQGQTPNYTRPVFLCGGDVKGESGYVASEGFPNLYPPNKECIWTITVPEGQTVSLSFRVFDLELHPACRYDALEVFAGSGTSGQRLGRFCGTFRPAPLVAPGNQVTLRMTTDEGTGGRGFLLWYSGRATSGTEHQFCGGRLEKAQGTLTTPNWPESDYPPGISCSWHIIAPPDQVIALTFEKFDLEPDTYCRYDSVSVFNGAVSDDSRRLGKFCGDAVPGSISSEGNELLVQFVSDLSVTADGFSASYKTLPRGTAKEGQGPGPKRGTEPKVKLPPKSQPPEKTEESPSAPDAPTCPKQCRRTGTLQSNFCASSLVVTATVKSMVREPGEGLAVTVSLIGAYKTGGLDLPSPPTGASLKFYVPCKQCPPMKKGVSYLLMGQVEENRGPVLPPESFVVLHRPNQDQILTNLSKRKCPSQPVRAAASQD

SEQ ID NO: 130065 - DNA, 1350 bp, Artificial Sequence
  derived and/or modified sequence
atgctgcccgcagccactgcttccctattgggacctcttcttacagcatgcgcactgttaccattcgcccagggacagacacccaattacacccgccccgttttcctgtgcggcggggatgttaaaggggagagcggctatgttgcctccgagggctttccaaacctctacccgcctaataaagagtgcatttggacaatcaccgtcccagagggccaaactgtgagcttaagcttccgcgtgttcgatctggaattgcatcccgcttgcaggtacgacgccttagaagtgtttgcagggtccgggactagcggccaacggttaggccggttttgcggaacttttagaccggccccactagtggcacctggtaatcaggtgaccctaagaatgactacagatgaggggaccggcgggaggggatttttactgtggtactccgggagggccacaagtggcactgagcaccagttctgtggaggtcgtctcgagaaggctcagggcaccctcaccacccccaactggcctgagagtgattacccccccggtattagctgctcatggcacataattgcgccacccgatcaggttattgccttgactttcgagaagttcgatctggagcctgacacctactgtcgctacgactcagtttctgtgtttaacggggcagtctctgacgactctcggaggctggggaagttctgtggtgacgctgtgcccggctctatcagttccgaagggaatgaactcctcgtgcagttcgttagcgatctctccgtgacggccgatggcttttccgcatcttataagactctgcccagaggaacagctaaagagggccagggaccaggaccgaagagaggaacagaacctaaggttaaactgccacccaaaagccagccacctgaaaaaacggaggaaagcccaagtgccccggacgcgcccacctgtccaaagcagtgtcgtcgcacgggcaccctgcagtccaatttttgcgcttcgtcattggtcgtgacggccaccgtgaagagcatggtgagagaaccgggggagggactggcagtcacggtttccttgataggagcctacaagacaggaggcctggaccttccatctcctcccacgggcgcatccctgaaattttatgtaccatgtaagcagtgcccgcctatgaagaaaggtgtctcttatttacttatgggacaggtggaggagaacaggggcccagtgctgccacctgagagtttcgttgtgctgcaccgccccaatcaggaccagatcctgacaaacctaagtaagcgcaagtgtccctctcaacccgtgagggcagccgcctcacaggattag

SEQ ID NO: 130066 - DNA, 1350 bp, Artificial Sequence
  derived and/or modified sequence
atgctgcctgctgccacagccagcctgctgggccccctgctgacagcctgtgccctgctgccctttgcccagggccagacccccaactacaccaggcctgtgttcctgtgtggaggagatgtgaagggggagagcggctacgtggccagcgagggcttccccaacctgtacccacccaacaaggagtgcatctggaccatcaccgtgcctgagggccagacagtgtccctgtccttccgggtgtttgacctggagctgcacccagcctgccgctatgatgccctggaggtgtttgctggcagcggcaccagcggccagaggctgggccgcttctgtggcaccttccggcctgcccccctggtggcccctggcaaccaggtgaccctgaggatgaccacagatgagggcactggaggccggggcttcctgctgtggtacagcggccgggccaccagcggcacagagcaccagttctgtggcggccgcctggagaaggcccagggcaccctgaccacccccaactggccagagagtgactacccacctggcatcagctgctcctggcacatcatcgcccccccagaccaggtgattgccctgacctttgagaagtttgacctggagccagacacctactgccgctatgattctgtgtctgtgttcaacggggctgtgtctgatgacagccggcggctgggcaagttctgtggagatgctgtgcccggcagcatcagcagcgagggcaatgagctgctggtgcagtttgtgtctgacctgtctgtgacagcagatggcttcagcgccagctacaagaccctgccccggggcacagccaaggagggccagggccctggccccaagaggggcacagagcccaaggtgaagctgccccccaagagccagcccccagagaagacagaggagagccccagcgccccagatgcccccacctgccccaagcagtgcagaagaacaggcaccctgcagagcaacttctgtgccagcagcctggtggtgacagccaccgtgaagtccatggtgcgggagcccggggagggcctggccgtgacagtgtccctgattggagcctacaagacaggaggcctggacctgcccagcccccccaccggggccagcctgaagttctacgtgccctgcaagcagtgcccccccatgaagaagggcgtgtcctacctgctgatgggccaggtggaggagaacagaggccctgtgctgcccccagagagctttgtggtgctgcaccggcccaaccaggaccagatcctgaccaacctgagcaagaggaagtgccccagccagcctgtgcgggctgctgccagccaggactag

SEQ ID NO: 130067 - DNA, 1350 bp, Artificial Sequence
  derived and/or modified sequence
atgctgcccgccgccaccgccagcctgctgggccccctgctgaccgcttgcgcactcctgccattcgcacagggacagactccaaattataccaggcccgtctttctctgtggtggtgatgtgaaaggggaatctggatacgtggcttccgaggggttcccaaacttgtatccgccaaacaaagagtgcatttggactattacggttccagagggtcaaacagtgagcttgagcttccgggtgttcgacttagaacttcacccggcctgtagatatgatgccctggaggtgtttgcgggctccggcacctctggtcagcggctgggaagattctgtggcacattccggccagcgcctcttgtggcaccaggtaaccaagttaccctaaggatgactactgatgaaggaacaggtggcagaggctttctcctctggtacagcggaagagctacatccgggactgagcaccagttttgcggcggacgattagagaaggcacaggggactctaaccacacctaactggcccgagtctgattatcccccgggaattagttgttcctggcacatcattgctcctccagaccaggtaatcgcactcacgtttgaaaagtttgacctcgaacccgatacatattgcaggtacgattctgtgtcagtgtttaatggagctgtgagtgacgattcccgcaggcttggcaagttttgtggagacgccgtgccaggctccatctcttctgaaggcaacgagcttctggtacagttcgtgagcgacctgagcgtaaccgctgatggattctctgctagctacaagaccctgccccgtggtacagccaaggaaggccagggtcctgggccaaagaggggcaccgaacccaaggtcaagttgccccccaagtcccagcccccggaaaaaacagaggagtctcctagcgcacctgacgctccgacttgtcccaagcagtgtcggcgcacaggaactctgcaatccaatttctgcgcctcctctctcgttgttaccgcaactgtcaagagcatggtccgagagcctggagaagggctagctgttacggtctctctgataggcgcctacaagaccggagggctcgatctgccttcaccacctacaggggcgtccctaaaattttacgttccatgcaaacagtgtccccccatgaagaaaggggtttcatatttgctcatgggtcaggtggaggaaaataggggccccgtacttcctcctgagtccttcgttgtacttcatcgcccaaaccaggaccagatccttaccaacctgtccaaacgcaagtgtcctagccagccagtaagggcagccgcatctcaagattag

SEQ ID NO: 130068 - DNA, 1702 bp, Artificial Sequence
  derived and/or modified sequence
gatgacgttacttgaggcctgggagacggcctctgcccctcactgctcctccccctcctaaggtcaacatttatgtgtcctagacctagagaggtcccaggacacgccactgtcccgccttccccattgcccgccccactggccagtccccacgcccacacacccaaggctgccccatctggcgctgattatcctgctgctgccgccaccgctgctgctgctctgcaaaattcagctgctgcctctgtcttgaggaccccagcgcctttcccccggggccatgctgcctgcagccacagcctccctcctggggcccctcctcactgcctgcgccctgctgccttttgcccagggccagacccccaactacaccagacccgtgttcctgtgcggaggggatgtgaagggggaatcaggttacgtggcaagtgaggggttccccaacctctacccccctaataaggagtgcatctggaccataacggtccccgagggccagactgtgtccctctcattccgagtcttcgacctggagctgcaccccgcctgccgctacgatgctctggaggtcttcgctgggtctgggacttccggccagcggctcggacgcttttgtgggaccttccggcctgcgcccctagtcgcccccggcaaccaggtgaccctgaggatgacgacggatgagggcacaggaggacgaggcttcctgctctggtacagcgggcgggccacctcgggcactgagcaccaattttgcggggggcggctggagaaggcccagggaaccctgaccacgcccaactggcccgagtccgattaccccccgggcatcagctgttcctggcacatcatcgcgcccccggaccaggtcatcgcgctgaccttcgagaagtttgacctggagccggacacctactgccgctatgactcggtcagcgtgttcaacggagccgtgagcgacgactcccggaggctggggaagttctgcggcgacgcagtcccgggctccatctcctccgaagggaatgaactcctcgtccagttcgtctcagatctcagtgtcaccgctgatggcttctcagcctcctacaagaccctgccgcggggcactgccaaagaagggcaagggcccggccccaaacggggaactgagcctaaagtcaagctgccccccaagtcccaacctccggagaaaacagaggaatctccttcagcccctgatgcacccacctgcccaaagcagtgccgccggacaggcaccttgcagagcaacttctgtgccagcagccttgtggtgactgcgacagtgaagtccatggttcgggagccaggggagggccttgccgtgactgtcagtcttattggtgcttataaaactggaggactggacctgccttctccacccactggtgcctccctgaagttttacgtgccttgcaagcagtgcccccccatgaagaaaggagtcagttatctgctgatgggccaggtagaagagaacagaggccccgtccttcctccagagagctttgtggttctccaccggcccaaccaggaccagatcctcaccaacctaagcaagaggaagtgcccctctcaacctgtgcgggctgctgcgtcccaggactgagacgcaggccagccccggcccctagccctcaggccttctttcttatccaaataaatgtttcttaatgaggaa

SEQ ID NO: 130069 - DNA, 1350 bp, Artificial Sequence
  derived and/or modified sequence
atgctcccagcagctaccgcctccctcctcggcccattgctgacggcatgcgccctgctacccttcgcacagggccagacccctaattacaccagaccagtgttcctgtgtggcggtgacgtgaagggggaatctggctacgtggccagcgagggctttcccaacctttatccacccaataaagagtgcatatggactatcactgtccccgagggccagaccgtctcccttagctttagggtcttcgatctcgagctccacccagcatgtaggtatgatgctcttgaagtgtttgctggatccggcacatccgggcagcgactgggcaggttttgcgggacattccggcctgccccactcgttgctccagggaaccaggtgaccttgagaatgaccacagacgaaggcaccggcggtagaggcttcttgctgtggtattccggtcgcgcaacatccgggacagaacatcagttctgtgggggacgactcgagaaagcgcagggaaccctgactactcctaactggccagaatcagattacccccctggcatcagctgttcctggcacatcatcgcgccaccggaccaggtgatcgccctgaccttcgagaagtttgacctggaacctgatacctattgccgctatgattcagtctctgtcttcaatggcgctgtatccgatgactctcggaggctcgggaaattttgcggtgatgctgtacccggttccattagctctgaaggaaacgagctgttagtgcagtttgtcagcgacctgagtgtgaccgcagatggctttagcgcctcctataagaccctgccccgtggcacagcaaaggagggtcaaggccctgggcctaagagaggaaccgagccaaaggtgaagctccccccaaagagccaacctcctgagaagactgaagagagcccaagcgctcctgatgctccgacctgtcctaagcaatgccgtaggaccgggacactccagagtaatttctgtgcctcatccttggtggtcacagcgaccgtgaaaagcatggtgcgcgagcctggcgagggcctggcagtcaccgttagcctcatcggagcctacaaaaccggaggcctggatctccctagtcctccaacaggggcatctttgaagttttatgtaccctgcaaacaatgcccacctatgaaaaaaggagtaagctacctcctcatgggccaggtggaagagaatcgcggacctgtgctgccacctgagtctttcgtggtcttacaccgccctaatcaagatcagattttgaccaatctgagcaagcgcaagtgcccttcacagcctgtccgcgctgcggcatcacaggattag

SEQ ID NO: 130070 - DNA, 1350 bp, Artificial Sequence
  derived and/or modified sequence
atgctgcccgccgccaccgccagcctgctgggccccctgctgaccgcctgcgccctgctgcccttcgcccagggccagacccccaactacaccagacccgtgttcctgtgcggcggcgacgtgaagggcgagagcggctacgtggccagcgagggcttccccaacctgtacccccccaacaaggagtgcatctggaccatcaccgtgcccgagggccagaccgtgagcctgagcttcagagtgttcgacctggagctgcaccccgcctgcagatacgacgccctggaggtgttcgccggcagcggcaccagcggccagagactgggcagattctgcggcaccttcagacccgcccccctggtggcccccggcaaccaggtgaccctgagaatgaccaccgacgagggcaccggcggcagaggcttcctgctgtggtacagcggcagagccaccagcggcaccgagcaccagttctgcggcggcagactggagaaggcccagggcaccctgaccacccccaactggcccgagagcgactacccccccggcatcagctgcagctggcacatcatcgccccccccgaccaggtgatcgccctgaccttcgagaagttcgacctggagcccgacacctactgcagatacgacagcgtgagcgtgttcaacggcgccgtgagcgacgacagcagaagactgggcaagttctgcggcgacgccgtgcccggcagcatcagcagcgagggcaacgagctgctggtgcagttcgtgagcgacctgagcgtgaccgccgacggcttcagcgccagctacaagaccctgcccagaggcaccgccaaggagggccagggccccggccccaagagaggcaccgagcccaaggtgaagctgccccccaagagccagccccccgagaagaccgaggagagccccagcgcccccgacgcccccacctgccccaagcagtgcagaagaaccggcaccctgcagagcaacttctgcgccagcagcctggtggtgaccgccaccgtgaagagcatggtgagagagcccggcgagggcctggccgtgaccgtgagcctgatcggcgcctacaagaccggcggcctggacctgcccagcccccccaccggcgccagcctgaagttctacgtgccctgcaagcagtgcccccccatgaagaagggcgtgagctacctgctgatgggccaggtggaggagaacagaggccccgtgctgccccccgagagcttcgtggtgctgcacagacccaaccaggaccagatcctgaccaacctgagcaagagaaagtgccccagccagcccgtgagagccgccgccagccaggactag

SEQ ID NO: 130071 - protein, 638 aa, Artificial Sequence
  derived and/or modified sequence
MKGGCVSQWKAAAGFLFCVMVFASAERPVFTNHFLVELHKGGEDKARQVAAEHGFGVRKLPFAEGLYHFYHNGLAKAKRRRSLHHKQQLERDPRVKMALQQEGFDRKKRGYRDINEIDINMNDPLFTKQWYLINTGQADGTPGLDLNVAEAWELGYTGKGVTIGIMDDGIDYLHPDLASNYNAEASYDFSSNDPYPYPRYTDDWFNSHGTRCAGEVSAAANNNICGVGVAYNSKVAGIRMLDQPFMTDIIEASSISHMPQLIDIYSASWGPTDNGKTVDGPRELTLQAMADGVNKGRGGKGSIYVWASGDGGSYDDCNCDGYASSMWTISINSAINDGRTALYDESCSSTLASTFSNGRKRNPEAGVATTDLYGNCTLRHSGTSAAAPEAAGVFALALEANLGLTWRDMQHLTVLTSKRNQLHDEVHQWRRNGVGLEFNHLFGYGVLDAGAMVKMAKDWKTVPERFHCVGGSVQDPEKIPSTGKLVLTLTTDACEGKENFVRYLEHVQAVITVNATRRGDLNINMTSPMGTKSILLSRRPRDDDSKVGFDKWPFMTTHTWGEDARGTWTLELGFVGSAPQKGVLKEWTLMLHGTQSAPYIDQVVRDYQSKLAMSKKEELEEELDEAVERSLKSILNKN

SEQ ID NO: 130072 - protein, 619 aa, Artificial Sequence
  derived and/or modified sequence
MVFASAERPVFTNHFLVELHKGGEDKARQVAAEHGFGVRKLPFAEGLYHFYHNGLAKAKRRRSLHHKQQLERDPRVKMALQQEGFDRKKRGYRDINEIDINMNDPLFTKQWYLINTGQADGTPGLDLNVAEAWELGYTGKGVTIGIMDDGIDYLHPDLASNYNAEASYDFSSNDPYPYPRYTDDWFNSHGTRCAGEVSAAANNNICGVGVAYNSKVAGIRMLDQPFMTDIIEASSISHMPQLIDIYSASWGPTDNGKTVDGPRELTLQAMADGVNKGRGGKGSIYVWASGDGGSYDDCNCDGYASSMWTISINSAINDGRTALYDESCSSTLASTFSNGRKRNPEAGVATTDLYGNCTLRHSGTSAAAPEAAGVFALALEANLGLTWRDMQHLTVLTSKRNQLHDEVHQWRRNGVGLEFNHLFGYGVLDAGAMVKMAKDWKTVPERFHCVGGSVQDPEKIPSTGKLVLTLTTDACEGKENFVRYLEHVQAVITVNATRRGDLNINMTSPMGTKSILLSRRPRDDDSKVGFDKWPFMTTHTWGEDARGTWTLELGFVGSAPQKGVLKEWTLMLHGTQSAPYIDQVVRDYQSKLAMSKKEELEEELDEAVERSLKSILNKN

SEQ ID NO: 130073 - DNA, 1917 bp, Artificial Sequence
  derived and/or modified sequence
atgaaggggggttgcgtgtctcagtggaaagcagccgcaggctttctgttctgcgtgatggttttcgcttctgctgagcggcctgtcttcaccaatcacttcctcgttgagctccataaagggggagaagataaagcccgccaggtcgcggctgagcacggcttcggggtacgaaagctgcccttcgccgagggtctgtatcacttctaccacaacggtctcgctaaggctaaacgcagacgctctctccaccacaagcagcaacttgagcgggacccacgggtgaagatggccctgcagcaggaaggcttcgaccgcaagaagcgtggttatcgtgatatcaacgaaattgatatcaatatgaacgacccgctgttcacaaaacagtggtacctcattaatacgggacaggcagatggtactcccggtctagacctgaacgtggctgaggcatgggagctaggctatactgggaagggcgttactattgggattatggacgacgggatcgactacttacaccctgacctcgcgagtaactataacgccgaggccagttacgatttttcatccaacgacccatatccctatcctcggtatactgatgactggtttaattcccacggaacacggtgtgctggcgaagtgtccgccgcggccaataacaatatatgtggtgtgggcgttgcttataactctaaagtggccggtatacgtatgttagaccagccgtttatgactgatataatcgaggccagctccattagtcatatgccccaacttatagacatttacagcgcatcatggggccccacagataacggaaagaccgtcgatgggccaagagaactcaccctgcaggcgatggccgacggcgttaacaagggtcgcggcgggaaaggctctatctacgtgtgggcttccggggacggcggcagctacgatgattgcaactgcgatggatacgcttcaagcatgtggaccatctccataaactcggcaattaatgatgggcggaccgccctttatgacgagtcttgcagtagtactctagcttccacatttagcaacggacggaaacgaaatcctgaagccggtgtcgccacaacagacttgtatggtaactgcacccttaggcattcaggtacctctgccgcagcaccagaagccgccggcgtgttcgccctggcgctcgaggcaaacctcggacttacttggagggatatgcagcatcttacagtattaacttccaagcgcaaccagctgcacgatgaggtccaccagtggagaaggaacggggtcgggctggaatttaatcacttgtttggatatggtgtgctggatgctggggccatggtgaagatggctaaagattggaaaaccgtacccgaacgcttccattgcgtgggtggctccgtgcaggacccagaaaagatcccctccaccggcaagctcgttctgactctgactactgacgcttgtgaagggaaggagaacttcgtcagatatctagagcacgtccaggccgttataacagtaaacgcaacaagacgaggggatttgaacatcaacatgacttcacctatgggaacaaagtccattttactctcgagaagaccacgagatgacgactccaaagtcggattcgacaaatggcctttcatgacaacacacacctggggtgaggatgccagagggacgtggacactggaactgggattcgtgggatctgcgccccagaaaggcgttctcaaagaatggacactcatgctgcacggtacccagagcgcaccgtatattgaccaggtggtgagagattatcagtccaagttggccatgtctaagaaagaggagttagaggaagaattggatgaggccgtggaacgaagtttaaagtctattctgaacaaaaactag

SEQ ID NO: 130074 - DNA, 1917 bp, Artificial Sequence
  derived and/or modified sequence
atgaagggcggctgtgtgtcccagtggaaggctgctgctggcttcctgttctgtgtgatggtgtttgccagcgctgagaggcctgtgttcaccaaccacttcctggtggagctgcacaagggaggagaggacaaggcccggcaggtggccgctgagcacggctttggagtgaggaagctgccctttgctgagggcctgtaccacttctaccacaacggcctggccaaggccaagagaagaagaagcctgcaccacaagcagcagctggagcgggacccccgggtgaagatggccctgcagcaggagggctttgacaggaagaagaggggctacagagacatcaatgaaattgacatcaacatgaatgaccccctcttcaccaagcagtggtacctgatcaacacaggccaggctgatggcaccccaggcctggacctgaatgtggccgaggcctgggagctgggctacacaggaaaaggagtgaccatcggcatcatggatgatggcatcgactacctgcacccagacctggccagcaactacaatgctgaggccagctatgacttcagcagcaatgacccctacccctacccccgctacacagatgactggttcaacagccacggcacccgctgtgccggggaggtgtctgctgctgccaacaacaacatctgtggggtgggcgtggcctacaacagcaaggtggccggcatccgcatgctggaccagcccttcatgacagacatcatcgaggccagcagcatcagccacatgccccagctgattgacatctacagcgcctcctggggccccacagacaacgggaagacagtggatggcccccgggagctgaccctgcaggccatggctgatggagtgaacaagggccggggcggcaagggcagcatctacgtgtgggccagcggagatggcggcagctatgatgactgcaactgtgatggctacgccagctccatgtggaccatcagcatcaacagcgccatcaatgatggccgcacagccctgtatgatgagagctgcagcagcaccctggccagcaccttcagcaatggaaggaagagaaatcctgaggccggcgtggccaccacagacctgtatggcaactgcaccctgcggcacagcggcaccagcgctgctgcccctgaggccgccggcgtgtttgccctggccctggaggccaacctgggcctgacctggagggacatgcagcacctgactgtgctgaccagcaagaggaaccagctgcatgatgaggtgcaccagtggaggagaaatggagtgggcctggagttcaaccacctgtttggctacggcgtgctggatgctggggccatggtgaagatggccaaggactggaagacagtgcctgagcgcttccactgtgtgggcggctctgtgcaggaccctgagaagatccccagcacaggcaagctggtgctgaccctgaccacagatgcctgtgagggcaaggagaactttgtgcgctacctggagcacgtgcaggccgtcatcaccgtgaatgccaccaggagaggagacctgaacatcaacatgaccagccccatgggcaccaagagcatcctgctgagccggcggcccagagatgatgacagcaaggtgggctttgacaagtggcccttcatgaccacccacacctggggagaagatgcccggggcacctggaccctggagctgggctttgtgggcagcgccccccagaagggcgtgctgaaggagtggaccctgatgctgcacggcacccagagcgccccctacatcgaccaggtggtgcgggactaccagagcaagctggccatgagcaagaaggaggagctggaggaggagctggatgaggccgtggagaggagcctgaagagcatcctgaacaagaactag

SEQ ID NO: 130075 - DNA, 1917 bp, Artificial Sequence
  derived and/or modified sequence
atgaagggcggctgcgtgagccagtggaaggccgccgccggcttcctattctgcgtaatggtgtttgcctcggcagagagacccgtgtttaccaaccacttcctcgttgagctccataagggcggagaggataaggccagacaggtcgccgccgaacacggctttggggtcagaaagctgcctttcgccgaaggcctgtatcacttttaccataacggtcttgctaaagcaaagaggaggcggagtctgcatcacaagcagcagttagagcgtgatcctagggtgaagatggcacttcagcaggaaggcttcgacaggaagaagaggggatatcgagacatcaatgagatcgacataaatatgaacgatcctttgttcacaaaacagtggtatctgatcaacacgggacaggccgacggtactcccggattggatctgaacgttgcagaggcttgggagcttgggtatacaggaaagggagtgactatcggcatcatggatgatggcatcgactacctgcatccagatttggctagcaactacaacgctgaagctagctatgatttctccagcaatgatccatatccttatccgcggtataccgacgattggtttaattctcatggcacaagatgtgccggggaagtctccgccgcagctaacaacaacatctgcggcgtgggagtggcctataatagcaaagtggcagggatcagaatgttagatcagcccttcatgacagacatcatcgaagcttctagtatttctcatatgcctcagctgatcgatatatatagtgccagctggggcccaacagacaacggcaaaacagttgacgggcccagagagctgacactacaggccatggcagacggagtgaacaagggccgaggaggaaaaggatccatatatgtgtgggccagcggagatggagggagctatgacgattgcaactgtgatgggtatgcctctagtatgtggaccatttccatcaacagtgcaattaatgatgggaggaccgctctctacgatgaatcgtgcagctccactctcgctagcacctttagcaacgggcggaagcggaatcccgaggctggcgtggccactaccgatctgtacggcaattgcacgctgagacatagcggcacctccgccgcagcgcctgaagctgccggggtgttcgccttggctttggaagcgaacctgggcctcacttggcgcgatatgcaacacctgaccgttctgacatcaaagcggaatcagctgcacgacgaggtccaccagtggcggaggaacggagttggactggaattcaaccacctgtttgggtacggagtattagacgctggcgcaatggtcaagatggctaaggactggaaaacagtgccagagcgatttcattgtgtgggcgggagcgtgcaggatccagagaagattccatcgactggaaaactggttctgacattaacaacagatgcctgtgaaggtaaggaaaattttgtccggtatctcgagcacgtccaggcagtgatcacggttaatgccactcggaggggtgacctgaacatcaatatgactagcccaatgggaaccaagtccatcctgctgtcccgcagacccagagatgatgattcaaaggtaggatttgacaagtggcccttcatgactacccatacctggggcgaagatgcgagaggaacctggaccctcgagttgggcttcgtgggctctgcaccacagaagggagttctcaaagaatggacccttatgctgcacggcactcagtccgctccttatatcgatcaggtggtgagggattaccagagcaagctcgcaatgagcaagaaagaagagctggaagaagagctggatgaggcggtcgaacgctcactcaagtcaatcttgaacaaaaattag

SEQ ID NO: 130076 - DNA, 1917 bp, Artificial Sequence
  derived and/or modified sequence
atgaaagggggatgtgtgtcacagtggaaggctgccgctggttttctgttttgtgttatggtctttgcttcagcagaaaggcccgtatttactaatcatttcctggtggagctgcacaaaggcggtgaggacaaggccagacaggtggccgctgaacacggattcggggtcaggaagttaccgttcgcagaaggcctttatcatttctatcataacgggctggctaaagctaaacggaggcgctctctgcaccataagcagcaactggagagagaccccagggtgaagatggccttacagcaggaagggttcgatcgcaagaagagggggtaccgggacatcaacgagatcgacattaacatgaatgaccctctcttcaccaagcagtggtacttaattaataccggccaggcagacggcacacccggacttgatctgaacgtcgctgaagcctgggagctcgggtacacaggtaaaggagtgacgataggcattatggatgacggaatcgattatctgcatcctgacctggcatcaaactacaatgcagaggcgtcgtatgatttcagcagtaacgatccttacccctatccccgatataccgatgactggtttaactcacatgggacccgctgcgctggcgaggtttccgcggctgcaaacaacaatatctgtggcgtgggggtcgcttacaatagcaaggtggccggtatcaggatgctggaccagccgtttatgacagatataattgaagcctcgtccattagtcacatgccccagttaattgacatttattcggcttcctggggtccaacggataatgggaaaacagtggacggcccacgtgagctcacacttcaggccatggcggacggcgtgaataagggcagagggggaaaaggctccatatacgtgtgggccagtggggacggcggaagttacgatgattgtaattgcgatgggtatgcctcctctatgtggaccataagcattaatagtgctatcaatgatggacgcacggccctctatgacgaaagctgcagctcaaccctggccagcacattttctaatggaagaaagaggaaccctgaagctggggtggcgacaacagatttatacggaaattgcacactgcggcattctggcacctccgccgcagctccagaggccgctggggtctttgctctggctcttgaggccaatcttggccttacctggagggacatgcaacatctgactgttctcacgtctaagaggaaccaactacacgatgaagtacaccaatggagacgcaatggcgtcggtcttgagtttaatcatctcttcggctacggagtactggatgccggagccatggtcaaaatggctaaggattggaaaactgttcccgagagatttcactgcgttggtggcagcgtccaggaccctgagaagatcccaagcacagggaaactggttctgaccctgactacagacgcatgtgagggcaaggaaaatttcgtgagatatctggaacacgtgcaggctgtgatcaccgttaacgccacccggcgaggcgatctcaacataaacatgaccagccctatggggacaaaatcaatcttgctgagccggaggcccagggatgatgatagtaaagtagggttcgacaaatggccttttatgactacacacacttggggcgaggacgcaaggggaacttggaccctggagctcgggtttgttggcagcgctccgcagaaaggtgttcttaaggagtggactttgatgctgcacggtacgcagtcagcgccttatatagaccaggtagtcagagactaccaatccaaactggcaatgtctaagaaagaggaactagaggaagaattagatgaggcagtggagagaagcttgaaatccattctgaataagaactag

SEQ ID NO: 130077 - DNA, 4740 bp, Artificial Sequence
  derived and/or modified sequence
gaggaggagctgaaaatgcagatttagcatcaagcacagacctacactcgctctttctctccggtacacacagctccccacattcgcacccctgcccgcgcgccgggccgcctgactgcacggcttcccctccagccagatgctggagaacacacactgattcgctgctttccaagaccctgttcagtctctttctctatacaaagatttttttaaaaactatatataagaattctttatttgcaccctccctccgagtcccctgctccgccagcctgcgcgcctcctagcaccacttttcactcccaaagaaggatgaagggtggttgtgtctcccagtggaaggcggccgccgggttcctcttctgtgtcatggtttttgcatctgctgagcgaccggtcttcacgaatcattttcttgtggagttgcataaagggggagaggacaaagctcgccaagttgcagcagaacacggctttggagtccgaaagcttccctttgctgaaggtctgtaccacttttatcacaatggccttgcaaaggccaagagaagacgcagcctacaccacaagcagcagctggagagagaccccagggtaaagatggctttgcagcaggaaggatttgaccgaaaaaagcgaggttacagagacatcaatgagatcgacatcaacatgaacgatcctctttttacaaagcagtggtatctgatcaatactgggcaagctgatggcactcctggccttgatttgaatgtggctgaagcctgggagctgggatacacagggaaaggtgttaccattggaattatggatgatgggattgactatctccacccggacctggcctccaactataatgccgaagcaagttacgacttcagcagcaacgacccctatccttaccctcggtacacagatgactggtttaacagccacgggacccgatgtgcaggagaagtttctgctgccgccaacaacaatatctgtggagttggagtagcatacaactccaaggttgcaggcatccggatgctggaccagccattcatgacagacatcatcgaggcctcctccatcagtcatatgccacagctgattgacatctacagcgccagctggggccccacagacaacggcaagacagtggatgggccccgggagctcacgctgcaggccatggccgatggcgtgaacaagggccgcggcggcaaaggcagcatctacgtgtgggcctccggggacggcggcagctatgacgactgcaactgcgacggctacgcctccagcatgtggaccatctccatcaactcagccatcaacgacggcaggactgccctgtacgacgagagctgctcttccaccttggcttccaccttcagcaacgggaggaaaaggaaccccgaggccggtgtggcaaccacagatttgtacggcaactgcactctgaggcattctgggacatctgcagctgcccccgaggcagctggtgtgtttgcactggctctggaggctaacctgggtctgacctggcgggacatgcagcatctgactgtgctcacctccaaacggaaccagcttcacgacgaggtccatcagtggcggcgcaatggggtcggcctggaatttaatcacctctttggctacggggtccttgatgcaggtgccatggtgaaaatggctaaagactggaaaaccgtgcctgagagattccactgtgtgggaggctccgtgcaggaccctgagaaaataccatccactggcaagttggtgctgacactcacaaccgacgcctgtgaggggaaggaaaattttgtccgctacctggagcatgtccaggctgtcatcacggtcaacgcaaccagaagaggagacctgaacatcaacatgacttcccctatgggcaccaagtccattttgctgagccggcgtccaagggatgacgactccaaggtgggctttgacaagtggcctttcatgaccactcacacgtggggggaagacgcccgaggcacctggaccctggagctgggatttgtcggcagcgccccgcagaagggggtgctgaaggagtggaccctgatgctgcatggcactcagagtgccccgtacatcgaccaggtggtgcgggattaccagtccaagttggccatgtccaagaaagaggagctggaggaagagctggacgaagccgtggagagaagcctgaaaagcatccttaacaagaactagcgctgcacatccgcctttcccaccgccctccctccccagctccgcctctgtcctcgctccacgtttcaggcaggcacctagcaattccatcacccgtacaggcaattccgtcttcttaatctgaagcttcactcactgtcaatgattattttcattacaatggaaacaatcttttttactctatgccccaaatatagcgttcccaacaacatccatgtcctatgtgtgactctaaattctttatttctgtcattcaaatgggtgatatcctgaaaaaaaaaaaaaaaaaaaaactgggacagctttcccctcatttttttttttgtttctgagaaaagaacgtattttaaaagccacatagagtgactccaagaacaattgtccatggtctcaaacaaggggctgttacataacaagaaaatcaaagctgaggacagggtgtgagcgccacatctctgaaagcacaggagacactgtgctataaatcctttggggagcgatgttttgaatttagtgagatttaccagggatgtagattaaggtgatgtgattcaaaagatgccattcatagagagccctagttactgcatggggaaagagatccaggaagcatgagtgctggatattttactaccaatgccaagataattcactctactcagccggcgtggcaaatataaaacttacagagcgtggctgtgctctcaccagctgctgctctgagttatgttaaaatccgctagagcagcccaaatttttctcagtttgtatagagttcatcccagccccaattttctggggctcctcacatagctacccaaaagagaaaaaaaattaagacaagcctggcaacacacctggtgaagagtagtttactagcttttcaaacaagaatgtcccttttcctaagtcactttgaggtgtctcaatctgatctgagtgagaggcgacaggagtatttttttttttttacagctttacacacacagatgtgggctttgatttccaagtaatataatggaagagaaatctcatactcccccacagtttgatgtcattaatgtgttgggaaaaaggcctctgtcccggaagagtcatgggaggtgaaaggggcacgtttgaagatgcgagcgctatcttcacatagttctccagttgtatggagcctcttctgccaagagagggccatgcaattcatcccagaggaacctgaggcctgaaggaggtgagagaagacctctgtgaggaaagcacacagtcaccttctcggcaactaagcagtccctgagaccatttaacatgcaacccgaaggttatggtcaatcccaaaagtcaccactccattcccaactagacattaccaaagtgacctacccagagattgcttctcatccccagtcccaatgcacatccattcccaagaaatgctttgtcttcagcctctccaggcaccatctcccttcctgtgggagcagagagcttagcctggagcacctttccttcaagccagcaacacagagcactaggttcaattccctgaaggtggccactttaagagagaaatctgaaaaccccatttgctttcttttctcccatattggcatggatttctgtcttctctaacaccttgtgaccttctctatatcatgctttaaagtgtaataatatgattttttaaaagaaatttattacttgttgcaaaggtctttttaaaccagtttagatttcaagaaaaaataaatggaaatcatcgaaaattcatttcacattaatggtctaaaaataaaccaaaggacattatgtgtgcatgtgtgtataagtgcacacagaaatatatatacatatgtagactatatacatgtgtgtatatatgtgtatatatacatacacttgtataaatgtatatacacatatacctataatgtgtgtatgtgtatttattgaagaaacagataccatactcatttctaaaagaatattcagagaatatcaagatgattctggctgaaaaaggccagtggaaattcaggtgaaaatgttcatcaattcccattgcatcacctctgtaatttttcagctctctgtataaacattaaatgtcttatatagcagcaaaaatataaaatagttgtccatattttcacaggtgtggtgtaatttataaaattagaaagcaacttatcagctacttaagagaaatggcaagttttgatatgagtatacaatatataaaaatatatatagtgctatatatataaatatttggtctctatttcattttttgcatcagtattaatactaaaatatgtctcgctagtgatgtttttatgatatccctgatcctaactgaagagacagttatttatagtcatttattttaaaaaatgaaaataagtgaataataattaggttaacattgttgctccctgtgacaaaattttataagcaaatttcaaaagacatgttgtaaattaggaggctcaacaataaaacattatgctccagaaa

SEQ ID NO: 130078 - DNA, 4674 bp, Artificial Sequence
  derived and/or modified sequence
aactagcaccctcgctgtccttgtgcagtggaacgtccccaggtctgagaatgcacctcccgccgtgtccaccccggccgcgtctctcctgaaggcagatcttggaggtgcagccaggactcctagaggagcctcctccagtcaccatcgcgggtggggcgagccgggtctcctgctgggcttcccagccgcttcgctccggacctgcctggagcctacaaaaaacaagggctcgtccttgcactctcgccccccatggatcacccctagaagtggaaggcggccgccgggttcctcttctgtgtcatggtttttgcatctgctgagcgaccggtcttcacgaatcattttcttgtggagttgcataaagggggagaggacaaagctcgccaagttgcagcagaacacggctttggagtccgaaagcttccctttgctgaaggtctgtaccacttttatcacaatggccttgcaaaggccaagagaagacgcagcctacaccacaagcagcagctggagagagaccccagggtaaagatggctttgcagcaggaaggatttgaccgaaaaaagcgaggttacagagacatcaatgagatcgacatcaacatgaacgatcctctttttacaaagcagtggtatctgatcaatactgggcaagctgatggcactcctggccttgatttgaatgtggctgaagcctgggagctgggatacacagggaaaggtgttaccattggaattatggatgatgggattgactatctccacccggacctggcctccaactataatgccgaagcaagttacgacttcagcagcaacgacccctatccttaccctcggtacacagatgactggtttaacagccacgggacccgatgtgcaggagaagtttctgctgccgccaacaacaatatctgtggagttggagtagcatacaactccaaggttgcaggcatccggatgctggaccagccattcatgacagacatcatcgaggcctcctccatcagtcatatgccacagctgattgacatctacagcgccagctggggccccacagacaacggcaagacagtggatgggccccgggagctcacgctgcaggccatggccgatggcgtgaacaagggccgcggcggcaaaggcagcatctacgtgtgggcctccggggacggcggcagctatgacgactgcaactgcgacggctacgcctccagcatgtggaccatctccatcaactcagccatcaacgacggcaggactgccctgtacgacgagagctgctcttccaccttggcttccaccttcagcaacgggaggaaaaggaaccccgaggccggtgtggcaaccacagatttgtacggcaactgcactctgaggcattctgggacatctgcagctgcccccgaggcagctggtgtgtttgcactggctctggaggctaacctgggtctgacctggcgggacatgcagcatctgactgtgctcacctccaaacggaaccagcttcacgacgaggtccatcagtggcggcgcaatggggtcggcctggaatttaatcacctctttggctacggggtccttgatgcaggtgccatggtgaaaatggctaaagactggaaaaccgtgcctgagagattccactgtgtgggaggctccgtgcaggaccctgagaaaataccatccactggcaagttggtgctgacactcacaaccgacgcctgtgaggggaaggaaaattttgtccgctacctggagcatgtccaggctgtcatcacggtcaacgcaaccagaagaggagacctgaacatcaacatgacttcccctatgggcaccaagtccattttgctgagccggcgtccaagggatgacgactccaaggtgggctttgacaagtggcctttcatgaccactcacacgtggggggaagacgcccgaggcacctggaccctggagctgggatttgtcggcagcgccccgcagaagggggtgctgaaggagtggaccctgatgctgcatggcactcagagtgccccgtacatcgaccaggtggtgcgggattaccagtccaagttggccatgtccaagaaagaggagctggaggaagagctggacgaagccgtggagagaagcctgaaaagcatccttaacaagaactagcgctgcacatccgcctttcccaccgccctccctccccagctccgcctctgtcctcgctccacgtttcaggcaggcacctagcaattccatcacccgtacaggcaattccgtcttcttaatctgaagcttcactcactgtcaatgattattttcattacaatggaaacaatcttttttactctatgccccaaatatagcgttcccaacaacatccatgtcctatgtgtgactctaaattctttatttctgtcattcaaatgggtgatatcctgaaaaaaaaaaaaaaaaaaaaactgggacagctttcccctcatttttttttttgtttctgagaaaagaacgtattttaaaagccacatagagtgactccaagaacaattgtccatggtctcaaacaaggggctgttacataacaagaaaatcaaagctgaggacagggtgtgagcgccacatctctgaaagcacaggagacactgtgctataaatcctttggggagcgatgttttgaatttagtgagatttaccagggatgtagattaaggtgatgtgattcaaaagatgccattcatagagagccctagttactgcatggggaaagagatccaggaagcatgagtgctggatattttactaccaatgccaagataattcactctactcagccggcgtggcaaatataaaacttacagagcgtggctgtgctctcaccagctgctgctctgagttatgttaaaatccgctagagcagcccaaatttttctcagtttgtatagagttcatcccagccccaattttctggggctcctcacatagctacccaaaagagaaaaaaaattaagacaagcctggcaacacacctggtgaagagtagtttactagcttttcaaacaagaatgtcccttttcctaagtcactttgaggtgtctcaatctgatctgagtgagaggcgacaggagtatttttttttttttacagctttacacacacagatgtgggctttgatttccaagtaatataatggaagagaaatctcatactcccccacagtttgatgtcattaatgtgttgggaaaaaggcctctgtcccggaagagtcatgggaggtgaaaggggcacgtttgaagatgcgagcgctatcttcacatagttctccagttgtatggagcctcttctgccaagagagggccatgcaattcatcccagaggaacctgaggcctgaaggaggtgagagaagacctctgtgaggaaagcacacagtcaccttctcggcaactaagcagtccctgagaccatttaacatgcaacccgaaggttatggtcaatcccaaaagtcaccactccattcccaactagacattaccaaagtgacctacccagagattgcttctcatccccagtcccaatgcacatccattcccaagaaatgctttgtcttcagcctctccaggcaccatctcccttcctgtgggagcagagagcttagcctggagcacctttccttcaagccagcaacacagagcactaggttcaattccctgaaggtggccactttaagagagaaatctgaaaaccccatttgctttcttttctcccatattggcatggatttctgtcttctctaacaccttgtgaccttctctatatcatgctttaaagtgtaataatatgattttttaaaagaaatttattacttgttgcaaaggtctttttaaaccagtttagatttcaagaaaaaataaatggaaatcatcgaaaattcatttcacattaatggtctaaaaataaaccaaaggacattatgtgtgcatgtgtgtataagtgcacacagaaatatatatacatatgtagactatatacatgtgtgtatatatgtgtatatatacatacacttgtataaatgtatatacacatatacctataatgtgtgtatgtgtatttattgaagaaacagataccatactcatttctaaaagaatattcagagaatatcaagatgattctggctgaaaaaggccagtggaaattcaggtgaaaatgttcatcaattcccattgcatcacctctgtaatttttcagctctctgtataaacattaaatgtcttatatagcagcaaaaatataaaatagttgtccatattttcacaggtgtggtgtaatttataaaattagaaagcaacttatcagctacttaagagaaatggcaagttttgatatgagtatacaatatataaaaatatatatagtgctatatatataaatatttggtctctatttcattttttgcatcagtattaatactaaaatatgtctcgctagtgatgtttttatgatatccctgatcctaactgaagagacagttatttatagtcatttattttaaaaaatgaaaataagtgaataataattaggttaacattgttgctccctgtgacaaaattttataagcaaatttcaaaagacatgttgtaaattaggaggctcaacaataaaacattatgctccagaaa

SEQ ID NO: 130079 - DNA, 1917 bp, Artificial Sequence
  derived and/or modified sequence
atgaagggcggctgcgtgagccagtggaaggccgccgccggcttcctgttctgcgtgatggtgttcgccagcgccgagagacccgtgttcaccaaccacttcctggtggagctgcacaagggcggcgaggacaaggccagacaggtggccgccgagcacggcttcggcgtgagaaagctgcccttcgccgagggcctgtaccacttctaccacaacggcctggccaaggccaagagaagaagaagcctgcaccacaagcagcagctggagagagaccccagagtgaagatggccctgcagcaggagggcttcgacagaaagaagagaggctacagagacatcaacgagatcgacatcaacatgaacgaccccctgttcaccaagcagtggtacctgatcaacaccggccaggccgacggcacccccggcctggacctgaacgtggccgaggcctgggagctgggctacaccggcaagggcgtgaccatcggcatcatggacgacggcatcgactacctgcaccccgacctggccagcaactacaacgccgaggccagctacgacttcagcagcaacgacccctacccctaccccagatacaccgacgactggttcaacagccacggcaccagatgcgccggcgaggtgagcgccgccgccaacaacaacatctgcggcgtgggcgtggcctacaacagcaaggtggccggcatcagaatgctggaccagcccttcatgaccgacatcatcgaggccagcagcatcagccacatgccccagctgatcgacatctacagcgccagctggggccccaccgacaacggcaagaccgtggacggccccagagagctgaccctgcaggccatggccgacggcgtgaacaagggcagaggcggcaagggcagcatctacgtgtgggccagcggcgacggcggcagctacgacgactgcaactgcgacggctacgccagcagcatgtggaccatcagcatcaacagcgccatcaacgacggcagaaccgccctgtacgacgagagctgcagcagcaccctggccagcaccttcagcaacggcagaaagagaaaccccgaggccggcgtggccaccaccgacctgtacggcaactgcaccctgagacacagcggcaccagcgccgccgcccccgaggccgccggcgtgttcgccctggccctggaggccaacctgggcctgacctggagagacatgcagcacctgaccgtgctgaccagcaagagaaaccagctgcacgacgaggtgcaccagtggagaagaaacggcgtgggcctggagttcaaccacctgttcggctacggcgtgctggacgccggcgccatggtgaagatggccaaggactggaagaccgtgcccgagagattccactgcgtgggcggcagcgtgcaggaccccgagaagatccccagcaccggcaagctggtgctgaccctgaccaccgacgcctgcgagggcaaggagaacttcgtgagatacctggagcacgtgcaggccgtgatcaccgtgaacgccaccagaagaggcgacctgaacatcaacatgaccagccccatgggcaccaagagcatcctgctgagcagaagacccagagacgacgacagcaaggtgggcttcgacaagtggcccttcatgaccacccacacctggggcgaggacgccagaggcacctggaccctggagctgggcttcgtgggcagcgccccccagaagggcgtgctgaaggagtggaccctgatgctgcacggcacccagagcgccccctacatcgaccaggtggtgagagactaccagagcaagctggccatgagcaagaaggaggagctggaggaggagctggacgaggccgtggagagaagcctgaagagcatcctgaacaagaactag

SEQ ID NO: 130080 - protein, 523 aa, Artificial Sequence
  derived and/or modified sequence
MKKFKRRLSLTLRGSQTIDESLSELAEQMTIEENSSKDNEPIVKNGRPPTSHSMHSFLHQYTGSFKKPPLRRPHSVIGGSLGSFMAMPRNGSRLDIVHENLKMGSDGESDQASGTSSDEVQSPTGVCLRNRIHRRISMEDLNKRLSLPADIRIPDGYLEKLQINSPPFDQPMSRRSRRASLSEIGFGKMETYIKLEKLGEGTYATVYKGRSKLTENLVALKEIRLEHEEGAPCTAIREVSLLKDLKHANIVTLHDIVHTDKSLTLVFEYLDKDLKQYMDDCGNIMSMHNVKLFLYQILRGLAYCHRRKVLHRDLKPQNLLINEKGELKLADFGLARAKSVPTKTYSNEVVTLWYRPPDVLLGSSEYSTQIDMWGVGCIFFEMASGRPLFPGSTVEDELHLIFRLLGTPSQETWPGISSNEEFKNYNFPKYKPQPLINHAPRLDSEGIELITKFLQYESKKRVSAEEAMKHVYFRSLGPRIHALPESVSIFSLKEIQLQKDPGFRNSSYPETGHGKNRRQSMLF

SEQ ID NO: 130081 - DNA, 1572 bp, Artificial Sequence
  derived and/or modified sequence
atgaagaagttcaagagaagactgagcctgaccctgagaggcagccagaccatcgacgagagcctgagcgagctggccgagcagatgaccatcgaggagaacagcagcaaggacaacgagcccatcgtgaagaacggcagaccccccaccagccacagcatgcacagcttcctgcaccagtacaccggcagcttcaagaagccccccctgagaagaccccacagcgtgatcggcggcagcctgggcagcttcatggccatgcccagaaacggcagcagactggacatcgtgcacgagaacctgaagatgggcagcgacggcgagagcgaccaggccagcggcaccagcagcgacgaggtgcagagccccaccggcgtgtgcctgagaaacagaatccacagaagaatcagcatggaggacctgaacaagagactgagcctgcccgccgacatcagaatccccgacggctacctggagaagctgcagatcaacagcccccccttcgaccagcccatgagcagaagaagcagaagagccagcctgagcgagatcggcttcggcaagatggagacctacatcaagctggagaagctgggcgagggcacctacgccaccgtgtacaagggcagaagcaagctgaccgagaacctggtggccctgaaggagatcagactggagcacgaggagggcgccccctgcaccgccatcagagaggtgagcctgctgaaggacctgaagcacgccaacatcgtgaccctgcacgacatcgtgcacaccgacaagagcctgaccctggtgttcgagtacctggacaaggacctgaagcagtacatggacgactgcggcaacatcatgagcatgcacaacgtgaagctgttcctgtaccagatcctgagaggcctggcctactgccacagaagaaaggtgctgcacagagacctgaagccccagaacctgctgatcaacgagaagggcgagctgaagctggccgacttcggcctggccagagccaagagcgtgcccaccaagacctacagcaacgaggtggtgaccctgtggtacagaccccccgacgtgctgctgggcagcagcgagtacagcacccagatcgacatgtggggcgtgggctgcatcttcttcgagatggccagcggcagacccctgttccccggcagcaccgtggaggacgagctgcacctgatcttcagactgctgggcacccccagccaggagacctggcccggcatcagcagcaacgaggagttcaagaactacaacttccccaagtacaagccccagcccctgatcaaccacgcccccagactggacagcgagggcatcgagctgatcaccaagttcctgcagtacgagagcaagaagagagtgagcgccgaggaggccatgaagcacgtgtacttcagaagcctgggccccagaatccacgccctgcccgagagcgtgagcatcttcagcctgaaggagatccagctgcagaaggaccccggcttcagaaacagcagctaccccgagaccggccacggcaagaacagaagacagagcatgctgttctag

SEQ ID NO: 130082 - DNA, 4157 bp, Artificial Sequence
  derived and/or modified sequence
gcgggggtggggtaagctcccgcggccggtcgcttttctccgccgccgctggttggatcgtttcaataaaagtgttttttctcttgcactcgctctcctccggggaacaggcggaggcgtcaatccgcagccgccgagtgtgaaagcgacgcacacgcaaggagcgaacgcggccgcccgcagtctcctgagctccccgcgggccgccgcagagccgcggagaaggagccagcgcccggccagacagtctcagcccgccgtcggcgcccgccgcgctcgcgcccggctgctccgaggggattagtgggccgtccgcgcggctcgtcggcgcgggagccatgttgaccgagggacttggcaacgcgtgagacacccgcggcccctcccgaggctccggacccgcggcgagagccggaaggcggctgtggcggcggaggcctgcgctcggaagcgcctcacgtctgccggccgctgagacccggacttgcatccggtcgccgcgggcgtccgcggagcagcttccccccgcgcctctcttcgcctcgcctcgggacccgcggtccccgctcttgctggatttttcaagccacattcaattgataggatgaaaaaatttaagagaaggctatccctcacactccgaggaagtcagactattgatgaatcattgtctgaattggctgaacaaatgactattgaagaaaacagcagcaaggataatgagcctattgtgaagaatggcaggcctccaacgtctcacagtatgcattccttcctccaccagtacacaggatctttcaagaagcccccattgcggagaccacacagtgttattggagggagccttggctccttcatggcaatgcccagaaatggaagcagattagatattgttcatgaaaatctaaaaatgggatcagatggtgagagtgaccaagcttctgggacatcatctgatgaagtccagtcacctacaggtgtttgtctcagaaatcgtatacatagacggatctcaatggaggatttaaataagcggttatcactgcctgcagacatcagaatacctgatggatatcttgaaaagttgcagataaacagtccaccatttgaccaaccaatgagtcgaaggtctcgtagagcttccttatcagaaattggctttggaaaaatggaaacctacatcaaattggaaaagcttggagagggtacatatgcaacagtatataaaggaagaagtaaattgacagagaatttggtggcattaaaagagatccgattggaacatgaagaaggtgcaccctgcacagctataagagaagtttcactattaaaggatttaaaacatgcaaatatagtaaccttacatgacattgttcacacagataaatccttgactttggtgtttgagtatctggataaagacctgaaacagtacatggatgactgtggaaacatcatgagtatgcacaacgtaaagctgtttctgtaccaaattctacgtggtttggcatattgccatagaagaaaggtattgcatcgagacttgaaaccacagaacctcctcattaatgagaaaggagaattaaagctagcagattttggactagcccgagccaagtcagttcccacaaagacctactcaaatgaagttgtcacactatggtaccggccacctgatgtgcttcttggttcctcggagtactcaacacagattgacatgtggggtgttggttgcattttctttgaaatggcttctggaagacctttatttccaggatcaaccgtggaagatgaactgcacttaattttccgactgctaggaactccatctcaggaaacttggccaggtatttcttcaaatgaggagttcaagaactacaactttccaaaatataaaccacagcctctaattaaccacgcacccaggttagactctgaaggaattgagttgataacaaaatttcttcagtatgaatctaagaaaagggtttcagctgaagaggccatgaaacatgtgtactttcgaagtctgggaccaagaatacatgctttaccagaaagtgtatcaatattcagtttgaaagagattcagttgcaaaaggacccgggttttcgaaattcttcttatccagagacaggacatgggaagaacagaagacagagcatgctcttttaagtctgataacatggtttcaagcccagcccccagcctttcttaccaatcaaggactcagaactgaaggcaattatttcttttggtggacttggaatctccgtttgtctacactgtcctcttcacagtggagtctttttatttcagacctacagattgtttttatatttgttgtcacagtgtgacaattttttgtacagtcggttttaaggtcttctctgccattagagccagtaggttacagctattgatgtaactatagctgcaatttttgtgcaggactgagaaacacagtgcattatttattgcggaatcattgctgctaaataactactgtctgtttatttaacacaacaattgaatgcctgaagaagttgcagtggctttattatatgtgaatgcatctgtttctcctcacgaattgttttactgctgcattttttgtttttaaaattaaactgcagtgtttcctggaatgtaaatttagctttgcttaatagtaaaataagtgagccatcttgaacactttaagtttatactatataatttcttaatgaacattggcaaatagagtagctaagagattgacaagcacattacgtttagataagcatgtgatgcagaagttgattcaagcaagtgaatccctgacattttgaggatctcacattagacaccaacaaattaaagctccaaaattatttattttttatgtgttcctcactttagaaacgtctactgcatattactggatatttgtatactaatacacttacctattttacattgtgttttaaatttagttaaaacttaaccgtagaagtctgttcaaacgcgaaaggtcttgctttgtttgttttaaatacatttattttattagaaaggatgatatttcattggggaatagtttctttcatttgggggctatgtgtttcaataacattcacttggaatcagctgaaagctgtaatatgtctttgaaatgagccatgataaattacaaacaagagaaatgagaacttacaggattgcttgaaattattgtgggtattatctgtttaccagagatactaaatattagttttaattatgcatctctttgaacatcataaacacactttggtgttggtaacagtattttaagcatttttgttcacttttaaggactatttgtttagtgcatcttacaaactataaatcttaattggtatattttgaaatggtcgtgtaaatttttgccttatatatcatgaaaatagtcataacttaatttcttttcctgaaattcactgtaaaacattcaggggtcctaccatttctgttcaggaaatcttgtagtttattgttgttatttaacagtattaagtggatttttgtatatttcattttaactttatttgtgaatagtgattgtggcatgtttggggtgttattttaatatttcacgatactaaaattttaattttaaaaaattctggaagaaacagattcatgtgtaatggtgaatattggaccactactgcttttcacatttgtaaattggttttatgttaaaccttgtagcctaacaaactgctgttctttctaactgacagacatgtattaatattgtactttgaaggttataaatatgtggaaattccttcattttgttttgaaatttataataacaaaatctccatgttgttaaaatgtggttttattgagtcacagttctttcttggggatgaaggctgtgccgagtggggtccttttcttttatgggtcgttcttaagataatgaagtctcactgtgctagaggtgttattgttttctgtttgtgccaatcatttgcttagtaatttctgctgggttttttttatagcactctcaattataaagtatcaaatttgtcacttcatagaatgtatatttgatttgttgcaaatttgacattatagcttttcataggcttaattcttgcgtataaaagatgaaaatata

SEQ ID NO: 130083 - DNA, 1572 bp, Artificial Sequence
  derived and/or modified sequence
atgaagaagttcaagaggcggctctcactcactctgcgaggaagtcagaccattgatgaatctctcagcgaactggctgaacagatgaccattgaggagaacagttccaaagataatgagcctatcgtcaagaatggcagacctccaacctctcatagcatgcatagctttttgcaccagtataccggctcatttaagaaaccaccgctgagacgcccgcactcagtcattggcggttccctggggagcttcatggctatgccaagaaacgggtcaaggctcgacatcgttcacgagaatctgaagatgggatctgatggtgagagtgaccaggcgagtggaacctccagtgacgaggtgcagagccccactggcgtttgcttgcgaaataggatccacaggaggatttcaatggaggatctgaacaaacggctgtcattgccagcagatatcagaatccctgacggatacctggagaaactgcagattaatagtcctccttttgatcaaccgatgtcaagacgctcacgaagggcaagcctgagcgagatcggattcgggaaaatggagacatacattaaactcgagaaactgggtgaaggaacatacgccactgtgtacaagggtcgctccaagttgaccgagaacctggttgccttgaaggaaattcgtttagaacatgaggagggcgctccatgcaccgccattcgcgaagtcagcctgttaaaagacctgaaacacgccaacattgttactctgcatgacatcgttcatacggataagagcctcaccctagtattcgagtatctggataaagatctcaaacaatacatggacgactgcggaaatatcatgagcatgcataacgtgaagctgttcttgtatcagatcttgcggggtttggcctactgtcacagaaggaaagtcttgcatcgggatctgaaaccccagaatctgttgatcaatgaaaagggcgaactcaagttggccgactttggtctcgcccgggcaaaaagcgtgcctaccaagacctacagtaatgaagtagtgacactatggtaccgtccacccgacgtcctgctgggctccagcgaatatagcactcaaatagacatgtggggggtgggatgcatctttttcgagatggcctccggaagacccctattcccagggtctaccgtggaggatgaactacatcttatttttcggctgctcgggacccctagtcaggaaacttggccaggtatcagctctaatgaggaattcaaaaactacaatttcccaaagtacaagccgcagccactaatcaaccacgctccacggctggacagcgaaggcatcgaactgattaccaagttcctacagtatgaatcgaagaaacgtgtgtccgccgaagaagcaatgaaacatgtctactttagaagccttgggccacggatccacgcacttcctgaaagtgtttctatcttttcactgaaggagatccagctgcagaaagaccctggctttagaaattccagttacccagagacagggcatggaaaaaaccgccgacagtctatgctgttctag

SEQ ID NO: 130084 - DNA, 1572 bp, Artificial Sequence
  derived and/or modified sequence
atgaagaagttcaagaggcggctgagcctgaccctgcggggcagccagaccattgatgagagcctgtctgagctggccgagcagatgaccatcgaggagaacagcagcaaggacaatgagcccatcgtgaagaatggccggccccccaccagccacagcatgcacagcttcctgcaccagtacacaggcagcttcaagaagccacccctgcggcggccccacagcgtgattggaggcagcctgggcagcttcatggccatgcccagaaatggcagccggctggacatcgtgcatgagaacctgaagatgggcagtgatggagagagtgaccaggccagcggcaccagcagtgatgaggtgcagagccccaccggggtgtgcctgaggaaccgcatccaccggcgcatctccatggaggacctgaacaagaggctgagcctgcctgctgacatccgcatcccagatggctacctggagaagctgcagatcaacagccccccatttgaccagcccatgagccgccgcagcagaagagccagcctgtctgagatcggctttgggaagatggagacctacatcaagctggagaagctgggggagggcacctacgccaccgtgtacaagggccgcagcaagctgacagagaacctggtggccctgaaggagatccggctggagcacgaggagggcgccccctgcacagccatccgggaggtgtccctgctgaaggacctgaagcacgccaacatcgtgaccctgcatgacatcgtgcacacagacaagagcctgaccctggtgtttgagtacctggacaaggacctgaagcagtacatggatgactgtggcaacatcatgtccatgcacaacgtgaagctgttcctgtaccagatcctgcggggcctggcctactgccacaggaggaaggtgctgcaccgggacctgaagccccagaacctgctgatcaatgagaagggggagctgaagctggccgactttggcctggcccgggccaagtctgtgcccaccaagacctacagcaatgaggtggtgaccctgtggtaccggcccccagatgtgctgctgggcagcagcgagtacagcacccagattgacatgtggggcgtgggctgcatcttctttgagatggccagcggccggcccctcttccctggcagcacagtggaggatgagctgcacctgatcttccggctgctgggcacccccagccaggagacctggccaggcatcagcagcaatgaggagttcaagaactacaacttccccaagtacaagccccagcccctcatcaaccacgccccccggctggacagcgagggcatcgagctgatcaccaagttcctgcagtatgagagcaagaagagggtgtctgctgaggaggccatgaagcacgtgtacttccgcagcctgggcccccgcatccacgccctgcctgagagcgtgtccatcttcagcctgaaggagatccagctgcagaaggaccccggcttcaggaacagcagctacccagagactggacatggcaagaacagacggcagagcatgctgttctag

SEQ ID NO: 130085 - DNA, 1572 bp, Artificial Sequence
  derived and/or modified sequence
atgaagaagttcaagcggcggctgagcctgaccctgcggggcagccagactatcgacgaaagcctgtcggaattggccgagcaaatgaccatcgaagaaaattcgagcaaagacaatgaacctattgttaagaacggccgacccccaacatcccactctatgcactctttccttcaccaatacactggcagcttcaagaagccgccactccggcgaccacactctgtcatcggtggaagtcttggctcttttatggctatgcccagaaatggctccagactcgacatagtacatgagaaccttaagatgggatccgatggggagtccgatcaggcctcaggaacatccagcgatgaggtccagagcccaacaggtgtctgtcttcggaatagaatccaccgcaggatctcgatggaggacttgaacaagcgcctgtctctccccgccgatatccgcattccggatggctatctcgagaagctgcagatcaattcaccaccctttgaccagcctatgtcccgacgtagtcggagagcttccctcagtgaaatcggtttcggcaaaatggagacatacatcaagctggaaaagctgggcgaagggacctatgccacagtctataagggtcgctcaaagttgaccgaaaacctggtggccctgaaagagatccgtttggagcacgaagaaggagccccttgtacggctattcgggaggtgagcctgcttaaggacctgaagcacgctaacattgtgacactgcacgacatcgtacatactgacaaaagtctgacgctcgtgttcgagtacctggacaaagacttaaaacagtatatggacgactgtggcaacatcatgagtatgcacaacgtgaaactctttctctatcagattcttaggggactagcctactgccataggcgaaaagtgctgcatagggacctcaagcctcaaaacttgctaatcaatgaaaagggcgaactaaagcttgccgacttcgggctggcgagggccaagagtgtgcctaccaaaacatattccaatgaagtcgtgacactctggtatagaccccctgacgtgttattgggatcatctgaatacagtacacagatagacatgtggggggtaggctgtattttctttgagatggcaagcggaaggccgctgttcccaggatccaccgtcgaagatgagctccacctgatcttccgcttgctgggcacgccgagtcaagagacctggcctggaatatcttccaacgaagaatttaagaattataactttcccaaatacaaaccccagcccttgatcaaccatgcacctcggcttgatagcgaggggattgaactcatcacgaagttcctccaatacgaatcaaaaaagcgggtgtcagcagaggaggctatgaaacatgtgtacttccgcagcctaggaccacgaatccacgcactgcccgagtcggtgtcaatcttcagcctcaaagaaattcagttgcagaaggacccagggttcaggaattccagttaccccgagaccgggcacgggaaaaatagaaggcagtccatgctgttctag

SEQ ID NO: 130086 - DNA, 1572 bp, Artificial Sequence
  derived and/or modified sequence
atgaagaaatttaaacgtagactgtccctgacgctcaggggctcccagacaatcgacgagagtctcagcgaattggccgagcagatgaccattgaagaaaactcttctaaagataatgaaccaattgttaagaacggacggccacccacctcccatagcatgcacagcttcttacatcagtatacagggtcatttaaaaagcccccattacgaaggccacattcagtgatcggaggctctttagggagctttatggcaatgccacgaaacggttcccggctcgatattgtgcacgagaatctaaagatggggtcagatggcgagagcgaccaggcatcaggcacctcaagtgacgaagtgcagtctccaaccggcgtgtgcctccgaaaccgaatccaccgtcgtatatccatggaggatctgaacaaacggctatctctgcctgctgatataaggatcccagacggctaccttgaaaaactgcagatcaactccccacccttcgaccagccaatgtcccgcagatcacgtagggcctcactgtccgaaataggcttcggcaagatggagacttacattaaactggaaaagttgggggagggcacctacgcgaccgtgtataagggacggtccaagttgacagagaatctcgtggctcttaaagagattcgactggaacacgaggaaggggcaccgtgcaccgctattagggaagtgagtctactcaaggacctaaaacacgctaacattgttacgctgcacgacattgtacacaccgacaaaagcctaaccctcgtgtttgagtacctggacaaggacctgaaacaatacatggacgattgcggaaatatcatgagtatgcacaatgtgaagttgttcctgtatcagattctcaggggtctcgcctattgccaccgcagaaaggtgctgcaccgggacttaaaacctcagaaccttctgattaatgagaaaggggaactgaaacttgcagatttcgggttggccagagctaagtcagttcccacaaaaacctatagtaacgaggtggtcacactgtggtataggccccctgacgtacttctcgggagttccgagtattcgactcagattgatatgtggggggtcggatgtattttctttgagatggcatcagggcgtcccctttttcctggcagtacggttgaagacgagctgcatctgatctttcgcttactcgggacacccagccaagagacgtggcctggcataagtagtaatgaagaattcaagaactacaactttcctaaatataaaccccagccgctgataaaccatgcacctagactggactcagaaggaattgagttgatcaccaagttcctccagtatgagagtaagaaacgggtgagcgccgaagaggctatgaagcacgtgtactttcggtcactgggccctcgtattcacgcgctgcctgaatcagtgagcattttctctctgaaggaaattcagctccagaaagacccgggtttccggaattcctcttacccggagaccgggcacggaaagaacagacgccagtctatgctgttttag

SEQ ID NO: 130087 - DNA, 474 bp, Artificial Sequence
  derived and/or modified sequence
atgagcatgcacaacgtgaagatcttcatgttccagctgctgagaggcctggcctactgccaccacagaaagatcctgcacagagacctgaagccccagaacctgctgatcaacgagagaggcgagctgaagctggccgacttcggcctggccagagccaagagcgtgcccaccaagacctacagcaacgaggtggtgaccctgtggtacagaccccccgacgtgctgctgggcagcaccgagtacagcacccccatcgacatgtggggcgtgggctgcatccactacgagatggccaccggcagacccctgttccccggcagcaccgtgaaggaggagctgcacctgatcttcagactgctgggcacccccaccgaggagacctggcccggcgtgaccgccttcagcgagttcagaacctacagcttcccctgctacctgccccagcccctgatcaaccacgcccccagatag

SEQ ID NO: 130088 - DNA, 3961 bp, Artificial Sequence
  derived and/or modified sequence
agtagagacagggtttcaccatattggccagtctggtcttgaactcccgacctcaggtggtccacccaccttgacctcccacagtgctgggattacagacatgagccaccgcgcctagccactttgaaagattttaaatgggcaagcgacatcatcagaaagcagctgagaaagttaagtctaggacgctgatggcagttggattggaggccaagtattattctcaattagcagcaaggaaactgaggcatggggtgttttttcaggtcacagctactaagtggggtttcttccatgacaccaaactgcagagaattttggagagcaaggctagacaccgtgtgttcctcactgcaggacatttctgattggagtgagactctaggagacaatggcgtatttgtctggagcaagggcgaccctgatccccactttgcctcctgagcagacatccaacaggtttgcccaaattgctcccggaaggccttccccgcctacttcctgcattccaaacagaggctgtgggaatcctcttggagctctgggactgtccagagcatctgtttgttggcagggtgactgcaggcctggctatcctcatttctggccactctgaaggtttcaggcctgcagcctctctcatccaggctggggcagggcaaggttgtgaggaggccccaaggcttctgctgctgacgccgccacagctccaggcagctaaggggtgactggcttcccagtcagacattggctttgggaaactggaaacatacgtgaaactggacaaactgggagagggcacctatgccacagtcttcaaagggcgcagcaaactgacggagaaccttgtggccctgaaagagatccggctggagcacgaggagggagcgccctgcactgccatccgagaggtgtctctgctgaagaacctgaagcacgccaatattgtgaccctgcatgacctcatccacacagatcggtccctcaccctggtgtttgagtacctggacagtgacctgaagcagtatctggaccactgtgggaacctcatgagcatgcacaacgtcaagattttcatgttccagctgctccggggcctcgcctactgtcaccaccgcaagatcctgcaccgggacctgaagccccagaacctgctcatcaacgagaggggggagctgaagctggccgactttggactggccagggccaagtcagtgcccacaaagacttactccaatgaggtggtgaccctgtggtacaggccccccgatgtgctgctgggatccacagagtactccacccccattgatatgtggggcgtgggctgcatccactacgagatggccacagggaggcccctcttcccgggctccacagtcaaggaggagctgcacctcatctttcgcctcctcgggacccccacagaagagacgtggcccggcgtgaccgccttctctgagttccgcacctacagcttcccctgctacctcccgcagccgctcatcaaccacgcgcccaggtagcccctgcgcccgccgcccctcctgctgcggccctggctctcccatccccaatcaggcacagcctgtgtccgcgccttctccttgcaggttggatacggatggcatccacctcctgagcagcctgctcctggtgagtgtcctcccggcggggcccagggagaggcagccaaagagccaggtccctgtgccccatgccgggcctacgccccaacttctgtggctcgtgtgcttacacgtctttgaaacatctcccctgtactctccacccccaaggccaaggggtggcctccatacacatcctctggagtctgtgcactgcgagcccaaacccgttacttagctgtgtagctctgggcaagttacagagctcctccatgcctcagtttcctcagctgcaaagtgggattaatacctattttataagatggccgtgaggatacattgagatgacgggacacacttagtgtggtgcctgtcttgtaaggcacacgatgaagggttgttatcggcactacgcttcctgttacggatgttctccatctgatcatggttggtttgcatctgtatttctatcccaagagaaggtcactctcctgaagtttcatttctggtttttcctggtggctggagaccgaggagccttcccctgagtcttgagatggcctgaggttgggtttgtggtaggggctggaggctgacctggggcttctcctgttagcctcaagcctcacccaccttggtgctctaaccagcactggagtcctgctgcccagagggtttgcagccccccagccgggcccaatagccccaccctgtgcctttcagtatgaatccaagagtcgcatgtcagcagaggctgccctgagtcactcctacttccggtctctgggagagcgtgtgcaccagcttgaagacactgcctccatcttctccctgaaggagatccagctccagaaggacccaggctaccgaggcttggccttccagcagccaggacgagggaagaacaggcggcagagcatcttctgagccacgcccaccttgctgtggccaagggacaagagatcacatggagcacaaattcgggtaggatggagcctgtgtggccctcggaggactgaagaacgagggctgacagccagcctggaagaccgcttggcagcccttctggccacggctgtttcttctttgtgcttcccgtgtgcctccccagtagccctcacctgcataccaacccctcctttacccacgttggggctggcataagctgcttccctgagaggacatgaggggggggcggtcctcgtaccctctcccaccctggtgtttgggcacctgcgtgggatgcacacggatgacagaatcaaggcgccaggatgggcactctgccctggatacaggctctaccctcctcccccaggacctgcctagtgccagtttggtagtccccctttctggccccttggagcccacacacgtttcatctttttcccctctgagagcaagaagagacatggcatgttctctgggaccctggaatcctaggtacccacatgtgtgccaaagcctaccccacctggcaggtgtcccacagcaacagaaggaatagtagtccccactctttccatcagccctaccctaccctcattccccgacaccctctggcttgaaccatggctgagcagtgccggcatacgctttgctggcatgcttggatgcccagctgtgtccagaggtggcctgggaccgccagttgcacgcctgccacctcagccagcccccgcccagctcatcagtctgaatggagttgccttaaattggcaggtggtaccgtactcactgcccttggagctgtgaccggctcctgcctgtccaccccttcccgaggtggctcctgcttaccttatcatcccagggctctgattagccaggcctggtcagggtcctggggacggcacccagatatgcagagtcaccctgacactggtgccaggctgacctcagctcccgaaggctcgcacagcctccccatccttccttcccagcccttgtggctctgtccacctgatcccaataccagcttcccccagcccctgccaccccagagggcggccacgacagggagaggtgtagatgccaccatctgagggagaggaacgtggaacaggagcaggctctgatgctgagaggcttgcctccgggggctggaagcctgggtggccggggcccctgaagaaggctcccctctgtatcccccaggtctcctcaacactgggctgatcctgaatggcacaggccaaggggaggccagcctcgcctttctacccaggccccctgccctgcccacctcaggcccccaccctccactcctccccacggtactgtgaacgtcgtgtgactcagtgcagagacagataatatatttaattcatgtacag

SEQ ID NO: 130089 - DNA, 474 bp, Artificial Sequence
  derived and/or modified sequence
atgagtatgcataacgtgaagatcttcatgttccagctgctgcggggattagcttactgccatcaccgtaagatattacacagggatttgaagccccagaacctcctcattaatgagcgtggcgagcttaaactcgccgactttggcttagcacgggctaagtcagttccaactaagacatatagtaacgaggtggtgactctgtggtataggcccccagacgttctgctcggcagtactgagtacagtacccccattgatatgtggggagtgggctgcatacactacgagatggccacgggacgacccctatttcctgggtcaaccgtcaaggaagagctgcacttgatatttcgtctcctggggactcccaccgaggaaacctggcccggggtgaccgctttttccgagttcaggacatattccttcccttgttacttgccacagcctctcataaatcatgccccaagatag

SEQ ID NO: 130090 - DNA, 474 bp, Artificial Sequence
  derived and/or modified sequence
atgtccatgcacaacgtgaagatcttcatgttccagctgctgcggggcctggcctactgccaccacaggaagatcctgcaccgggacctgaagccccagaacctgctgatcaatgaaagaggagagctgaagctggccgactttggcctggcccgggccaagtctgtgcccaccaagacctacagcaatgaggtggtgaccctgtggtaccggcccccagatgtgctgctgggcagcacagagtacagcacccccatcgacatgtggggcgtgggctgcatccactatgagatggccaccggccggcccctcttccctggcagcacagtgaaggaggagctgcacctgatcttccggctgctgggcacccccacagaggagacctggccaggagtgacagccttcagcgagttccgcacctacagcttcccctgctacctgccccagcccctcatcaaccacgcccccaggtag

SEQ ID NO: 130091 - DNA, 474 bp, Artificial Sequence
  derived and/or modified sequence
atgagcatgcacaacgtgaagatcttcatgttccagctgctgcgggggcttgcttattgccatcatagaaagatcctgcaccgagatcttaagccccagaatctgcttatcaatgaacgtggcgagttgaaactggcagatttcgggctggctagagctaagtcggtgcccactaaaacctactccaatgaagtcgtgacactgtggtaccggccccccgacgtgcttctagggtctactgagtattctaccccgatagatatgtggggcgtgggctgcattcactacgaaatggccactgggcggcccttgttccctgggtcgactgtgaaagaggagctgcacttgatcttcaggctcctgggcacccccacagaagagacatggcccggtgttactgcgtttagcgaatttcgcacgtattcattcccctgctaccttcctcagccactgattaatcatgccccccggtag

SEQ ID NO: 130092 - DNA, 474 bp, Artificial Sequence
  derived and/or modified sequence
atgagcatgcacaatgtcaagatcttcatgttccaactactcagaggcctggcctactgtcaccatagaaagatcctgcaccgcgatttgaagccccagaatctcctgatcaacgagagaggcgagttgaagctcgccgacttcgggttagcacgggctaagtctgttcccacaaagacctactccaacgaggttgtgactttgtggtaccgaccccctgacgtactgctgggtagcacagagtattctacccctatcgatatgtggggggtgggctgtattcactatgaaatggcgactggcaggcctctttttccagggagcaccgtgaaagaggagctgcacttgatcttccggttactggggacgcccactgaggagacctggcctggagtcaccgcattttcagagtttagaacatattcttttccatgctacctgccacagcctcttatcaaccatgccccacgttag

SEQ ID NO: 130093 - protein, 344 aa, Artificial Sequence
  derived and/or modified sequence
MAAAGARPVELGFAESAPAWRLRSEQFPSKVGGRPAWLGAAGLPGPQALACELCGRPLSFLLQVYAPLPGRPDAFHRCIFLFCCREQPCCAGLRVFRNQLPRKNDFYSYEPPSENPPPETGESVCLQLKSGAHLCRVCGCLGPKTCSRCHKAYYCSKEHQTLDWRLGHKQACAQPDHLDHIIPDHNFLFPEFEIVIETEDEIMPEVVEKEDYSEIIGSMGEALEEELDSMAKHESREDKIFQKFKTQIALEPEQILRYGRGIAPIWISGENIPQEKDIPDCPCGAKRILEFQVMPQLLNYLKADRLGKSIDWGILAVFTCAESCSLGTGYTEEFVWKQDVTDTP

SEQ ID NO: 130094 - DNA, 1035 bp, Artificial Sequence
  derived and/or modified sequence
atggctgctgccggggcgaggcctgtcgaactgggctttgccgagtctgcccccgcttggcgcctgaggtctgaacagttcccctccaaggtcggggggagaccggcgtggcttggggcagccggtcttcccggcccacaggcattagcctgtgagctgtgcggacggccgttaagcttccttctgcaggtctatgcacccctgcccggtaggcccgacgcctttcatcgctgcatctttttgttttgttgtagggagcagccctgttgcgctggcctgagggtctttcgcaaccaactcccccgaaagaacgatttttactcctacgagccaccgtcagagaatccacctccagagactggagagtccgtgtgccttcagctgaagtcaggggcacacctgtgtcgtgtttgtggttgtttgggaccgaaaacctgtagtcgttgtcataaagcttattattgctcaaaggagcatcagactttggattggagactgggacacaaacaggcctgtgcccagcctgaccatcttgaccacataataccagaccacaactttctatttcccgagttcgagatcgttattgaaacagaggatgaaatcatgcctgaggtggtcgagaaagaagactattccgaaatcatcgggagcatgggggaagctctcgaggaggaattggacagcatggccaagcacgaaagccgggaagacaagatttttcagaaattcaagacccagattgctttagagcctgagcagatccttcggtatgggagaggcatcgcgccaatatggatttctggcgagaacattcctcaagaaaaagatattccggactgtccctgtggggcaaagaggatcctggagttccaagtgatgcctcagctgcttaactatctgaaggctgaccggctcggaaagtcaatcgactgggggatcctggccgtcttcacatgtgctgagtcttgcagcctaggcaccggctatacagaggagttcgtgtggaagcaagacgtaacagatactccctag

SEQ ID NO: 130095 - DNA, 1035 bp, Artificial Sequence
  derived and/or modified sequence
atggctgctgctggggcccggcctgtggagctgggctttgctgagagcgccccagcctggaggctgcggtctgagcagttccccagcaaggtgggcggccgcccagcctggctgggcgctgctggcctgcccggcccccaggccctggcctgtgagctgtgtggccggcccctgtccttcctgctgcaggtgtatgcccccctgcccggccgcccagatgccttccaccgctgcatcttcctgttctgctgccgggagcagccctgctgtgccggcctgcgggtcttcaggaaccagctgcccaggaagaatgacttctacagctatgagcccccatctgagaaccccccacctgagaccggggagagcgtgtgcctgcagctgaagagcggggcccacctgtgccgggtgtgtggctgcctgggccccaagacctgcagccgctgccacaaggcctactactgcagcaaggagcaccagaccctggactggaggctgggccacaagcaggcctgtgcccagcctgaccacctggaccacatcatcccagaccacaacttcctgtttcctgagtttgagatcgtcatcgagacagaagatgagatcatgcctgaggtggtggagaaggaggactacagcgagatcatcggctccatgggagaggccctggaggaggagctggacagcatggccaagcatgagagccgggaggacaagatcttccagaagttcaagacccagatcgccctggagcctgagcagatcctgcgctatggccggggcatcgcccccatctggatcagcggggagaacatcccccaggagaaggacatcccagactgcccctgtggggccaagaggatcctggagttccaggtgatgccccagctgctgaactacctgaaggctgaccggctgggcaagagcattgactggggcatcctggccgtgttcacctgtgccgagagctgcagcctgggcaccggctacacagaggagtttgtgtggaagcaggatgtgacagacaccccctag

SEQ ID NO: 130096 - DNA, 1035 bp, Artificial Sequence
  derived and/or modified sequence
atggccgccgccggcgcccggcccgtggagctgggcttcgccgagagtgcaccagcctggagactgcgcagcgagcaattcccttccaaggtgggaggacggcccgcatggctcggagcagccggactgcccggacctcaggctttggcctgtgaactgtgcggtagaccactgtcattcttactccaggtttacgcccctctccccggccgacccgacgctttccatcgttgcatcttcctcttttgttgcagagagcaaccgtgctgtgctggcttgagagtatttcgcaaccagttacctcgaaagaacgatttttatagctacgagccaccgtccgagaaccctcccccagaaactggtgaaagtgtgtgtttgcaactgaagtccggagcccacctctgcagagtgtgtggatgtctgggccctaaaacctgctccaggtgccataaggcctattactgcagtaaggagcaccagactttagactggaggcttggccacaagcaggcatgtgcacagcccgatcatcttgatcatatcattccagaccacaattttctatttccggagttcgaaattgtcatcgaaacagaagatgaaatcatgcctgaggttgtagaaaaagaagattacagcgaaattatcggtagtatgggagaggctttagaagaagagcttgacagcatggcgaaacacgagagccgcgaggataagatcttccaaaagtttaagacccaaatcgcactggagccagaacaaatacttcgatacggccgggggatcgcccccatctggattagcggagagaacattcctcaggagaaggacattccagattgtccctgcggggccaagaggattcttgagtttcaagtcatgccccaactcctgaactacctcaaggcggacagattgggtaagagcatcgattggggcatcctggctgtgttcacatgcgctgaaagctgcagtctgggtaccgggtacaccgaggaattcgtatggaagcaggatgtaaccgacacaccatag

SEQ ID NO: 130097 - DNA, 1035 bp, Artificial Sequence
  derived and/or modified sequence
atggccgctgctggcgcacgaccagtagaactgggattcgccgaatcggcgcctgcatggaggttgcggtccgaacaattcccatccaaagttggcggacgaccggcatggctgggggcagccggactcccgggtcctcaagctctggcttgtgaactttgcggtcggccactatctttcttgcttcaggtgtacgcgcctttgcctggcaggcccgacgcttttcatcgctgcattttcctgttttgctgccgtgagcagccttgttgtgctggccttagggtctttcgcaaccaactgcctagaaagaacgacttttactcctatgaaccccctagcgaaaacccaccaccagagaccggagaatccgtctgtctacagctgaagtcaggcgcacacttatgccgggtatgtggctgtctcggccctaagacctgcagcaggtgccacaaggcctactactgctcaaaagaacaccagactttagactggagactgggccacaagcaggcctgcgcccagcccgaccacctggatcacattatccccgatcataatttcctgtttccggagttcgaaattgtcattgagactgaagacgagataatgccagaggtcgtggaaaaggaagactacagcgagataattggatctatgggcgaagccctggaagaggagctcgattccatggctaaacacgagtccagggaagataaaattttccagaaattcaagactcaaattgcgctcgaaccagagcaaattttgagatacgggaggggcatagctcccatctggattagtggcgagaatattccccaggaaaaggacatccccgattgcccttgcggcgctaaacgtatacttgaattccaagtcatgcctcaactcttaaattacttgaaggctgaccgcttgggcaagtctatcgattgggggattctggccgtgttcacatgcgccgaatcctgtagtctgggaactggctacacagaagagtttgtttggaagcaggacgtgacagatacaccgtag

SEQ ID NO: 130098 - DNA, 3378 bp, Artificial Sequence
  derived and/or modified sequence
tcttgccttccggcccggcgcccgatttccgccttccgacccagctgtgggctgcgccccacgccagcccgcgccccgcatggctgccgccggggccaggcctgtggagctgggcttcgccgagtcggcgccggcgtggcgactgcgcagcgagcagttccccagcaaggtgggcgggcggccggcatggctgggcgcggccgggctgccggggccccaggccctggcctgcgagctgtgcggccgcccgctctccttcctgctgcaggtgtatgcgccgctgcctggccgcccggacgccttccaccgctgcatcttcctcttctgctgccgcgagcagccgtgctgtgccggcctgcgagtttttaggaatcaactacccaggaaaaacgatttttactcatatgagccaccttctgagaatcctcccccagaaacaggagaatcagtgtgtctccagcttaagtctggtgctcatctctgcagggtttgtggctgtttaggccccaaaacgtgctccagatgccacaaagcatattactgcagcaaggagcatcagaccctagactggagattgggacataagcaggcttgtgcacaaccagatcatctggaccatataattccagaccacaacttcctttttccagaatttgaaattgtaatagaaacagaagatgagattatgcctgaggttgtggaaaaggaagattactcagagattatagggagcatgggtgaagcacttgaggaagaactggattccatggcaaaacatgaatccagggaagataaaatttttcagaagtttaaaactcagatagcccttgaaccagaacagattcttagatatggcagaggtattgcccccatctggatttctggtgaaaatattcctcaagaaaaggatattccagattgcccctgtggtgccaagagaatattggaattccaggtcatgcctcagctcctaaactacctgaaggctgacagactgggcaagagcattgactggggcatcctggctgtcttcacctgtgctgagagctgcagcttgggtactggctatacagaagaatttgtgtggaagcaggatgtaacagatacaccgtaaaggcatcttaaagccttgaaaaatgttaataatcttttataccttgcaattccatttctgggattttatcctaaggaaatacttataccaaaaatagaggtgcagagatgttgacagattgcttacacagtgtctacttattagtgaaacaaaagtgtccagtgacagggaattaaataaattttggtacatccacagaggaaggctacacagtcttaattataacacctatattgacaacagacataccattataggtggtattcatggtatgatcctattcttgtaaaaatatttgtatgtatgcacagaaatctgcaaagatgtacacttagtgaactggttaccaacgaatggtgggactaactaaaatggtctttttacttatatgtgcatttctttttataataaaaatgggttatatgcctaatgaagtcaaaccatctcactctgagcatttcccaccctaggtttttaaaacacaaaaatacttaggtaaaactcccaacaaacttgtctgatcattagctgattatcacaggctctagtatgtactggaagcccagaatatttgagaaataccaaacctcaggttggtgagtatgatgaacaggaaacccagtaattctgaagcagcagtatcacagttggcaggatgaggaacaacagtggctttgtgatcacagaactggaatttaaagaggctggaccttcagaactgatcttggtcagccagcggccctgcttacagatgagacactgaaaggcaaaaggcgatggtcttccctttccgtgtcagcattgtatacaggttccctatcgcacatacaagggttatggaatgtaagccaaaataagggtctggcctaggaggcagcagcctgaggaaaggaaggccctgaagtcagttttcaaagggctgacccttggcctattatgtttctgatacatctgtttaagcaagcggctcctaagactacactaaggtttcttccatcccctagcagctcacagttgacaattcccagttctctcagcaccagtgatgcctgcccttaagacacattgctgttgatcagtgcttgaatactgacggctaattctgataaatttctcaggcttatttccttaatctacattggctcacattgtcccctaacacatccctgttaactgaaatgcattgccaccataaatcctcacgttttcataggtaacatcacttgctaatgtaattgtctacttggctattttatttgtaatttaaaaagttctgtcctagtagtccatattatataagtatacatatgcaatttgtattaattgtataagatagttatacatagcaccatatgggaaactgcagtatggagtttctcccatggggaggttatcagctacttaagagctagaggatactagtttcgaacctgggatggctaaatctatgaaaatcacctataactatggtgtcacagccctgtggctactggagtaagttgtcatcaactagtgacaagagctggtcgcaacacttagtaggaagcacagtggcataaggaaacctggactagtggggcctttatatctaaaattatgtattattccttataggcagaatctgtaagtacgttatgactgctaatgacttttaaagcaaacatgttaacgatctttctatggtaaaaactgttatttggggacatcaccagatgatgtggacattcttgcaggtattttggcatacccaggcaagctgtcattggtgtatattccagttaacctctggagatgatcgtaacagtttacagggcctttccatttgggatggatatatcaagagggagacaaactggtccaaatcaccagaaagaaaatctcacagcaccgacttggcatctgtgttaaaaaatagcaactatatttaaaataaactgtacaacataaaaaatttaaattaaaaaatgcattaagcaagttgcctttagaaatgtgaagacattttaaaacactacaagataatgagcaagtctcacctacataatcatggctccacagacggtgccagtccatgcatccaccatttctcaacacctacaaagttttaagatctgcttggttcagatactgtccagccacagcagctccctctgctgtagagagcagcatattcagctttgcctttttatttcagatactgaatatcctttggcaatttcagatatcacagcaaaaaaaaaaaaagttccaagtgtttttggcaa

SEQ ID NO: 130099 - DNA, 1035 bp, Artificial Sequence
  derived and/or modified sequence
atggccgccgccggcgccagacccgtggagctgggcttcgccgagagcgcccccgcctggagactgagaagcgagcagttccccagcaaggtgggcggcagacccgcctggctgggcgccgccggcctgcccggcccccaggccctggcctgcgagctgtgcggcagacccctgagcttcctgctgcaggtgtacgcccccctgcccggcagacccgacgccttccacagatgcatcttcctgttctgctgcagagagcagccctgctgcgccggcctgagagtgttcagaaaccagctgcccagaaagaacgacttctacagctacgagccccccagcgagaaccccccccccgagaccggcgagagcgtgtgcctgcagctgaagagcggcgcccacctgtgcagagtgtgcggctgcctgggccccaagacctgcagcagatgccacaaggcctactactgcagcaaggagcaccagaccctggactggagactgggccacaagcaggcctgcgcccagcccgaccacctggaccacatcatccccgaccacaacttcctgttccccgagttcgagatcgtgatcgagaccgaggacgagatcatgcccgaggtggtggagaaggaggactacagcgagatcatcggcagcatgggcgaggccctggaggaggagctggacagcatggccaagcacgagagcagagaggacaagatcttccagaagttcaagacccagatcgccctggagcccgagcagatcctgagatacggcagaggcatcgcccccatctggatcagcggcgagaacatcccccaggagaaggacatccccgactgcccctgcggcgccaagagaatcctggagttccaggtgatgccccagctgctgaactacctgaaggccgacagactgggcaagagcatcgactggggcatcctggccgtgttcacctgcgccgagagctgcagcctgggcaccggctacaccgaggagttcgtgtggaagcaggacgtgaccgacaccccctag

SEQ ID NO: 130100 - protein, 941 aa, Artificial Sequence
  derived and/or modified sequence
MGQACGHSILCRSQQYPAARPAEPRGQQVFLKPDEPPPPPQPCADSLQDALLSLGSVIDISGLQRAVKEALSAVLPRVETVYTYLLDGESQLVCEDPPHELPQEGKVREAIISQKRLGCNGLGFSDLPGKPLARLVAPLAPDTQVLVMPLADKEAGAVAAVILVHCGQLSDNEEWSLQAVEKHTLVALRRVQVLQQRGPREAPRAVQNPPEGTAEDQKGGAAYTDRDRKILQLCGELYDLDASSLQLKVLQYLQQETRASRCCLLLVSEDNLQLSCKVIGDKVLGEEVSFPLTGCLGQVVEDKKSIQLKDLTSEDVQQLQSMLGCELQAMLCVPVISRATDQVVALACAFNKLEGDLFTDEDEHVIQHCFHYTSTVLTSTLAFQKEQKLKCECQALLQVAKNLFTHLDDVSVLLQEIITEARNLSNAEICSVFLLDQNELVAKVFDGGVVDDESYEIRIPADQGIAGHVATTGQILNIPDAYAHPLFYRGVDDSTGFRTRNILCFPIKNENQEVIGVAELVNKINGPWFSKFDEDLATAFSIYCGISIAHSLLYKKVNEAQYRSHLANEMMMYHMKVSDDEYTKLLHDGIQPVAAIDSNFASFTYTPRSLPEDDTSMAILSMLQDMNFINNYKIDCPTLARFCLMVKKGYRDPPYHNWMHAFSVSHFCYLLYKNLELTNYLEDIEIFALFISCMCHDLDHRGTNNSFQVASKSVLAALYSSEGSVMERHHFAQAIAILNTHGCNIFDHFSRKDYQRMLDLMRDIILATDLAHHLRIFKDLQKMAEVGYDRNNKQHHRLLLCLLMTSCDLSDQTKGWKTTRKIAELIYKEFFSQGDLEKAMGNRPMEMMDREKAYIPELQISFMEHIAMPIYKLLQDLFPKAAELYERVASNREHWTKVSHKFTIRGLPSNNSLDFLDEEYEVPDLDGTRAPINGCCSLDAE

SEQ ID NO: 130101 - DNA, 2826 bp, Artificial Sequence
  derived and/or modified sequence
atgggccaggcctgcggccacagcatcctgtgcagaagccagcagtaccccgccgccagacccgccgagcccagaggccagcaggtgttcctgaagcccgacgagccccccccccccccccagccctgcgccgacagcctgcaggacgccctgctgagcctgggcagcgtgatcgacatcagcggcctgcagagagccgtgaaggaggccctgagcgccgtgctgcccagagtggagaccgtgtacacctacctgctggacggcgagagccagctggtgtgcgaggaccccccccacgagctgccccaggagggcaaggtgagagaggccatcatcagccagaagagactgggctgcaacggcctgggcttcagcgacctgcccggcaagcccctggccagactggtggcccccctggcccccgacacccaggtgctggtgatgcccctggccgacaaggaggccggcgccgtggccgccgtgatcctggtgcactgcggccagctgagcgacaacgaggagtggagcctgcaggccgtggagaagcacaccctggtggccctgagaagagtgcaggtgctgcagcagagaggccccagagaggcccccagagccgtgcagaacccccccgagggcaccgccgaggaccagaagggcggcgccgcctacaccgacagagacagaaagatcctgcagctgtgcggcgagctgtacgacctggacgccagcagcctgcagctgaaggtgctgcagtacctgcagcaggagaccagagccagcagatgctgcctgctgctggtgagcgaggacaacctgcagctgagctgcaaggtgatcggcgacaaggtgctgggcgaggaggtgagcttccccctgaccggctgcctgggccaggtggtggaggacaagaagagcatccagctgaaggacctgaccagcgaggacgtgcagcagctgcagagcatgctgggctgcgagctgcaggccatgctgtgcgtgcccgtgatcagcagagccaccgaccaggtggtggccctggcctgcgccttcaacaagctggagggcgacctgttcaccgacgaggacgagcacgtgatccagcactgcttccactacaccagcaccgtgctgaccagcaccctggccttccagaaggagcagaagctgaagtgcgagtgccaggccctgctgcaggtggccaagaacctgttcacccacctggacgacgtgagcgtgctgctgcaggagatcatcaccgaggccagaaacctgagcaacgccgagatctgcagcgtgttcctgctggaccagaacgagctggtggccaaggtgttcgacggcggcgtggtggacgacgagagctacgagatcagaatccccgccgaccagggcatcgccggccacgtggccaccaccggccagatcctgaacatccccgacgcctacgcccaccccctgttctacagaggcgtggacgacagcaccggcttcagaaccagaaacatcctgtgcttccccatcaagaacgagaaccaggaggtgatcggcgtggccgagctggtgaacaagatcaacggcccctggttcagcaagttcgacgaggacctggccaccgccttcagcatctactgcggcatcagcatcgcccacagcctgctgtacaagaaggtgaacgaggcccagtacagaagccacctggccaacgagatgatgatgtaccacatgaaggtgagcgacgacgagtacaccaagctgctgcacgacggcatccagcccgtggccgccatcgacagcaacttcgccagcttcacctacacccccagaagcctgcccgaggacgacaccagcatggccatcctgagcatgctgcaggacatgaacttcatcaacaactacaagatcgactgccccaccctggccagattctgcctgatggtgaagaagggctacagagaccccccctaccacaactggatgcacgccttcagcgtgagccacttctgctacctgctgtacaagaacctggagctgaccaactacctggaggacatcgagatcttcgccctgttcatcagctgcatgtgccacgacctggaccacagaggcaccaacaacagcttccaggtggccagcaagagcgtgctggccgccctgtacagcagcgagggcagcgtgatggagagacaccacttcgcccaggccatcgccatcctgaacacccacggctgcaacatcttcgaccacttcagcagaaaggactaccagagaatgctggacctgatgagagacatcatcctggccaccgacctggcccaccacctgagaatcttcaaggacctgcagaagatggccgaggtgggctacgacagaaacaacaagcagcaccacagactgctgctgtgcctgctgatgaccagctgcgacctgagcgaccagaccaagggctggaagaccaccagaaagatcgccgagctgatctacaaggagttcttcagccagggcgacctggagaaggccatgggcaacagacccatggagatgatggacagagagaaggcctacatccccgagctgcagatcagcttcatggagcacatcgccatgcccatctacaagctgctgcaggacctgttccccaaggccgccgagctgtacgagagagtggccagcaacagagagcactggaccaaggtgagccacaagttcaccatcagaggcctgcccagcaacaacagcctggacttcctggacgaggagtacgaggtgcccgacctggacggcaccagagcccccatcaacggctgctgcagcctggacgccgagtag

SEQ ID NO: 130102 - DNA, 2058 bp, Artificial Sequence
  derived and/or modified sequence
atggtgctggtgctgcaccacatcctgatcgccgtggtgcagttcctgagaagaggccagcaggtgttcctgaagcccgacgagccccccccccccccccagccctgcgccgacagcctgcaggacgccctgctgagcctgggcagcgtgatcgacatcagcggcctgcagagagccgtgaaggaggccctgagcgccgtgctgcccagagtggagaccgtgtacacctacctgctggacggcgagagccagctggtgtgcgaggaccccccccacgagctgccccaggagggcaaggtgagattcaccgacgaggacgagcacgtgatccagcactgcttccactacaccagcaccgtgctgaccagcaccctggccttccagaaggagcagaagctgaagtgcgagtgccaggccctgctgcaggtggccaagaacctgttcacccacctggacgacgtgagcgtgctgctgcaggagatcatcaccgaggccagaaacctgagcaacgccgagatctgcagcgtgttcctgctggaccagaacgagctggtggccaaggtgttcgacggcggcgtggtggacgacgagagctacgagatcagaatccccgccgaccagggcatcgccggccacgtggccaccaccggccagatcctgaacatccccgacgcctacgcccaccccctgttctacagaggcgtggacgacagcaccggcttcagaaccagaaacatcctgtgcttccccatcaagaacgagaaccaggaggtgatcggcgtggccgagctggtgaacaagatcaacggcccctggttcagcaagttcgacgaggacctggccaccgccttcagcatctactgcggcatcagcatcgcccacagcctgctgtacaagaaggtgaacgaggcccagtacagaagccacctggccaacgagatgatgatgtaccacatgaaggtgagcgacgacgagtacaccaagctgctgcacgacggcatccagcccgtggccgccatcgacagcaacttcgccagcttcacctacacccccagaagcctgcccgaggacgacaccagcatggccatcctgagcatgctgcaggacatgaacttcatcaacaactacaagatcgactgccccaccctggccagattctgcctgatggtgaagaagggctacagagaccccccctaccacaactggatgcacgccttcagcgtgagccacttctgctacctgctgtacaagaacctggagctgaccaactacctggaggacatcgagatcttcgccctgttcatcagctgcatgtgccacgacctggaccacagaggcaccaacaacagcttccaggtggccagcaagagcgtgctggccgccctgtacagcagcgagggcagcgtgatggagagacaccacttcgcccaggccatcgccatcctgaacacccacggctgcaacatcttcgaccacttcagcagaaaggactaccagagaatgctggacctgatgagagacatcatcctggccaccgacctggcccaccacctgagaatcttcaaggacctgcagaagatggccgaggtgggctacgacagaaacaacaagcagcaccacagactgctgctgtgcctgctgatgaccagctgcgacctgagcgaccagaccaagggctggaagaccaccagaaagatcgccgagctgatctacaaggagttcttcagccagggcgacctggagaaggccatgggcaacagacccatggagatgatggacagagagaaggcctacatccccgagctgcagatcagcttcatggagcacatcgccatgcccatctacaagctgctgcaggacctgttccccaaggccgccgagctgtacgagagagtggccagcaacagagagcactggaccaaggtgagccacaagttcaccatcagaggcctgcccagcaacaacagcctggacttcctggacgaggagtacgaggtgcccgacctggacggcaccagagcccccatcaacggctgctgcagcctggacgccgagtag

SEQ ID NO: 130103 - DNA, 2826 bp, Artificial Sequence
  derived and/or modified sequence
atggggcaagcttgcggacactctattctctgtaggtcccagcagtacccggccgctaggccagcggagccacgggggcagcaggtgttcctgaaacctgacgagcctccccccccccctcagccatgcgcagacagtctccaggacgccctgctcagtttgggatctgtgatcgatatctctgggctgcaaagagccgttaaagaagcccttagcgctgttttgcctagagtcgaaacagtgtacacataccttctggacggcgaatcacaactggtatgtgaggatccccctcacgaactcccgcaagagggcaaggtgcgggaagctattattagtcagaagagacttggttgtaatggcctgggattctccgatttgccaggcaagccattggcgcggctcgtggcacctctggctcctgatactcaggtgctcgtaatgccattggcagataaagaggctggagccgtggctgcagtgattctggtacactgcggccagctgtccgacaatgaagagtggtccctacaggccgtggagaaacacactttggtcgccttgaggagagtacaggtgttacaacagcgcggtcccagagaggcccccagagcggtgcagaatccacccgaaggtacagccgaggaccagaagggaggcgctgcctatactgaccgtgaccgcaaaattctccagttgtgcggcgaactgtacgacctggacgcttcctcacttcagctgaaggtgctgcagtatctgcaacaggagacccgagccagccgttgctgcctgctcctggtttctgaggataatttgcagctttcttgcaaggtcataggcgacaaggtgctcggcgaggaagtcagcttccctctgaccggatgcctggggcaggtcgtcgaggataaaaagtcaatacagctgaaagaccttaccagtgaggacgtgcaacagctgcagtccatgctcgggtgcgaactccaggccatgctgtgtgtgccagtaatctcacgcgcgactgatcaggtggtggctttggcctgcgcgtttaacaagcttgaaggggacctgttcaccgatgaggatgagcatgtcatccaacactgtttccattatacatcaacggtcctgactagcaccctggccttccagaaggaacagaaattgaagtgcgagtgtcaagcgttgctgcaggttgcgaagaatctcttcacacatctggacgacgtcagcgtgctactgcaggaaatcatcactgaggcgcgaaatctgtccaatgcagagatttgcagcgtctttctcctggatcagaacgaactcgttgcaaaggtgttcgatggtggggtcgttgatgatgaatcttatgaaatacgcatcccggctgatcagggaattgccggccatgtggccaccactggccagatcctcaatatccccgacgcatatgctcacccactgttctatagaggcgtggatgactccaccggattccggacccgtaacatactctgctttcctattaaaaatgagaatcaggaggtgatcggcgttgcagaacttgtgaataaaataaatgggccttggttcagtaagtttgacgaagacctggcgaccgcctttagcatctactgcggtatctccattgctcactcccttttgtacaaaaaagtcaacgaagcccagtaccgctcacacctagccaacgagatgatgatgtatcatatgaaggtcagtgatgatgagtacaccaaactgctacacgacggcattcagccggtcgctgcaatagactccaactttgcctcatttacatatactccccgcagcctgccagaagatgatacgagcatggccatcctgtctatgctgcaggacatgaacttcataaataattataaaatcgattgccctactctagctcgcttctgtttaatggtcaaaaagggatatcgggacccaccatatcataactggatgcacgccttctccgtgtcccacttttgttacctcctgtacaagaatctggaactaaccaattaccttgaggacatagagattttcgccctgttcatctcgtgcatgtgccacgacttggaccaccgtggcactaataacagtttccaggtcgccagcaagagcgtcttagccgctctgtacagcagcgagggcagcgtgatggagaggcatcactttgcccaggctatcgctatactcaacacacacgggtgtaacatcttcgatcactttagccgcaaggattaccaaaggatgcttgacctgatgcgggacattatcctcgccaccgacctggctcaccacctgagaatctttaaggacctccagaaaatggcggaagtggggtatgataggaacaataaacagcaccatcggctgcttctgtgcctgttgatgactagctgcgacttgtcagaccagaccaaaggctggaagactacccgtaaaatcgcagagctgatatataaggagtttttttcacagggggacctggagaaggctatgggaaacaggccgatggaaatgatggatcgagagaaggcatatatcccggaacttcagatcagcttcatggagcacattgccatgccgatatacaagctcttacaggaccttttcccaaaagcagccgaattgtacgaaagagtagccagtaaccgggaacattggaccaaagtatcccacaagttcacaatcaggggattaccctcaaataactccctagacttcctcgacgaggaatatgaggtgcctgaccttgacggaaccagggcgcccatcaacggctgctgttccctcgatgccgaatag

SEQ ID NO: 130104 - DNA, 2058 bp, Artificial Sequence
  derived and/or modified sequence
atggttctggtacttcaccatatactgatcgccgtggtgcagtttcttagaagaggccagcaggtttttttaaagcctgacgagcccccccctcccccccagccgtgcgccgattccctgcaggatgcccttttgtccctcggcagtgtgattgatatttccgggctgcagcgcgccgtaaaagaggcactgtcagctgtcttacctagagtcgaaaccgtctatacctacctgcttgacggggagagtcagcttgtctgtgaggatcccccacacgagctgcctcaggaagggaaggtgcgctttactgacgaggatgagcacgtgattcagcattgcttccactacactagcaccgtgctgacatcgaccctcgccttccagaaggagcaaaagctgaaatgcgaatgtcaggccctgcttcaagtggccaagaacctgttcactcacctcgatgacgtttccgtattgctgcaggagataattaccgaagcacgaaatctctccaacgctgagatctgttcagtgttcctgctggaccagaacgagttggttgcaaaggttttcgacggcggggtcgtggatgatgagtcatacgaaattaggatccctgcagatcagggaattgcaggtcacgtcgctaccacaggacagatcctcaatatccccgatgcttacgcccaccctcttttctacagaggggtcgatgattccactggctttcgcaccagaaacattttgtgttttcccattaagaacgagaaccaggaggtcattggtgtggctgagctcgtgaataagatcaatggcccctggttttctaagttcgacgaggatctggccactgcgttctcgatttactgcggcattagcatagctcatagcctgttgtataagaaagtgaatgaagcacagtacagatcacatctggccaatgagatgatgatgtaccacatgaaggtgtccgacgatgaatacacaaagctgctgcatgacggcatacagcccgtagctgctatcgattccaactttgctagcttcacatacactccacggtcacttccggaagatgatacgtccatggcgatcctctcaatgttgcaggacatgaacttcatcaacaactacaagatagattgtcctacgcttgcaaggttctgtctgatggtgaaaaaaggctatcgggaccccccataccataattggatgcatgccttcagcgtcagccatttctgctaccttctctacaagaacctggagcttactaattatttagaagacatagagatcttcgctctcttcatttcctgcatgtgtcacgatctggaccaccgggggacaaacaattcatttcaggttgcctcaaagagtgtactggcggcactgtatagttcggaaggctccgtcatggaacgccatcatttcgcacaggctatagctatcttgaacacccatggctgcaatatattcgaccatttctctcgcaaggactatcagaggatgctggatttaatgagagacatcattctggccactgacctggcccaccatcttcgaatcttcaaggatttgcagaagatggctgaagtgggctacgatcggaacaacaaacagcatcacaggctccttttgtgcctcctgatgacatcttgtgatcttagcgaccagacaaaaggctggaaaaccacacggaaaatcgccgagctgatatataaggagtttttcagccaaggcgacctggaaaaggcgatgggaaacagacccatggagatgatggatcgcgagaaggcatatatacccgagctccagatttctttcatggaacacatcgccatgcccatctacaagcttctgcaagatctgttccccaaagccgcggagctctatgagagggtggctagcaacagagaacattggaccaaggtgtcccacaagttcacaattcggggtctgccgtcaaacaactctctggattttctggatgaggagtacgaagtcccagacttggatgggactcgagcacctattaacggttgctgctcactcgatgcggagtag

SEQ ID NO: 130105 - DNA, 2826 bp, Artificial Sequence
  derived and/or modified sequence
atgggccaggcctgtggccacagcatcctgtgccgcagccagcagtacccagctgcccggcctgctgagccccggggccagcaggtgttcctgaagccagatgagcccccacctccaccccagccctgtgccgacagcctgcaggatgccctgctgagcctgggcagcgtcatcgacatcagcggcctgcagagagctgtgaaggaggccctgtctgctgtgctgccccgggtggagaccgtgtacacctacctgctggatggagagagccagctggtgtgtgaagatcctcctcatgagctgccccaggagggcaaggtgcgggaggccatcatcagccagaagaggctgggctgcaatggcctgggcttcagtgacctgcccgggaagcccctggcccggctggtggcccccctggccccagacacccaggtgctggtgatgcccctggccgacaaggaggccggggctgtggccgccgtcatcctggtgcactgcggccagctgagtgacaatgaggagtggagcctgcaggccgtggagaagcacaccctggtggccctgcggcgggtgcaggtgctgcagcagaggggcccccgggaggcccccagggctgtgcagaaccccccagagggcacagctgaggaccagaagggcggggccgcctacacagaccgggacaggaagatcctgcagctgtgtggggagctgtatgacctggatgccagcagcctgcagctgaaggtgctgcagtacctgcagcaggagacccgggccagccgctgctgcctgctgctggtgtctgaggacaacctgcagctgagctgcaaggtgattggagacaaggtgctgggggaggaggtgtccttccccctgaccggctgcctgggccaggtggtggaggacaagaagagcatccagctgaaggacctgaccagtgaagatgtgcagcagctgcagagcatgctgggctgtgagctgcaggccatgctgtgtgtgcctgtgatcagccgggccacagaccaggtggtggccctggcctgtgccttcaacaagctggagggggacctcttcacagatgaagatgagcacgtgatccagcactgcttccactacaccagcacagtgctgaccagcaccctggccttccagaaggagcagaagctgaagtgtgagtgccaggccctgctgcaggtggccaagaacctcttcacccacctggatgatgtgtctgtgctgctgcaggagatcatcacagaggccaggaacctgagcaatgctgagatctgcagcgtcttcctgctggaccagaatgagctggtggccaaggtgtttgatggcggcgtggtggatgatgagagctatgagatccgcatcccagctgaccagggcattgctggccacgtggccaccaccggccagatcctgaacatcccagatgcctatgcccaccccctcttctaccggggcgtggatgacagcacaggcttccgcaccaggaacatcctgtgcttccccatcaagaatgaaaaccaggaggtgattggagtggccgagctggtgaacaagatcaatggcccctggttcagcaagtttgatgaggacctggccacagccttcagcatctactgcggcatcagcatcgcccacagcctgctgtacaagaaggtgaatgaggcccagtaccgcagccacctggccaatgagatgatgatgtaccacatgaaggtgtctgatgatgagtacaccaagctgctgcatgatggcatccagcctgtggccgccatcgacagcaactttgccagcttcacctacacccccaggagcctgcctgaagatgacacctccatggccatcctgtccatgctgcaggacatgaacttcatcaacaactacaagattgactgccccaccctggcccgcttctgcctgatggtgaagaagggctacagagatcctccctaccacaactggatgcacgccttctctgtgagccacttctgctacctgctgtacaagaacctggagctgaccaactacctggaggacatcgagatctttgccctcttcatcagctgcatgtgccacgacctggaccaccggggcaccaacaacagcttccaggtggccagcaagtctgtgctggccgccctgtacagcagcgagggctctgtgatggagcggcaccactttgcccaggccatcgccatcctgaacacccacggctgcaacatctttgaccacttcagcaggaaggactaccagaggatgctggacctgatgagggacatcatcctggccacagacctggcccaccacctgcgcatcttcaaggacctgcagaagatggccgaggtgggctatgacaggaacaacaagcagcaccaccggctgctgctgtgcctgctgatgaccagctgtgacctgagtgaccagaccaagggctggaagaccaccaggaagattgctgagctgatctacaaggagttcttcagccagggcgacctggagaaggccatgggcaaccggcccatggagatgatggaccgggagaaggcctacatccctgagctgcagatctccttcatggagcacatcgccatgcccatctacaagctgctgcaggacctcttccccaaggctgctgagctgtatgagcgggtggccagcaaccgggagcactggaccaaggtgagccacaagttcaccatccggggcctgcccagcaacaacagcctggacttcctggatgaggagtatgaggtgcctgacctggatggcacccgggcccccatcaatggctgctgcagcctggatgctgagtag

SEQ ID NO: 130106 - DNA, 2058 bp, Artificial Sequence
  derived and/or modified sequence
atggtgctggtgctgcaccacatcctgattgctgtggtgcagttcctgcggcggggccagcaggtgttcctgaagccagatgagcccccacctccaccccagccctgtgccgacagcctgcaggatgccctgctgagcctgggctctgtgattgacatcagcggcctgcagagagctgtgaaggaggccctgtctgctgtgctgccccgggtggagaccgtgtacacctacctgctggatggagagagccagctggtgtgtgaggacccccctcatgagctgccccaggagggcaaggtgcgcttcacagatgaagatgagcacgtgatccagcactgcttccactacaccagcacagtgctgaccagcaccctggccttccagaaggagcagaagctgaagtgtgagtgccaggccctgctgcaggtggccaagaacctcttcacccacctggatgatgtgtctgtgctgctgcaggagatcatcacagaggccaggaacctgagcaatgctgagatctgcagcgtcttcctgctggaccagaatgagctggtggccaaggtgtttgatggcggcgtggtggatgatgagagctatgagatccgcatcccagctgaccagggcattgctggccacgtggccaccaccggccagatcctgaacatcccagatgcctatgcccaccccctcttctaccggggcgtggatgacagcacaggcttccgcaccaggaacatcctgtgcttccccatcaagaatgaaaaccaggaggtgattggagtggccgagctggtgaacaagatcaatggcccctggttcagcaagtttgatgaggacctggccacagccttcagcatctactgcggcatcagcatcgcccacagcctgctgtacaagaaggtgaatgaggcccagtaccgcagccacctggccaatgagatgatgatgtaccacatgaaggtgtctgatgatgagtacaccaagctgctgcatgatggcatccagcctgtggccgccatcgacagcaactttgccagcttcacctacacccccaggagcctgcctgaagatgacacctccatggccatcctgtccatgctgcaggacatgaacttcatcaacaactacaagattgactgccccaccctggcccgcttctgcctgatggtgaagaagggctacagagatcctccctaccacaactggatgcacgccttctctgtgagccacttctgctacctgctgtacaagaacctggagctgaccaactacctggaggacatcgagatctttgccctcttcatcagctgcatgtgccacgacctggaccaccggggcaccaacaacagcttccaggtggccagcaagtctgtgctggccgccctgtacagcagcgagggctctgtgatggagcggcaccactttgcccaggccatcgccatcctgaacacccacggctgcaacatctttgaccacttcagcaggaaggactaccagaggatgctggacctgatgagggacatcatcctggccacagacctggcccaccacctgcgcatcttcaaggacctgcagaagatggccgaggtgggctatgacaggaacaacaagcagcaccaccggctgctgctgtgcctgctgatgaccagctgtgacctgagtgaccagaccaagggctggaagaccaccaggaagattgctgagctgatctacaaggagttcttcagccagggcgacctggagaaggccatgggcaaccggcccatggagatgatggaccgggagaaggcctacatccctgagctgcagatctccttcatggagcacatcgccatgcccatctacaagctgctgcaggacctcttccccaaggctgctgagctgtatgagcgggtggccagcaaccgggagcactggaccaaggtgagccacaagttcaccatccggggcctgcccagcaacaacagcctggacttcctggatgaggagtatgaggtgcctgacctggatggcacccgggcccccatcaatggctgctgcagcctggatgctgagtag

SEQ ID NO: 130107 - DNA, 2826 bp, Artificial Sequence
  derived and/or modified sequence
atgggccaggcctgcggccacagcatcctgtgccggagccagcagtatcccgccgccagacccgcagaaccaaggggccaacaggtcttcctcaagcccgacgagccgccacctccgcctcagccatgcgctgatagtctgcaggacgcgctgctgtccctgggttccgtcattgacatctccggcctgcagagagccgttaaagaagcactttctgccgtactccccagagtggagaccgtgtatacctacctattggatggggagagtcagttggtgtgtgaagatcctccacatgagcttccccaggagggcaaggttagggaggctatcatcagtcaaaagcgccttgggtgtaacggactgggcttctctgacctgcctggaaaacccttggcccgactggtcgcaccgctggctccagatactcaggtgctagtgatgcccttagccgacaaggaggcgggtgccgtcgccgcagttatcctggtgcattgtggccagctgagcgacaacgaagaatggtcactccaggcagtagagaaacataccctggtggcccttcgcagagtgcaagtgttgcagcagagagggcccagagaggctcctcgggccgttcaaaacccgcctgagggaacagctgaagaccagaagggaggcgccgcctacacagaccgcgaccggaaaatcctacagctgtgcggggaactgtacgatctggacgcctcttcactccaactaaaggtgctgcagtacctgcagcaggagactagagcatcccgctgttgtttattgttagtctccgaggacaacttgcagctttcctgtaaagtgatcggcgacaaggtgctgggtgaggaagtatcctttccgctcactggatgccttggacaggtagtcgaggacaagaaatcaatacagctgaaggacctcactagtgaggacgtgcagcagcttcagtccatgcttggatgtgagctgcaggccatgttgtgtgttcccgttatctccagagcaactgatcaggtagtggccttagcttgcgccttcaacaagctcgaaggcgacctgtttacggacgaggatgaacacgtgattcagcattgttttcactacacgtccacagtcctgacctcaactctggctttccagaaggaacagaagctgaaatgcgagtgtcaggccctgttgcaggtggctaagaatctgttcactcacctagatgacgtcagtgtcctgttacaagaaatcattacagaggcgagaaacttgtcaaatgcagagatatgctccgtgttcctgctggaccagaatgagctggtggcgaaggtgttcgatgggggagttgtggacgatgagtcctacgagatacgcattcctgctgatcagggcatcgctggccacgtggctacaacgggacagatcctgaatattccagacgcgtatgcacacccactgttctacaggggcgttgacgattccacaggattccgaactcgaaacatcttgtgtttcccaatcaagaatgagaaccaggaggtcatcggggttgccgaactggtcaataagataaatggaccctggttctccaagttcgatgaagacttagctacggcatttagtatctactgcggaatttctatcgcacatagcctgctgtataaaaaagtgaatgaggcccaataccggtcccacctcgccaacgagatgatgatgtatcatatgaaagtgtccgatgatgaatacacgaagctcttgcatgacggcattcagcccgttgccgccattgattccaatttcgcttcattcacatatactcctcggtcactgccggaggatgatacttccatggccatcctgagcatgctgcaagatatgaactttatcaataactacaagatagattgccccaccctggcccgattctgccttatggtcaagaaggggtacagggacccgccttaccacaattggatgcacgccttcagcgtgtcacatttttgctacctactgtataaaaatctggagctcacaaattatctggaggacatcgagatcttcgcccttttcatatcttgtatgtgtcatgatttggaccaccgcggcactaataattcctttcaagtagcttccaaaagtgtgctggcagcactatattcttctgaaggatccgtaatggaacgccatcattttgcgcaagcaattgctatcctgaacacacatggatgcaatatattcgatcacttctcccggaaggattatcagcggatgcttgatctcatgcgggatatcatcctggcgacagatctcgcccatcacttaaggatttttaaagaccttcaaaaaatggctgaagtaggatatgaccggaacaacaagcaacaccacagattattgctctgtctgctgatgacctcttgtgatctgagtgatcaaactaagggatggaaaacaacccgtaagatcgcagaactcatctataaggagtttttctcgcagggggatttggaaaaggccatggggaaccgccctatggaaatgatggatcgggagaaagcatatatacccgagttgcagatcagctttatggaacatatcgcaatgcctatttacaaattgttgcaggacctgtttcctaaagctgcggagctttatgagagagtggcatccaatagggaacactggaccaaagtgagccacaaatttaccatacgcggattgccttctaataacagcttggacttcctggatgaggaatatgaggtgcccgacctcgacggtacaagagctccaatcaacgggtgctgtagtttagatgccgagtag

SEQ ID NO: 130108 - DNA, 2058 bp, Artificial Sequence
  derived and/or modified sequence
atggtgctggtgctgcaccacatcctgatcgccgtggtgcagttcctgagaaggggacagcaggtgttcctgaagcctgatgaaccccctcctccgccccaaccctgcgctgatagtttgcaagatgccctccttagcctggggtccgtgattgacatttcagggctccagagggctgtgaaagaagcactatcagcagttctacctcgcgttgaaaccgtctacacatacctcctggatggagagtcgcaattggtctgtgaggatccaccccatgaactgccacaagaggggaaagtccgatttaccgatgaggatgaacacgtcattcaacactgttttcattacacctccaccgtgctcacttccacacttgcatttcagaaggaacagaaactgaagtgcgagtgccaggccctgttgcaggtcgccaagaatctgttcactcacctcgacgacgttagcgtgcttctgcaggaaattataacggaagcaaggaatctctcaaatgccgaaatctgctctgttttcttgttagaccagaatgaacttgtggccaaagtgtttgacggcggtgtggtggacgacgagtcctacgagatccgtattccagcagaccaaggaatcgccgggcacgttgctacgactggccagattcttaacattcctgacgcatacgcccacccactgttctacagaggggtcgatgacagcacaggctttcgcacccgcaatattctgtgttttcctatcaagaacgaaaaccaggaagtcatcggagtcgcagaacttgtcaacaaaataaatggcccgtggttcagcaagttcgatgaggatctagctacagctttttcgatttactgcgggatctccatcgctcactctcttttgtacaagaaggtgaacgaagctcaataccggagccacctggccaacgaaatgatgatgtatcatatgaaggtctctgatgatgagtacaccaagcttctgcacgacggtatccagcctgtggctgcgatagactccaatttcgcctcttttacctacacaccacggagtcttcctgaagatgacacatccatggctatcctctccatgctgcaagatatgaacttcattaacaactacaagattgactgccctaccctcgcaaggttttgcctgatggtaaagaaggggtaccgagatcccccttatcataactggatgcacgcgttcagcgtgtctcatttttgctatctcctctacaaaaaccttgagctcaccaattatctggaggacatcgagatcttcgcactcttcatcagttgtatgtgtcacgatcttgatcacagaggaaccaacaactcctttcaggtcgcaagtaagtccgtcctggctgcactctattcgtccgagggcagtgtgatggagaggcaccatttcgctcaggcaattgctatactgaatacacacggctgcaacattttcgatcattttagccgcaaggattatcagaggatgctggacttaatgagggacataattctggccactgacctagcacaccacctccgcattttcaaagatcttcagaaaatggcagaggtgggatatgaccgcaataataagcagcaccataggctcctgctgtgtttgctgatgacctcctgcgatctgtcagaccagaccaaaggatggaaaaccactcgaaaaattgccgagcttatctacaaagagtttttctcgcagggagatttggagaaggcgatgggaaatcgacctatggaaatgatggaccgagaaaaggcgtatatccccgaacttcaaatctccttcatggaacacatagctatgcccatttacaaacttctgcaggacctgtttcctaaggccgccgagctgtacgagagggtggcaagcaatcgcgagcactggactaaggtgtctcataaattcaccattcgaggactaccctcaaacaacagcctggactttttagacgaggaatacgaagtccccgatctggatgggactagagctccaattaatgggtgctgttcgcttgatgcggagtag

SEQ ID NO: 130109 - DNA, 4315 bp, Artificial Sequence
  derived and/or modified sequence
tgcattatcagacctgctccaacctcctcccagagccagccgagcagcagaggcagtggcagcgggagaggcgggagcagcggggcagcagagctggattggggtgttgagtccaggctgagtagggggcagcccactgctcttggtccctgtgcctgctgggggtgccctgccctgaactccaggcagcggggacagggcgaggtgccaccttagtctggctggggaggcggacgatgaggagtgatggggcaggcatgcggccactccatcctctgcaggagccagcagtacccggcagcgcgaccggctgagccgcggggccagcaggtcttcctcaagccggacgagccgccgccgccgccgcagccatgcgccgacagcctgcaggacgccttgctgagtctgggctctgtcatcgacatttcaggcctgcaacgtgctgtcaaggaggccctgtcagctgtgctcccccgagtggaaactgtctacacctacctactggatggtgagtcccagctggtgtgtgaggaccccccacatgagctgccccaggaggggaaagtccgggaggctatcatctcccagaagcggctgggctgcaatgggctgggcttctcagacctgccagggaagcccttggccaggctggtggctccactggctcctgatacccaagtgctggtcatgccgctagcggacaaggaggctggggccgtggcagctgtcatcttggtgcactgtggccagctgagtgataatgaggaatggagcctgcaggcggtggagaagcataccctggtcgccctgcggagggtgcaggtcctgcagcagcgcgggcccagggaggctccccgagccgtccagaaccccccggaggggacggcggaagaccagaagggcggggcggcgtacaccgaccgcgaccgcaagatcctccaactgtgcggggaactctacgacctggatgcctcttccctgcagctcaaagtgctccaatacctgcagcaggagacccgggcatcccgctgctgcctcctgctggtgtcggaggacaatctccagctttcttgcaaggtcatcggagacaaagtgctcggggaagaggtcagctttcccttgacaggatgcctgggccaggtggtggaagacaagaagtccatccagctgaaggacctcacctccgaggatgtacaacagctgcagagcatgttgggctgtgagctgcaggccatgctctgtgtccctgtcatcagccgggccactgaccaggtggtggccttggcctgcgccttcaacaagctagaaggagacttgttcaccgacgaggacgagcatgtgatccagcactgcttccactacaccagcaccgtgctcaccagcaccctggccttccagaaggaacagaaactcaagtgtgagtgccaggctcttctccaagtggcaaagaacctcttcacccacctggatgacgtctctgtcctgctccaggagatcatcacggaggccagaaacctcagcaacgcagagatctgctctgtgttcctgctggatcagaatgagctggtggccaaggtgttcgacgggggcgtggtggatgatgagagctatgagatccgcatcccggccgatcagggcatcgcgggacacgtggcgaccacgggccagatcctgaacatccctgacgcatatgcccatccgcttttctaccgcggcgtggacgacagcaccggcttccgcacgcgcaacatcctctgcttccccatcaagaacgagaaccaggaggtcatcggtgtggccgagctggtgaacaagatcaatgggccatggttcagcaagttcgacgaggacctggcgacggccttctccatctactgcggcatcagcatcgcccattctctcctatacaaaaaagtgaatgaggctcagtatcgcagccacctggccaatgagatgatgatgtaccacatgaaggtctccgatgatgagtataccaaacttctccatgatgggatccagcctgtggctgccattgactccaattttgcaagtttcacctatacccctcgttccctgcccgaggatgacacgtccatggccatcctgagcatgctgcaggacatgaatttcatcaacaactacaaaattgactgcccgaccctggcccggttctgtttgatggtgaagaagggctaccgggatcccccctaccacaactggatgcacgccttttctgtctcccacttctgctacctgctctacaagaacctggagctcaccaactacctcgaggacatcgagatctttgccttgtttatttcctgcatgtgtcatgacctggaccacagaggcacaaacaactctttccaggtggcctcgaaatctgtgctggctgcgctctacagctctgagggctccgtcatggagaggcaccactttgctcaggccatcgccatcctcaacacccacggctgcaacatctttgatcatttctcccggaaggactatcagcgcatgctggatctgatgcgggacatcatcttggccacagacctggcccaccatctccgcatcttcaaggacctccagaagatggctgaggtgggctacgaccgaaacaacaagcagcaccacagacttctcctctgcctcctcatgacctcctgtgacctctctgaccagaccaagggctggaagactacgagaaagatcgcggagctgatctacaaagaattcttctcccagggagacctggagaaggccatgggcaacaggccgatggagatgatggaccgggagaaggcctatatccctgagctgcaaatcagcttcatggagcacattgcaatgcccatctacaagctgttgcaggacctgttccccaaagcggcagagctgtacgagcgcgtggcctccaaccgtgagcactggaccaaggtgtcccacaagttcaccatccgcggcctcccaagtaacaactcgctggacttcctggatgaggagtacgaggtgcctgatctggatggcactagggcccccatcaatggctgctgcagccttgatgctgagtgatcccctccagggacacttccctgcccaggccacctcccacagccctccactggtctggccagatgcactgggaacagagccacgggtcctgggtcctagaccaggacttcctgtgtgaccctggacaagtactaccttcctgggcctcagctttctcgtctgtataatggaagcaagacttccaacctcacggagactttgtaatttgttttctgagagcacaggggtgaccaatgagcagtgggccctactctgcacctctgaccacaccttggcaagtctttcccaagccattctttgtctgagcagcttgatggtttctccttgccccatttctgccccaccagatctttgctcctttccctttgaggactcccaccctttggggtctccaggatcctcatggaaggggaaggtgagacatctgagtgagcagagtgtggcatcttggaaacagtccttagttctgtgggaggactagaaacagccgcggggcgaaggccccctgaggaccactactatactgatggtgggattgggacctgggggatacaggggccccaggaagaagctgccagaggggcagctcagtgctctgcagagaggggccctggggagaagcaggatgggattgatgggcaggagggatccccgcactgggagacaggcccaggtatgaatgagccagccatgcttcctcctgcctgtgtgacgctgggcgagtctcttcccctgtctgggccaaacagggagcgggtaagacaatccatgctctaagatccattttagatcaatgtctaaaatagctctatcgctctgcggagtcccagcagaggctatggaatgtttctgcaaccctaaggcacagagagcccaaccctgagtgtctcagaggccccctgagtgttccccttggcctgagccccttacccattcctgcagccagtgagagacctggcctcagccctggcagggctctctcttcaaggccatatccacctgtgccctggggcttgggagaccccatagggccgggactcttgggtcagcccggccactggcttctctctttttctctgtttcattctgtgtgcgttgtggggtgggggagggggtccacctgccttacctttctgagttgcctttagagagatgcgtttttctaggactctgtgcaactgtcgtatatggtcccgtgggctgaccgctttgtacatgagaataaatctatttctttctacca

SEQ ID NO: 130110 - DNA, 3355 bp, Artificial Sequence
  derived and/or modified sequence
gacgcgctgaccgagcgcagcggccgggccggcgggcgggcgggcggctgcgagcatggtcctggtgctgcaccacatcctcatcgctgttgtccaattcctcaggcggggccagcaggtcttcctcaagccggacgagccgccgccgccgccgcagccatgcgccgacagcctgcaggacgccttgctgagtctgggctctgtcatcgacatttcaggcctgcaacgtgctgtcaaggaggccctgtcagctgtgctcccccgagtggaaactgtctacacctacctactggatggtgagtcccagctggtgtgtgaggaccccccacatgagctgccccaggaggggaaagtccggttcaccgacgaggacgagcatgtgatccagcactgcttccactacaccagcaccgtgctcaccagcaccctggccttccagaaggaacagaaactcaagtgtgagtgccaggctcttctccaagtggcaaagaacctcttcacccacctggatgacgtctctgtcctgctccaggagatcatcacggaggccagaaacctcagcaacgcagagatctgctctgtgttcctgctggatcagaatgagctggtggccaaggtgttcgacgggggcgtggtggatgatgagagctatgagatccgcatcccggccgatcagggcatcgcgggacacgtggcgaccacgggccagatcctgaacatccctgacgcatatgcccatccgcttttctaccgcggcgtggacgacagcaccggcttccgcacgcgcaacatcctctgcttccccatcaagaacgagaaccaggaggtcatcggtgtggccgagctggtgaacaagatcaatgggccatggttcagcaagttcgacgaggacctggcgacggccttctccatctactgcggcatcagcatcgcccattctctcctatacaaaaaagtgaatgaggctcagtatcgcagccacctggccaatgagatgatgatgtaccacatgaaggtctccgatgatgagtataccaaacttctccatgatgggatccagcctgtggctgccattgactccaattttgcaagtttcacctatacccctcgttccctgcccgaggatgacacgtccatggccatcctgagcatgctgcaggacatgaatttcatcaacaactacaaaattgactgcccgaccctggcccggttctgtttgatggtgaagaagggctaccgggatcccccctaccacaactggatgcacgccttttctgtctcccacttctgctacctgctctacaagaacctggagctcaccaactacctcgaggacatcgagatctttgccttgtttatttcctgcatgtgtcatgacctggaccacagaggcacaaacaactctttccaggtggcctcgaaatctgtgctggctgcgctctacagctctgagggctccgtcatggagaggcaccactttgctcaggccatcgccatcctcaacacccacggctgcaacatctttgatcatttctcccggaaggactatcagcgcatgctggatctgatgcgggacatcatcttggccacagacctggcccaccatctccgcatcttcaaggacctccagaagatggctgaggtgggctacgaccgaaacaacaagcagcaccacagacttctcctctgcctcctcatgacctcctgtgacctctctgaccagaccaagggctggaagactacgagaaagatcgcggagctgatctacaaagaattcttctcccagggagacctggagaaggccatgggcaacaggccgatggagatgatggaccgggagaaggcctatatccctgagctgcaaatcagcttcatggagcacattgcaatgcccatctacaagctgttgcaggacctgttccccaaagcggcagagctgtacgagcgcgtggcctccaaccgtgagcactggaccaaggtgtcccacaagttcaccatccgcggcctcccaagtaacaactcgctggacttcctggatgaggagtacgaggtgcctgatctggatggcactagggcccccatcaatggctgctgcagccttgatgctgagtgatcccctccagggacacttccctgcccaggccacctcccacagccctccactggtctggccagatgcactgggaacagagccacgggtcctgggtcctagaccaggacttcctgtgtgaccctggacaagtactaccttcctgggcctcagctttctcgtctgtataatggaagcaagacttccaacctcacggagactttgtaatttgttttctgagagcacaggggtgaccaatgagcagtgggccctactctgcacctctgaccacaccttggcaagtctttcccaagccattctttgtctgagcagcttgatggtttctccttgccccatttctgccccaccagatctttgctcctttccctttgaggactcccaccctttggggtctccaggatcctcatggaaggggaaggtgagacatctgagtgagcagagtgtggcatcttggaaacagtccttagttctgtgggaggactagaaacagccgcggggcgaaggccccctgaggaccactactatactgatggtgggattgggacctgggggatacaggggccccaggaagaagctgccagaggggcagctcagtgctctgcagagaggggccctggggagaagcaggatgggattgatgggcaggagggatccccgcactgggagacaggcccaggtatgaatgagccagccatgcttcctcctgcctgtgtgacgctgggcgagtctcttcccctgtctgggccaaacagggagcgggtaagacaatccatgctctaagatccattttagatcaatgtctaaaatagctctatcgctctgcggagtcccagcagaggctatggaatgtttctgcaaccctaaggcacagagagcccaaccctgagtgtctcagaggccccctgagtgttccccttggcctgagccccttacccattcctgcagccagtgagagacctggcctcagccctggcagggctctctcttcaaggccatatccacctgtgccctggggcttgggagaccccatagggccgggactcttgggtcagcccggccactggcttctctctttttctctgtttcattctgtgtgcgttgtggggtgggggagggggtccacctgccttacctttctgagttgcctttagagagatgcgtttttctaggactctgtgcaactgtcgtatatggtcccgtgggctgaccgctttgtacatgagaataaatctatttctttctacc

SEQ ID NO: 130111 - DNA, 2826 bp, Artificial Sequence
  derived and/or modified sequence
atggggcaggcctgtggtcactctatcctctgccggtcccagcagtacccagctgctcggccagcggagccgagggggcagcaggtgttcctgaaacctgatgagccaccaccccctccccagccatgtgctgatagcctacaagatgccctgctgtccctcggctccgtaatcgatatctctggtctacagcgggcagtcaaagaagccctgagcgctgttcttccacgtgtggagactgtatatacctatctgctggacggtgagagtcaactggtctgcgaggaccctcctcatgaactgccgcaggagggtaaggtgagggaggccattattagccaaaaacgcctcggctgcaacggcttaggtttctccgatctgccgggtaaaccactcgctagactagtggctcctctcgccccagacacccaggttcttgtcatgccattggccgacaaagaagcaggggctgtcgcggctgtgattctggtgcactgtggtcagttgagcgacaacgaggaatggtccctgcaggccgtggaaaaacatacactggttgccctgcggagggtgcaggtcctgcagcaacgaggaccgagagaagcccctcgagctgttcaaaatccacccgagggaacagccgaggaccagaagggaggtgcagcctatactgatcgtgacagaaaaatcctccagctctgcggtgagttatatgatctggacgccagtagcttgcagctgaaggtgttacaatatctgcagcaggaaactagagcctcccggtgttgtttgttgctagtcagcgaggacaatctacaactgtcatgtaaggttatcggtgataaggtgctgggagaagaggtgtcattccctctcacgggctgcctaggacaggtcgtggaggacaagaagagtatccaattgaaggatcttacctctgaggatgtccagcagttacaaagcatgctgggttgcgagcttcaggctatgctgtgcgtgcctgtcatcagccgcgcaactgaccaagtggttgctctggcatgcgctttcaacaaactcgagggagacctgttcacagacgaggatgagcatgtcattcagcactgttttcactacacaagcacagttttaacatctactctagcctttcaaaaggaacagaagttgaaatgcgagtgtcaggccctgctccaggtggctaagaatctctttactcatctggatgatgtgtccgtgctgttacaggagatcatcacagaggcaaggaatttgtccaatgcagagatctgctccgtctttctgctggaccaaaacgaactcgttgcgaaggtgttcgatggcggtgtggtggacgacgagtcctacgagatcagaattcccgcagatcagggcattgccggtcacgtggcaacaactggacagattctaaatatccctgacgcgtatgcccacccgctcttttatcgcggtgtggacgattccaccggcttccggacccggaacatcctttgttttcctattaaaaacgaaaaccaggaggtgattggcgttgcagaactcgttaacaagatcaacggaccctggttttcaaaatttgatgaagacttggccactgccttctcaatatattgtgggattagtatagctcatagcctactgtacaaaaaagtaaacgaagcccaataccgctcacaccttgccaacgagatgatgatgtatcacatgaaagtatcggacgatgagtatacaaagcttctgcacgatggcatacaacctgtggccgctattgattcaaattttgcatcgtttacttatacacccaggagtctcccagaagatgatacatccatggcgatcctaagcatgctgcaggacatgaacttcatcaacaattacaagatagattgcccgacactggctagattttgcctaatggtaaaaaaggggtaccgggatcccccttaccataactggatgcatgccttttccgtgtcccacttttgctatcttttgtacaaaaatctggagttgaccaattatttagaagatattgaaattttcgcactcttcatctcctgcatgtgccatgatctagaccaccggggtactaacaatagcttccaggttgctagcaaaagcgtgttggccgctctgtattcctccgagggaagtgtgatggagaggcaccactttgcccaggctattgccatactcaatacccacgggtgcaacatttttgaccacttctctcgtaaggattatcagaggatgttggacctcatgcgcgatattatcttggccaccgacttagcccaccacctgcgaatctttaaagacctgcagaagatggccgaggtaggctatgatcgaaacaataagcagcaccacagacttctactgtgtttactgatgactagctgcgacctgtccgaccagacgaaaggatggaagactactagaaaaattgccgaactgatctacaaagagttcttttcgcagggagacttggagaaagcaatgggaaatcggcctatggagatgatggatcgcgaaaaagcatatatacctgaattgcagatcagttttatggagcacatcgcaatgcccatttataagctacttcaggatctgtttcccaaggcagccgagctgtacgagagagtagcatccaatagagagcactggactaaggtatctcacaaatttactatcaggggcctcccatccaataactcacttgactttctcgatgaggaatacgaagtgccagacctggatgggacccgggctccgatcaacggctgttgttccctggacgcagagtag

SEQ ID NO: 130112 - DNA, 2058 bp, Artificial Sequence
  derived and/or modified sequence
atggtactggtcctgcaccatatccttatcgctgtggtccagtttcttaggagaggccagcaggtgtttctgaaaccagatgagccacctccgcctcctcagccttgcgccgatagcctgcaagacgcactgctgagtcttggatctgtaattgatatatcggggctccagcgcgctgtaaaggaggctctctcagccgtactgcctcgggtcgaaaccgtctatacatatttgttagatggggagtcacagttggtttgtgaggatcctccccacgagctgccacaggagggtaaggttcggttcaccgatgaagacgagcacgtgatccaacactgtttccactacacatctactgtcctgacaagtaccctcgcattccagaaagaacaaaagctgaaatgtgagtgccaggccctgcttcaggtcgccaaaaacttgttcacccacctcgacgatgtgtcggtcttgcttcaggagattattactgaggctcgaaacctcagcaacgcggagatttgctcagtctttctgctggatcagaacgaactggtggctaaggtttttgacggtggggttgtggacgacgaaagctacgaaatccgtattcctgccgatcagggtatcgcgggacacgtggcgacaacgggtcaaatcctgaacattcccgatgcttacgctcacccgctgttctaccgcggagtggacgactccacaggatttagaaccagaaacatcctctgtttccccattaaaaatgagaaccaggaggtgattggagttgcagaactcgtcaacaagattaatggcccttggttcagcaagtttgatgaggatttagctacagcctttagcatttactgtgggatttcgattgcccattccttgctttacaagaaagttaatgaagcacagtaccgcagccacctggccaatgaaatgatgatgtatcatatgaaggtgagcgacgatgaatatactaaactgctgcacgatggtatccaaccggttgccgctattgacagcaacttcgcgtcttttacctacactcccaggagcctgcccgaggacgataccagtatggcaatcctgtccatgctacaggacatgaactttataaataattacaagatcgattgcccaactctagccaggttctgcctaatggtgaagaaaggctaccgggacccgccttatcacaactggatgcacgctttctcggtgtctcacttttgctatctcctttacaagaacctggagctcacaaattatctagaggatatagagatctttgctctattcatctcctgtatgtgtcacgaccttgatcaccgcggaacaaacaacagcttccaggtagcgtccaagtccgttcttgccgctctctatagctccgagggctctgtgatggagcggcaccactttgcccaagctatcgctattctgaacacgcacggatgcaacatcttcgaccacttctcccgcaaagattaccagcgaatgttggacctgatgcgcgatatcatcctggcaactgatctggcacaccaccttaggattttcaaggatttgcaaaagatggccgaagtaggttacgataggaataataagcagcatcataggctgcttttgtgtctcttaatgacgtcatgtgatctgtcagaccaaacgaagggctggaaaactacacgaaagattgccgagttaatttacaaggagtttttcagccagggtgacctggagaaagctatgggaaacagacccatggagatgatggacagagaaaaagcctacatccctgagctccaaattagctttatggagcatattgctatgccaatttacaaactgcttcaggatctgtttcctaaagccgcagaattgtacgaacgcgtcgcatctaatagagaacattggaccaaggtgtctcataagttcacaattaggggcctgccaagcaacaactcattggacttcttggatgaagagtatgaagttccagatctggacggcacgagggcccctatcaacggttgctgtagcctggatgctgagtag

SEQ ID NO: 130113 - protein, 150 aa, Artificial Sequence
  derived and/or modified sequence
MSAKDERAREILRGFKLNWMNLRDAETGKILWQGTEDLSVPGVEHEARVPKKILKCKAVSRELNFSSTEQMEKFRLEQKVYFKGQCLEEWFFEFGFVIPNSTNTWQSLIEAAPESQMMPASVLTGNVIIETKFFDDDLLVSTSRVRLFYV

SEQ ID NO: 130114 - DNA, 453 bp, Artificial Sequence
  derived and/or modified sequence
atgtcagccaaagatgagagggcaagagaaatcttaaggggcttcaaactaaactggatgaatctccgtgacgccgagacaggcaaaatcttatggcagggcaccgaggatctttcggttcccggcgtggaacacgaagcacgagtgcctaagaagattctaaagtgtaaggcagtgtcgagagagcttaattttagctccactgaacagatggaaaagtttcgcttagagcaaaaggtatatttcaaagggcaatgtttagaggagtggtttttcgagtttggcttcgtgattccgaacagtacaaatacgtggcaaagcctgattgaggcagccccggagtctcagatgatgccagcttcggtgctgaccggaaacgtcattatagaaactaaattcttcgacgatgatttacttgtatcaacatcgagagtgcgtctattctatgtttag

SEQ ID NO: 130115 - DNA, 453 bp, Artificial Sequence
  derived and/or modified sequence
atgtctgccaaggatgagcgggcccgggagatcctgcggggcttcaagctgaactggatgaacctgagagatgctgagaccgggaagatcctgtggcagggcacagaggacctgtctgtgcctggggtggagcacgaggcccgggtgcccaagaagatcctgaagtgcaaggctgtgtcccgggagctgaacttcagcagcacagagcagatggagaagttccggctggagcagaaggtgtacttcaagggccagtgcctggaggagtggttctttgaatttggcttcgtcatccccaacagcaccaacacctggcagagcctgattgaagctgcccctgagagccagatgatgcctgcctctgtgctgactggaaatgtcatcatcgagaccaagttctttgatgatgacctgctggtgtccaccagccgggtgcggctcttctacgtgtag

SEQ ID NO: 130116 - DNA, 453 bp, Artificial Sequence
  derived and/or modified sequence
atgagcgccaaggacgagcgggcccgggagatcctgcggggcttcaagttgaattggatgaatctgcgtgacgccgagaccgggaagatactatggcaggggaccgaggatttatccgtccccggggttgaacacgaagctagagtcccaaagaagattctaaagtgtaaggccgtgtctagggagcttaacttctcatccaccgaacagatggagaagtttcggttggagcagaaggtgtactttaaagggcaatgcctcgaggagtggtttttcgagttcgggtttgtcattccgaactctaccaatacctggcagtccctgattgaagccgcccctgagtcccaaatgatgccagcttctgtgttgaccggaaacgtgataattgagaccaagtttttcgacgacgatctgttagtttccactagccgggttagacttttctacgtgtag

SEQ ID NO: 130117 - DNA, 1175 bp, Artificial Sequence
  derived and/or modified sequence
ctgcgaggctagggggaaggagaagggatcagaagcgggagctgaggggagagagaggccggtcctggtctggccgctgcggctgctagcccgaggtctccaagccgggctgcggctccatcctcggctcctgggcaccgtctgcgaggctccgccgaccagagtgagaaagccgcgggcggcgaccgccgcatcatgtcagccaaggacgagcgggccagggagatcctgaggggcttcaaactaaattggatgaaccttcgggatgctgagacagggaagatactctggcaaggaacagaagacctgtctgtccctggtgtggagcatgaagcccgtgttcccaagaaaatcctcaagtgcaaggcagtgtctcgagaacttaatttttcttcgacagaacaaatggaaaaattccgcctggaacaaaaagtttacttcaaagggcaatgcctagaagaatggttcttcgagtttggctttgtgatccctaactccacaaatacctggcagtccttgatagaggcagcacccgagtcccagatgatgccagcaagcgtcttaactgggaacgttatcatagaaacaaagttttttgacgacgatcttcttgtaagcacatccagagtgagacttttctatgtttgaaagaagaatgtgtgtacatttcaagaatttgggttttttggagggaggaggaaactgtttacttttttcctccacacgtttgatttttgacacatacacccctaattccctcaacagcagaacctacctgcagccaccaggggaccagctctgtgtaggtaaccagatggctctttttcccaagccaccatcttccagctgaccagactaaactcccaaccccagaccagggcaggggacaggtctcaagtccttcccagcatacacacagggaacaaacacataccacaaaccggtaactgtacctgtcaccctccttgtctcctccttgggccctacaggctacacatctacctttggcccctggttttggaaaaattccgtgttcctgacccatgtttagttttttcctaccatttctatttcatacattctcatacatttaacttgtaaaatagactgtgatattattacataatgtaattaaaaatatgaattaaaatattcctacagtctttagcatggca

SEQ ID NO: 130118 - DNA, 453 bp, Artificial Sequence
  derived and/or modified sequence
atgagcgcaaaggacgagagggccagggaaatcctgagaggcttcaagctgaactggatgaacttacgcgacgccgagacaggcaagattctgtggcagggaactgaagacctgtccgtgcctggggttgagcatgaggctcgcgtgccaaagaagatcctgaagtgcaaagcggtgtccagagagctgaatttttcctctactgaacaaatggaaaagttccgactggagcagaaggtctacttcaaaggtcagtgcctggaagaatggttcttcgaatttgggtttgtcatccctaactccactaacacatggcaaagtcttattgaggccgctcctgagtcccagatgatgcccgcttctgtacttaccgggaacgttatcatcgagaccaaattcttcgacgatgatctcttagtgtccacatcaagggtgagacttttttatgtgtag

SEQ ID NO: 130119 - DNA, 453 bp, Artificial Sequence
  derived and/or modified sequence
atgagcgccaaggacgagagagccagagagatcctgagaggcttcaagctgaactggatgaacctgagagacgccgagaccggcaagatcctgtggcagggcaccgaggacctgagcgtgcccggcgtggagcacgaggccagagtgcccaagaagatcctgaagtgcaaggccgtgagcagagagctgaacttcagcagcaccgagcagatggagaagttcagactggagcagaaggtgtacttcaagggccagtgcctggaggagtggttcttcgagttcggcttcgtgatccccaacagcaccaacacctggcagagcctgatcgaggccgcccccgagagccagatgatgcccgccagcgtgctgaccggcaacgtgatcatcgagaccaagttcttcgacgacgacctgctggtgagcaccagcagagtgagactgttctacgtgtag

SEQ ID NO: 130120 - DNA, 450 bp, Artificial Sequence
  derived and/or modified sequence
atgaaggaggccctgcaccagatcgtggtgcggtgcagcgagctggtgagctcaacgtccctgcctaggctatcagtatctcgcctgcagggaccgcctgatagccagccccttgggaccctcgggcaggggggctggaaactgctgggaattgtcgggtcactcgctccagaaaccctgggggggctgggcaccgagttcggaccatgtacccaccctttaccttttgatatggtccgcgaacgagagcgggatgatgaacttcggcaaggctggctattacagtgcccccagtgtgcccggacacttctctgccactgtggacctttcctcacacccccaagccaaacatcttcaagcgggtttcagctctgctctttgaagccgagtggctctcttgtgaccgcaacagaaccactgtctaacttcgccttttcttacttcccctag

SEQ ID NO: 130121 - DNA, 264 bp, Artificial Sequence
  derived and/or modified sequence
atgaatctggaacctcctaaagccgagtttcggtccgccacaagagtagcgggcggcccggtaacacctagaaagggtccaccaaaattcaaacagcgccagactaggcagttcaagtctaaacctcccaagaaaggtgtgcaaggtttcggcgatgacataccaggaatggaggggctgggaacagacatcacggtcatttgcccttgggaagcttttaaccacttagagctccacgaactggcccagtacggaatcatctag

SEQ ID NO: 130122 - DNA, 264 bp, Artificial Sequence
  derived and/or modified sequence
atgaacctggagccccccaaggccgagttccgcagcgccaccagggtggccggcggccctgtgacccccaggaaaggaccacccaagttcaagcagaggcagacccggcagttcaagagcaagccacccaagaagggcgtgcagggctttggagatgacatccctggcatggagggcctgggcacagacatcaccgtcatctgcccctgggaggccttcaaccacctggagctgcacgagctggcccagtatggcatcatctag

SEQ ID NO: 130123 - DNA, 264 bp, Artificial Sequence
  derived and/or modified sequence
atgaacctggagccccccaaggccgagttccggagcgccacccgggtggccggaggacccgttacaccccgcaaggggccgcctaagttcaaacagagacagacaagacagttcaagtcaaagccacctaaaaagggcgtgcaggggtttggcgacgatatccccggcatggaaggactaggaacagacatcacagtcatctgcccatgggaggccttcaatcatctcgaactgcatgagctggcccagtatggaattatatag

SEQ ID NO: 130124 - DNA, 264 bp, Artificial Sequence
  derived and/or modified sequence
atgaatctggaacctcctaaggctgagtttagatccgcaacgcgagtggctggcggacccgtcacccctcgcaagggtcccccaaagttcaaacagaggcagactcgccagttcaagagtaagccccctaagaaaggagtgcagggattcggggatgatatccccggtatggagggactgggaactgacatcacagtgatttgcccctgggaggcatttaatcacctggagctccacgagctagcccagtatggcattatttag

SEQ ID NO: 130125 - DNA, 264 bp, Artificial Sequence
  derived and/or modified sequence
atgaacctggagccccccaaggccgagttcagaagcgccaccagagtggccggcggccccgtgacccccagaaagggcccccccaagttcaagcagagacagaccagacagttcaagagcaagccccccaagaagggcgtgcagggcttcggcgacgacatccccggcatggagggcctgggcaccgacatcaccgtgatctgcccctgggaggccttcaaccacctggagctgcacgagctggcccagtacggcatcatctag

SEQ ID NO: 130126 - protein, 829 aa, Artificial Sequence
  derived and/or modified sequence
MGCAPSIHISERLVAEDAPSPAAPPLSSGGPRLPQGQKTAALPRTRGAGLLESELRDGSGKKVAVADVQFGPMRFHQDQLQVLLVFTKEDNQCNGFCRACEKAGFKCTVTKEAQAVLACFLDKHHDIIIIDHRNPRQLDAEALCRSIRSSKLSENTVIVGVVRRVDREELSVMPFISAGFTRRYVENPNIMACYNELLQLEFGEVRSQLKLRACNSVFTALENSEDAIEITSEDRFIQYANPAFETTMGYQSGELIGKELGEVPINEKKADLLDTINSCIRIGKEWQGIYYAKKKNGDNIQQNVKIIPVIGQGGKIRHYVSIIRVCNGNNKAEKISECVQSDTHTDNQTGKHKDRRKGSLDVKAVASRATEVSSQRRHSSMARIHSMTIEAPITKVINIINAAQESSPMPVTEALDRVLEILRTTELYSPQFGAKDDDPHANDLVGGLMSDGLRRLSGNEYVLSTKNTQMVSSNIITPISLDDVPPRIARAMENEEYWDFDIFELEAATHNRPLIYLGLKMFARFGICEFLHCSESTLRSWLQIIEANYHSSNPYHNSTHSADVLHATAYFLSKERIKETLDPIDEVAALIAATIHDVDHPGRTNSFLCNAGSELAILYNDTAVLESHHAALAFQLTTGDDKCNIFKNMERNDYRTLRQGIIDMVLATEMTKHFEHVNKFVNSINKPLATLEENGETDKNQEVINTMLRTPENRTLIKRMLIKCADVSNPCRPLQYCIEWAARISEEYFSQTDEEKQQGLPVVMPVFDRNTCSIPKSQISFIDYFITDMFDAWDAFVDLPDLMQHLDNNFKYWKGLDEMKLRNLRPPPE

SEQ ID NO: 130127 - protein, 757 aa, Artificial Sequence
  derived and/or modified sequence
MRFHQDQLQVLLVFTKEDNQCNGFCRACEKAGFKCTVTKEAQAVLACFLDKHHDIIIIDHRNPRQLDAEALCRSIRSSKLSENTVIVGVVRRVDREELSVMPFISAGFTRRYVENPNIMACYNELLQLEFGEVRSQLKLRACNSVFTALENSEDAIEITSEDRFIQYANPAFETTMGYQSGELIGKELGEVPINEKKADLLDTINSCIRIGKEWQGIYYAKKKNGDNIQQNVKIIPVIGQGGKIRHYVSIIRVCNGNNKAEKISECVQSDTHTDNQTGKHKDRRKGSLDVKAVASRATEVSSQRRHSSMARIHSMTIEAPITKVINIINAAQESSPMPVTEALDRVLEILRTTELYSPQFGAKDDDPHANDLVGGLMSDGLRRLSGNEYVLSTKNTQMVSSNIITPISLDDVPPRIARAMENEEYWDFDIFELEAATHNRPLIYLGLKMFARFGICEFLHCSESTLRSWLQIIEANYHSSNPYHNSTHSADVLHATAYFLSKERIKETLDPIDEVAALIAATIHDVDHPGRTNSFLCNAGSELAILYNDTAVLESHHAALAFQLTTGDDKCNIFKNMERNDYRTLRQGIIDMVLATEMTKHFEHVNKFVNSINKPLATLEENGETDKNQEVINTMLRTPENRTLIKRMLIKCADVSNPCRPLQYCIEWAARISEEYFSQTDEEKQQGLPVVMPVFDRNTCSIPKSQISFIDYFITDMFDAWDAFVDLPDLMQHLDNNFKYWKGLDEMKLRNLRPPPE

SEQ ID NO: 130128 - DNA, 2490 bp, Artificial Sequence
  derived and/or modified sequence
atggggtgcgccccatccattcacatctctgagaggctggtggccgaggacgcgccttccccggccgcccctcccctttcctcgggcggcccccgactgccccagggtcagaaaaccgctgccttgcctcgtaccaggggtgcgggacttctcgagagcgagctccgcgatggctcaggaaagaaagttgccgtcgccgacgttcagtttgggcccatgcggtttcatcaggaccagcttcaggtcctgctggtcttcacaaaggaggataaccagtgcaatggtttctgtagagcatgcgagaaagcagggtttaaatgcacagtgacgaaggaagcccaggccgtgttggcatgttttttggacaaacatcacgatatcattatcatcgaccacaggaacccccggcaactggacgctgaggcactgtgcaggagcataaggagctccaaattgagtgaaaacaccgtgattgtcggagtcgtcagacgcgtcgacagggaagaactcagtgttatgccctttatttcagctggatttacgagacggtatgtggagaacccgaacattatggcttgttacaacgagctcctgcaactggagtttggggaggtgaggtctcagttaaagctcagagcttgcaacagcgtcttcactgcactcgagaactctgaggatgctatcgaaatcacttcagaggaccggttcatccaatatgcaaatccagcctttgagaccaccatgggctaccagagtggtgaactgattggcaaggagctcggagaggtacctataaacgagaagaaggcggacctcctggacacaataaactcatgcatccgaataggtaaagaatggcagggcatttactatgctaaaaaaaaaaacggggataacatccagcagaatgtgaagatcattcctgttataggacagggtggaaagatccgacattatgtgagcatcatccgtgtctgcaacggaaataataaggccgaaaagatttcagagtgcgttcaatcagatacgcacacagataaccagacaggaaagcacaaggaccggagaaagggtagcctagacgtgaaagccgttgcctctagagccactgaggttagcagccagaggcgacacagctccatggcacgcattcactcaatgacaatagaggcgcctataactaaagtcatcaacatcattaacgcagcacaagagagtagtcctatgccagttaccgaggccctcgacagagttcttgagattctaagaactaccgaactgtattccccgcagtttggggctaaggacgatgatccccatgcgaacgatctggtagggggactgatgagcgacggattaagacgtctctctggcaacgaatacgttctcagtacaaagaatacacagatggtcagctccaacattatcacgcctatctccctggatgacgtgccgccccgcatcgccagagctatggagaacgaagagtattgggattttgatatttttgaacttgaggctgccacgcataatcgtcccttgatatacctggggcttaagatgttcgcgcggtttggcatatgcgaattcttacactgcagcgaatccacgcttcggtcttggttacagatcattgaagcaaattatcactcatctaatccatatcacaactctacccattcagctgacgtcctgcacgccactgcgtatttcctctccaaggaaagaataaaagagactctcgatccaattgacgaggtggccgctctgatagccgcaaccattcatgacgtcgaccatccaggacgaacaaacagcttcttgtgtaatgccggttcggaactggccattctctacaatgatacagcggtgctggagtctcatcatgccgctctggcctttcagcttacaacaggggacgataaatgtaacatattcaaaaatatggagcgcaatgactaccgtacattgagacagggtatcattgatatggtgttagcgacagagatgacaaaacactttgagcacgtgaataagtttgtcaactcaattaataagccactagccacccttgaggaaaatggtgagacggacaaaaatcaggaagtgatcaatacaatgctaagaacccccgagaacagaacactgatcaaaagaatgctaatcaagtgcgccgacgtttccaatccttgccgacccctccagtactgcattgagtgggcagccagaatttccgaggagtatttcagccaaaccgacgaggagaaacaacaagggctgcctgtcgtcatgcccgtattcgatagaaacacatgtagcataccaaagtcccagatatcgtttatcgattatttcattactgatatgtttgacgcctgggatgcatttgtcgacctgcctgacctaatgcagcatctcgacaataacttcaaatactggaagggcctggatgaaatgaaattgcgcaatctgcgccccccccctgagtag

SEQ ID NO: 130129 - DNA, 2490 bp, Artificial Sequence
  derived and/or modified sequence
atggggtgcgctccaagcatccatatctccgaacggcttgtggctgaggatgcaccttcacctgctgctccaccattaagtagcggaggtcccaggttgccccagggtcaaaaaaccgcagccctgcctcgcacaaggggtgctggattgctggagtcagaactgcgagatgggtcgggcaagaaggtcgcggtggcggatgtgcagttcggaccaatgagattccaccaggatcagttgcaggttctcctcgtgtttacgaaagaagataaccagtgtaacgggttttgccgggcgtgtgaaaaggcaggctttaagtgcaccgtcacaaaagaggcccaggccgtactggcctgcttcctcgacaaacatcacgacatcatcatcatagaccaccgtaaccctcgccagcttgatgctgaggcgctctgtcggagtatcagatcctctaagctatctgaaaatacggtgatcgtcggggttgtccggcgggtggatagggaagagttgagcgtgatgccgttcatcagcgcagggttcactcggaggtacgtcgagaaccccaacatcatggcatgttacaacgaactgttgcaactggagtttggagaggtacgctcacagctaaagctacgggcttgtaatagcgtgtttactgctctggaaaactctgaagacgctattgaaatcaccagcgaggaccgcttcattcaatacgctaaccccgccttcgaaactaccatggggtatcagagcggcgagcttatcggcaaagaactgggcgaggtacccatcaacgaaaagaaggcggatcttttggataccatcaacagctgtatccgcattggaaaagagtggcaaggcatttattacgccaagaagaaaaacggtgataatatacaacaaaacgtgaagattataccagtaattggacagggagggaagatccgccattatgtgtcgatcattcgagtctgtaacggtaataataaagctgagaaaatctctgagtgtgtccagtcagatacccacacagataaccagacaggcaagcacaaagaccgcagaaagggttctttggatgtcaaggcagtggcatcgcgagcaaccgaagtgtcatctcagcgccgtcattcaagtatggcccggatccattctatgacaattgaggcacccatcacaaaagtgattaatataataaacgcagcgcaagaatccagccccatgcccgtaaccgaggctctggaccgcgttctggagatcttgcgcaccaccgagttgtattctccacagtttggagcaaaagacgacgaccctcatgccaatgatctagtcggagggctaatgagcgatggtttacgccgcctgagcggcaatgagtacgtgttgtcgactaagaacactcaaatggtgagtagcaatatcatcacgccaatcagcctcgacgacgtgccgcccaggatcgcccgtgcgatggagaatgaggagtactgggatttcgacatttttgagctggaagcggcaacacacaatcggcccttgatctacctgggtctcaaaatgtttgcaaggttcggcatttgtgagtttctgcactgcagtgagagcaccctgcggagttggctccagattatcgaagctaattaccactcgagcaatccatatcataattccacacatagcgccgacgtgctgcatgccaccgcttacttcctatctaaggagcggatcaaggagacgctggacccaattgatgaggtagctgccctcatagctgcaactattcatgacgtagatcatcctggaagaaccaactcctttctctgcaacgcggggagtgagcttgcaattttgtacaacgacacggccgttctggaatcacatcacgcagccctcgcctttcagctgactacaggggatgataaatgcaatatcttcaaaaacatggaacggaacgattaccgcactttgcgacaaggaatcattgatatggtgctcgctactgagatgacgaaacacttcgagcacgtgaataaatttgtcaactccatcaacaagccactcgccacactggaggagaatggagaaaccgacaaaaatcaggaggtcatcaacactatgctgagaactccagaaaatcggacactgattaaacgcatgctgatcaagtgcgctgatgtttctaacccttgccgacctctacaatactgtatagagtgggccgcgagaatatccgaggaatacttttcccaaaccgatgaggagaagcagcaggggttgccagtggtgatgcctgtgtttgatagaaacacatgttcaattcccaagtctcagatctctttcattgattactttataacggatatgtttgacgcttgggacgctttcgtggacctgccagatctgatgcagcacctggacaataacttcaaatactggaaaggactggacgaaatgaaactgagaaatttacgtccaccgccagagtag

SEQ ID NO: 130130 - DNA, 2274 bp, Artificial Sequence
  derived and/or modified sequence
atgaggttccaccaggaccagctacaggttctcctcgtttttacaaaggaggacaatcagtgcaacgggttctgtagggcttgcgagaaagcaggttttaaatgtacagtcaccaaagaagcccaggccgttctcgcttgtttccttgataaacaccacgacatcatcatcattgaccataggaaccccagacaattggacgcagaggcactgtgcagatcaatcaggagcagcaaactgagcgagaacaccgttatcgtgggcgtggttaggagggtcgacagggaggaactcagtgtgatgccctttattagcgctggctttacacgtcggtacgttgagaaccctaacatcatggcctgctacaacgaactgctgcaacttgagttcggtgaggttcgctctcagcttaagctcagggcttgcaacagcgtgttcacagccctggagaattcagaagacgccatcgagatcacctcagaagaccgattcatccagtacgctaatcccgcattcgaaaccactatgggctatcaaagtggggaattaatcggcaaagagctgggagaagtacccattaacgagaaaaaggctgacctgctcgacaccataaactcatgcattcggatcgggaaggagtggcagggcatctattatgctaaaaaaaagaacggtgacaacatccagcaaaacgtcaaaattattcctgtcattggtcaggggggtaaaatcaggcattatgtttctatcattcgtgtttgtaacggcaataacaaggcagaaaagatctctgaatgtgtccagtctgacacacatactgacaatcaaaccgggaagcacaaggaccggagaaagggcagccttgacgtgaaagctgtggcttcccgcgccacggaggtctcttcccagcgtcgacactctagcatggcacggatccacagtatgaccatcgaggccccgattaccaaagtgatcaatattattaacgctgcgcaggaaagctctccaatgcccgtgaccgaggccctggacagagttttggaaatcctgcgcaccacagagctgtacagtccccaatttggggcaaaggatgatgacccacacgccaatgacctggtcggaggcctcatgtcagatggattgagaaggttgagtgggaatgagtacgtgctctcaacaaaaaatactcagatggtgagtagtaatatcattacccctatatccttagatgatgtgccgccacgcatcgcacgagccatggagaatgaagagtattgggattttgacattttcgaacttgaggccgcaactcacaaccgcccactgatctatctgggactcaaaatgttcgccagatttggtatctgtgaatttcttcattgctccgagtctaccctgagatcctggctccagattattgaagcaaactaccattctagcaacccttatcacaacagcacccactcagccgatgtgctccacgccacagcctattttttgagtaaggaaagaatcaaagaaacgctggatccaattgacgaagtggctgcccttattgccgccactatccacgatgtggatcaccccgggcgcactaactcgtttctctgcaatgcgggaagcgagctcgcaatactgtacaacgacacggccgtgttggagtctcatcacgccgccttggcctttcagctcactactggagacgacaaatgcaatatcttcaaaaacatggaacggaacgactacaggacactcaggcaagggattatcgacatggtgctcgcgacggagatgaccaagcatttcgagcacgtaaacaaattcgtaaacagtataaacaagcctctcgctacactggaagagaacggcgagactgataagaatcaggaagtgatcaacacaatgctgcggacacccgagaaccggactttgatcaaaaggatgctcattaagtgtgcagatgtaagcaacccttgtcgccctctacaatactgtattgagtgggcggcccgcatttccgaagagtacttctctcagaccgatgaggagaagcaacagggcttgccagtggttatgccagtgttcgaccgcaacacctgctctatccctaagtctcagattagttttatcgactacttcattacagatatgttcgacgcttgggatgcatttgtggacctgccggatttaatgcagcacttagacaacaatttcaaatattggaagggattagatgagatgaagctacggaatctgcgcccacctcccgaatag

SEQ ID NO: 130131 - DNA, 2490 bp, Artificial Sequence
  derived and/or modified sequence
atgggctgtgcccccagcatccacatcagcgagcggctggtggccgaggatgcccccagccctgctgccccacccctgagcagcggcggcccccggctgccccagggccagaagacagctgccctgcccaggaccaggggggccggcctgctggagagcgagctgagagatggcagcggcaagaaggtggccgtggctgatgtgcagtttggccccatgaggttccaccaggaccagctgcaggtgctgctggtgttcaccaaggaggacaaccagtgcaatggcttctgccgggcctgtgagaaggccggcttcaagtgcaccgtgaccaaggaggcccaggccgtgctggcctgcttcctggacaagcaccacgacatcatcatcatcgaccacaggaacccccggcagctggatgctgaggccctgtgccgcagcatccgcagcagcaagctgtctgagaacacagtcatcgtgggcgtggtgagaagagtggaccgggaggagctgtctgtgatgcccttcatctctgctggcttcacccggcgctacgtggagaaccccaacatcatggcctgctacaatgagctgctgcagctggagtttggagaggtgcgcagccagctgaagctgcgggcctgcaacagcgtcttcaccgccctggagaacagtgaagatgccatcgagatcaccagtgaagatcgcttcatccagtatgccaacccagcctttgagaccaccatgggctaccagagcggggagctgattggcaaggagctgggggaggtgcccatcaatgagaagaaggctgacctgctggacaccatcaacagctgcatccgcatcggcaaggagtggcagggcatctactatgccaagaagaagaatggagacaacatccagcagaatgtgaagatcatccctgtgattggccagggcggcaagatccgccactacgtgtccatcatccgggtgtgcaatggaaacaacaaggccgagaagatcagtgaatgtgtgcagagcgacacccacacagacaaccagacaggcaagcacaaggacaggaggaagggcagcctggatgtgaaggctgtggccagccgggccacagaggtgagcagccagaggaggcacagctccatggcccgcatccacagcatgaccatcgaggcccccatcaccaaggtgatcaacatcatcaatgctgcccaggagagcagccccatgcctgtgacagaggccctggacagagtgctggagatcctgcggaccacagagctgtacagcccccagtttggagccaaggatgatgacccccacgccaatgacctggtgggcggcctgatgtctgatggcctgcggcggctgtctggaaatgaatatgtgctgagcaccaagaacacccagatggtgagcagcaacatcatcacccccatcagcctggatgatgtgcccccacgcatcgcccgggccatggagaatgaggagtactgggactttgacatctttgagctggaggccgccacccacaaccggcccctcatctacctgggcctgaagatgtttgccaggtttggcatctgtgagttcctgcactgcagcgagagcaccctgcgctcctggctgcagatcatcgaggccaactaccacagcagcaacccctaccacaacagcacccacagcgcagatgtgctgcacgccacagcctacttcctgagcaaggagcgcatcaaggagaccctggaccccattgatgaggtggccgccctgattgctgccaccatccatgatgtggaccaccctggccgcaccaacagcttcctgtgcaatgccggcagcgagctggccatcctgtacaatgacacagctgtgctggagagccaccacgccgccctggccttccagctgaccactggagatgacaagtgcaacatcttcaagaacatggagagaaatgactaccgcaccctgcggcagggcatcatcgacatggtgctggccacagagatgaccaagcactttgagcacgtgaacaagtttgtgaacagcatcaacaagcccctggccaccctggaggagaatggagaaacagacaagaaccaggaggtgatcaacaccatgctgcggaccccagagaacagaaccctcatcaagaggatgctgatcaagtgtgctgatgtgagcaacccctgccggcccctgcagtactgcatcgagtgggccgcccgcatcagcgaggagtacttcagccagacagatgaggagaagcagcagggcctgcctgtggtgatgcctgtgtttgacaggaacacctgcagcatccccaagagccagatctccttcatcgactacttcatcacagacatgtttgatgcctgggatgcctttgtggacctgcctgacctgatgcagcacctggacaacaacttcaagtactggaagggcctggatgagatgaagctgaggaacctgcggcccccacctgagtag

SEQ ID NO: 130132 - DNA, 2274 bp, Artificial Sequence
  derived and/or modified sequence
atgaggttccaccaggaccagctgcaggtgctgctggtgttcaccaaggaggacaaccagtgcaatggcttctgccgggcctgtgagaaggccggcttcaagtgcaccgtgaccaaggaggcccaggccgtgctggcctgcttcctggacaagcaccacgacatcatcatcatcgaccacaggaacccccggcagctggatgctgaggccctgtgccgcagcatccgcagcagcaagctgtctgagaacacagtcatcgtgggcgtggtgagaagagtggaccgggaggagctgtctgtgatgcccttcatctctgctggcttcacccggcgctacgtggagaaccccaacatcatggcctgctacaatgagctgctgcagctggagtttggagaggtgcgcagccagctgaagctgcgggcctgcaacagcgtcttcaccgccctggagaacagtgaagatgccatcgagatcaccagtgaagatcgcttcatccagtatgccaacccagcctttgagaccaccatgggctaccagagcggggagctgattggcaaggagctgggggaggtgcccatcaatgagaagaaggctgacctgctggacaccatcaacagctgcatccgcatcggcaaggagtggcagggcatctactatgccaagaagaagaatggagacaacatccagcagaatgtgaagatcatccctgtgattggccagggcggcaagatccgccactacgtgtccatcatccgggtgtgcaatggaaacaacaaggccgagaagatcagtgaatgtgtgcagagcgacacccacacagacaaccagacaggcaagcacaaggacaggaggaagggcagcctggatgtgaaggctgtggccagccgggccacagaggtgagcagccagaggaggcacagctccatggcccgcatccacagcatgaccatcgaggcccccatcaccaaggtgatcaacatcatcaatgctgcccaggagagcagccccatgcctgtgacagaggccctggacagagtgctggagatcctgcggaccacagagctgtacagcccccagtttggagccaaggatgatgacccccacgccaatgacctggtgggcggcctgatgtctgatggcctgcggcggctgtctggaaatgaatatgtgctgagcaccaagaacacccagatggtgagcagcaacatcatcacccccatcagcctggatgatgtgcccccacgcatcgcccgggccatggagaatgaggagtactgggactttgacatctttgagctggaggccgccacccacaaccggcccctcatctacctgggcctgaagatgtttgccaggtttggcatctgtgagttcctgcactgcagcgagagcaccctgcgctcctggctgcagatcatcgaggccaactaccacagcagcaacccctaccacaacagcacccacagcgcagatgtgctgcacgccacagcctacttcctgagcaaggagcgcatcaaggagaccctggaccccattgatgaggtggccgccctgattgctgccaccatccatgatgtggaccaccctggccgcaccaacagcttcctgtgcaatgccggcagcgagctggccatcctgtacaatgacacagctgtgctggagagccaccacgccgccctggccttccagctgaccactggagatgacaagtgcaacatcttcaagaacatggagagaaatgactaccgcaccctgcggcagggcatcatcgacatggtgctggccacagagatgaccaagcactttgagcacgtgaacaagtttgtgaacagcatcaacaagcccctggccaccctggaggagaatggagaaacagacaagaaccaggaggtgatcaacaccatgctgcggaccccagagaacagaaccctcatcaagaggatgctgatcaagtgtgctgatgtgagcaacccctgccggcccctgcagtactgcatcgagtgggccgcccgcatcagcgaggagtacttcagccagacagatgaggagaagcagcagggcctgcctgtggtgatgcctgtgtttgacaggaacacctgcagcatccccaagagccagatctccttcatcgactacttcatcacagacatgtttgatgcctgggatgcctttgtggacctgcctgacctgatgcagcacctggacaacaacttcaagtactggaagggcctggatgagatgaagctgaggaacctgcggcccccacctgagtag

SEQ ID NO: 130133 - DNA, 2490 bp, Artificial Sequence
  derived and/or modified sequence
atgggctgcgcccccagcatccacatcagcgagcggctggtggccgaggacgcaccctcacctgcggctcctccgttatcctccggcggacctagactgccacaggggcagaagaccgcggctctgccacggactcggggagccggattgctggaatcagaacttcgcgatgggtccggaaagaaggtcgctgttgcagacgtgcagtttggccctatgagatttcaccaggatcagctacaagttcttctcgtgtttaccaaggaggataaccagtgcaacggcttctgtagagcctgtgaaaaagcaggattcaaatgcactgtgacaaaggaagcacaggccgtgctagcttgttttctggacaaacatcacgatataatcattatcgaccatagaaaccccaggcagttggacgcagaggccttgtgtcggtctattaggtcctccaaactgagcgagaacaccgtcatcgtcggggtcgtccgccgagtggatagagaagagctttccgtaatgccctttattagcgcaggctttacccggcgctatgtggagaatcccaatatcatggcttgctataatgaattgctccagctggaatttggagaggtgaggtcacagctcaagctcagagcctgtaattccgtctttaccgccttagagaactcagaagacgcgatcgaaatcacatcggaggacaggtttatccagtatgctaatcccgcattcgaaaccaccatggggtaccagagcggagaacttataggcaaagagttaggggaggtgccaatcaacgagaagaaggcagatctgctggacacaattaattcctgcatacgaatcgggaaggagtggcagggtatttactatgccaagaagaaaaacggagacaatattcagcagaacgtgaagattataccagttattggccagggcggcaaaatccggcactacgtctctattatcagagtttgcaatgggaacaataaagcagagaaaattagtgaatgtgtgcagagcgacacccatacagataatcaaaccgggaaacacaaggaccgacgcaaaggcagcttggacgtgaaggcagtcgcttcgcgagctactgaggtatcgtcacaacgtcggcacagctcaatggcgcgtatccactctatgacaatcgaggcacctattacaaaggttataaatatcatcaacgccgcacaggagagttcacccatgccagtgacagaagcgctcgaccgcgtcctcgagatcttgaggaccacagagctttatagccctcagtttggggccaaggacgacgatccacatgctaatgacttggtggggggattaatgagcgatggattaagaagactgtctggaaacgaatatgtcctgtcgaccaaaaatacgcagatggtgagctctaacattattacacctatctcgctggatgacgtgccgccgcggatagctcgggcgatggaaaatgaggaatactgggatttcgatatcttcgaacttgaagcagcaactcacaatagaccgctcatatatttaggactcaaaatgttcgctcggtttggaatttgtgagttcctccattgttcggagtccaccctaaggagctggttgcagatcattgaagccaactatcactctagcaatccttatcacaactctacccatagtgccgacgtgctgcatgctacggcatacttcctgagtaaagagaggattaaggaaacactcgatcccatcgatgaggtcgcggccctcatcgcggccacgatccacgacgtagatcaccctggaaggaccaacagcttcctttgtaatgcaggaagcgagctggctattctttataacgataccgccgtcctcgaatcacatcacgctgcgcttgcctttcagctgacaactggagacgacaaatgtaacatttttaagaatatggaacgcaatgattaccggaccttgcgtcagggcatcattgacatggtattggcgacagagatgactaagcactttgaacatgtgaataaatttgtgaattcaatcaataaaccactcgctaccttggaagaaaatggggagactgataagaatcaggaggttatcaacaccatgcttagaacacctgaaaaccggactttgataaagcggatgctcatcaaatgtgctgacgtatctaatccatgtcgcccacttcagtattgcattgaatgggctgcccgcataagcgaggagtatttttcccagaccgacgaggagaaacaacaaggattacctgtggtgatgcctgtgtttgataggaatacttgcagtattccaaaaagccagatttctttcatcgactatttcataaccgacatgtttgatgcctgggatgcgtttgttgatctgccagatctcatgcagcacctcgacaataatttcaaatattggaaggggctggacgagatgaaactgcgcaatttacgtcccccacctgaatag

SEQ ID NO: 130134 - DNA, 2490 bp, Artificial Sequence
  derived and/or modified sequence
atgggctgcgcccccagcatccacatcagcgagcggctggtggccgaggacgctcctagcccagccgccccgcctttaagcagcggcggccctcgtcttccacagggtcagaagaccgccgccctgccgcgcaccagaggcgccgggctcctcgagagcgaattgcgtgacggcagtgggaaaaaggtagctgtggcagacgtccagtttgggccaatgcgcttccaccaggatcaactgcaggtgttactggtgtttactaaagaggataaccaatgcaacggcttctgccgggcctgcgagaaagcgggtttcaaatgcacagtgactaaagaagctcaagccgtgctggcctgctttctggacaagcaccatgacatcattattatagatcacagaaacccacgacagctggacgcagaagcactctgtagatccatacggagctctaagttgtccgaaaatactgttatcgtaggggtcgtgaggcgcgtggatagagaggagctgtcagtgatgccattcatttcggccggatttactaggagatatgtcgagaaccctaacatcatggcttgttacaatgagctgttgcaacttgaatttggcgaggtgcgcagccaactcaagctgagggcatgcaatagcgtttttactgcattagagaattctgaggatgccatcgaaattacctccgaagaccggtttatccaatacgcaaatcccgctttcgaaacgaccatgggctaccagtcaggagagcttattggtaaggagctcggggaggtccctatcaatgaaaaaaaggcggacttgttagatacaatcaactcttgtattagaattgggaaggagtggcagggcatttactatgcgaaaaaaaaaaatggtgacaacatccagcagaatgttaagattatccctgtaatcggacaaggaggcaagatacgacactatgtgtctataatccgagtgtgcaatggcaacaataaggcggaaaaaatctcagaatgtgtgcagtccgacacccatacggacaatcagaccgggaaacataaggatcgccgtaagggcagtcttgacgttaaggcagtagcaagtagagctacagaggtgagcagccagaggaggcactcatcaatggcaaggatacacagtatgacgattgaagcgcctatcaccaaagtgatcaatatcattaacgctgcccaggagtcatcccccatgcctgtcacagaagccctggaccgcgtcttggaaattctgaggacgaccgaattgtattcacctcagttcggagccaaagatgacgatccgcatgctaatgacctcgtgggagggcttatgtctgatggacttcggaggttgagtggtaacgaatatgtgctttctaccaagaatacccagatggtgagctcgaatattattacacctatcagtctggacgatgtgcccccaaggatagccagggcgatggagaacgaggagtactgggattttgacatttttgagctggaggccgctacacataacaggccactgatttatcttggactgaagatgtttgctagatttggaatctgtgagttcctacactgtagcgaatccaccttgagatcctggcttcagatcatcgaagccaactaccactccagcaatccctatcacaacagtactcactccgctgatgttctgcacgctaccgcttattttctaagcaaagagcgtatcaaagagacacttgatcccattgatgaggtcgcagccctcatagctgccaccattcatgatgtcgaccatccgggaaggaccaacagtttcttatgtaacgcaggttccgagctggcaatactctataacgataccgcggtactcgagtcgcaccatgcagcccttgccttccagctgaccacaggggacgataaatgcaatatcttcaagaatatggaacgcaacgactatcgaactctcaggcaggggattatcgacatggtgctggccactgagatgacaaaacacttcgagcatgtcaataaattcgtgaacagcatcaataagcccctggctacactcgaagagaacggtgagaccgacaagaatcaggaagtgattaacacaatgctgcgcacccccgaaaaccggacgctcatcaaaaggatgttaatcaagtgtgcagacgtctcaaacccctgtcggccattacagtattgtattgagtgggccgcccgcatctctgaagagtatttcagtcagaccgacgaggagaagcaacagggcttgcccgtggtgatgcccgtgttcgaccggaacacatgctctattcctaagtcccagatttccttcattgactatttcatcaccgatatgtttgatgcgtgggacgcctttgtcgatctgccagacctgatgcagcatctggacaataactttaagtattggaaaggtttggacgaaatgaaactacgcaacttgcgccccccgcccgaatag

SEQ ID NO: 130135 - DNA, 2274 bp, Artificial Sequence
  derived and/or modified sequence
atgcggttccaccaggaccagctgcaggtgctgctggtgttcaccaaggaagacaaccaatgcaacggcttttgccgagcttgtgagaaggctggctttaaatgtacagtgactaaggaggcccaagctgtgttggcctgcttcttggataaacaccatgacattattatcattgatcacagaaatccaaggcagttagatgctgaagccctatgtcgatcaataagaagctcaaaactgtccgaaaacaccgtgatcgtgggggttgtcaggagggtagatagggaggagctgtccgtaatgccgttcatcagcgctggcttcacaagaaggtatgtagagaatcctaacatcatggcgtgctataacgagctgctgcagttggaatttggagaagtgcggagccagctaaaactccgggcgtgcaactcagtatttaccgctctcgagaactcagaggacgccatcgaaattacatccgaggataggttcattcagtatgcaaaccccgcgttcgagaccacaatgggatatcaaagcggagagctgatcggcaaggagttgggggaggtgcctatcaacgagaagaaagccgatcttttggacactatcaattcgtgcattcggattggcaaagaatggcaaggcatatactatgcaaagaagaagaacggggacaatatccagcaaaatgtcaagatcatacccgtgatcgggcaggggggaaagattcggcactacgtctccattatcagggtatgcaatggaaataacaaggctgagaagatcagcgagtgtgttcagagcgacacccatactgataatcagaccggaaagcacaaagacagacgtaaggggtccctcgacgtgaaggcggtggcatccagggccacagaagtgtcctctcagaggcgccactcctctatggcccgcatccactcaatgaccatagaggcacccatcaccaaggtaattaacattatcaacgcggcccaagagagttccccgatgcccgtgactgaagccctggatcgcgtgctagagattttaagaacgaccgagctctattctcctcagttcggtgcgaaggacgatgaccctcatgccaacgacctcgtcggaggactgatgtcagacggccttcggaggttgtccggcaacgaatatgtcctgtccacaaagaacactcaaatggtcagttctaatataatcacaccaatttcgcttgatgacgtgcccccaaggattgctcgggccatggagaacgaggagtactgggactttgatatcttcgaacttgaggctgcaacccacaatagacctctaatatacctggggctgaagatgttcgcaagattcggaatctgcgaatttttgcactgtagcgagtctaccttaagaagttggttgcaaattattgaggcaaactaccattccagtaatccttaccacaattctactcattccgcagacgttctccacgccactgcctacttcctctccaaggagaggattaaagagaccctcgaccctatcgacgaggtcgcggcactcattgccgcaaccatacacgacgttgatcatcctggccgcaccaacagctttctatgcaatgcggggtcagaattagccatcttatataatgacacggcggtactcgagagccaccatgccgcattggctttccagctcacaaccggagatgataaatgcaatatctttaagaacatggaaagaaacgactaccggacactcaggcaggggattattgatatggtcctcgccactgagatgaccaagcatttcgagcacgtcaacaagttcgtaaacagtatcaataagccactggccacactcgaggaaaacggagaaacagataaaaatcaggaagtgataaacacaatgttgaggactcccgagaaccgcacactgataaagcgaatgcttataaagtgcgcagacgtgtctaatccgtgcagacccctgcagtattgcatcgaatgggcagcgcgaatctcagaagaatacttttcccagactgacgaggaaaagcagcaggggctgcccgttgtgatgcccgtttttgataggaacacatgcagcatacctaagagccagatctccttcatcgactacttcattactgacatgttcgatgcttgggacgcattcgtggacctcccagacctgatgcagcacttagataataacttcaagtattggaagggccttgacgaaatgaagctgcggaatctacgcccacctcctgaatag

SEQ ID NO: 130136 - DNA, 3984 bp, Artificial Sequence
  derived and/or modified sequence
agtagccgggccaaggcgggagcggctgcctctcagggtcgctccagggccgcgctaggaaagccgccgccgccgcagcgcccgcaccgcgataaaaggggcggccgcgtttcctgacgcgagatccgcgctcgccgccgcccgcccaggcggcgatgacacggcgcccgcggcggcccggaggcgccgggtgggccgtttgctgaccggatcgcggctacccgccagcgtgtccgcggcgccgccgccagcatgggctgtgccccgagcatccacatttccgagcgcctggtggccgaggacgcgcctagccccgcggcaccgccgctgtcgtccggcgggccgcgcctcccgcagggccagaagacggccgccttgccccggacccgcggcgccggcctcttggagtcggagcttcgcgacggcagcggcaagaaggtagcagtagctgatgtgcagtttggccccatgagatttcatcaagatcaacttcaggtacttttagtgtttaccaaagaagataaccaatgtaatggattctgcagggcatgtgaaaaagcagggtttaagtgtacagttaccaaggaggctcaggctgtccttgcctgtttcctggacaaacatcatgacattatcatcatagaccacagaaatcctcgacagctggatgcagaggcactgtgcaggtctatcagatcatcaaaactctcagaaaacacagttattgttggtgtagtacgcagggtggatagagaagagttgtccgtaatgcctttcatttctgctggatttacaaggaggtatgtagaaaaccccaacatcatggcctgctacaatgaactgctccagctggagtttggagaggtgcgatcacaactgaaactcagggcttgtaactcagtattcactgcattagaaaacagtgaagatgcaattgaaattacaagcgaagaccgttttatacagtatgcaaatcctgcatttgaaacaacaatgggctatcagtcaggtgaattaatagggaaggagttaggagaagtgcctataaatgaaaaaaaggctgacttgctcgatactataaattcatgcatcaggataggcaaggagtggcaaggaatttactatgccaaaaagaaaaacggagataatatacaacaaaatgtgaagataatacctgtcattggacagggaggaaaaattagacactatgtgtccattatcagagtgtgcaatggcaacaataaggctgagaaaatatccgaatgtgttcagtctgacactcatacagataatcagacaggcaaacataaagacaggagaaaaggctcactagacgtcaaagctgttgcctcccgtgcaactgaagtttccagccagagacgacactcttccatggcccggatacattccatgacaattgaggcgcccatcaccaaggtaatcaatattatcaatgctgcccaggaaagtagtcccatgcctgtgacagaagccctagaccgtgtgctggaaattctaagaaccactgagttatattcaccacagtttggtgctaaagatgatgatccccatgccaatgaccttgttgggggcttaatgtctgatggtttgcgaagactatcagggaatgaatatgttctttcaacaaaaaacactcaaatggtttcaagcaatataatcactcccatctcccttgatgatgtcccaccacggatagctcgggccatggaaaatgaggaatactgggactttgatatttttgaactggaggctgccacccacaataggcctttgatttatcttggtctcaaaatgtttgctcgctttggaatctgtgaattcttacactgctccgagtcaacgctaagatcatggttacaaattatcgaagccaattatcattcctccaatccctaccacaattctacacattctgctgatgtgcttcatgccactgcctattttctctccaaggagaggataaaggaaactttagatccaattgatgaggtcgctgcactcatcgcagccaccattcatgatgtggatcaccctgggagaaccaactccttcctgtgtaatgctggaagtgagctggccattttgtacaatgacactgctgtgctggagagccaccatgcggccttggccttccagctgaccactggagatgataaatgcaatatatttaaaaacatggagaggaatgattatcggacactgcgccaggggattatcgacatggtcttagccacagaaatgacaaagcactttgagcatgtcaacaaatttgtcaacagcatcaacaaacccttggcaacactagaagaaaatggggaaactgataaaaaccaggaagtgataaacactatgcttaggactccagagaaccggaccctaatcaaacgaatgctgattaaatgtgctgatgtgtccaatccctgccgacccctgcagtactgcatcgagtgggctgcacgcatttcggaagaatatttttctcagactgatgaagagaagcagcagggcttacctgtggtgatgccagtgtttgacagaaatacctgcagcatccccaaatcccaaatctctttcattgattacttcatcacagacatgtttgatgcttgggatgcctttgtagacctgcctgatttaatgcagcatcttgacaacaactttaaatactggaaaggactggacgaaatgaagctgcggaacctccgaccacctcctgaatagtgggagacaccacccagagccctgaagctttgttccttcggtcatttggaattcctgagggcagccagagctccttggtcctttcagtactaggcagaacagcccccgatctgcatagcctgtgaaagcccacggggacatcagtaaccttctgcagccaccatccaatgccattactgtcaagtgagacttggccactgtagcctgggcctgctgcaggagctcttcagaaaggcacatgaggaccacggtttgcctcagtttctggtaaaacacaaggtctggagtgcccctgcaaagggtattgatggacttcctgccagtgacagagcatgtctattgcaaacaattctctcagttacgttcagcacttaagaacggctaatggcaataggatctttagcaactttttcacatcatagaaggtgcaatcgctcacttgggaacactactgagagtgacttctcttttaaaattgagtagcagatgaaaaattaaaatttgaacttgattattaatatcaattaaaatgttttatttattttattaaaagctcaatattttctatgaattcaaaaatacttcagagccaaagccaacttcaaataccgtgaccaaatttacatgattcatattcattatgcattacttggtatacagacttattttcataatgcaaattaataaaatgacacttttactgcactatagaaatattcatgtatgttaaacttttctgattgaggctaactggaaaaagctggggtcgtattctaagtgctaaagaaggctgcttctactgtatagaacccagggctctgaaacagctctagccgcctaatgcacttcacaggtaactccccaaggtaaaactagactctcttgttggttcgcaaagaaaagttaggacttaacacttttttctaaaattttataattcaatttccaaaagtctactctattttatactgtttctacaaaatattccttataaaaacaaagaacaaaaattgaatatttaatgaattgacattttataaccaacctgtttttatctacggtgggaatctttgatgccagaaatttataaagaggttctgtatcttcacaccttgaataagcataataccataaaaaatgacacttgacatgtcaatgtatttgtcatttcattttaaactcgtatttgtggtttttttcccagataaaaatgaaattaaaccatttctttttaagaaatca

SEQ ID NO: 130137 - DNA, 3912 bp, Artificial Sequence
  derived and/or modified sequence
ccgccgccgccgcagcgcccgcaccgcgataaaaggggcggccgcgtttcctgacgcgagatccgcgctcgccgccgcccgcccaggcggcgatgacacggcgcccgcggcggcccggaggcgccgggtgggccgtttgctgaccggatcgcggctacccgccagcgtgtccgcggcgccgccgccagcatgggctgtgccccgagcatccacatttccgagcgcctggtggccgaggacgcgcctagccccgcggcaccgccgctgtcgtccggcgggccgcgcctcccgcagggccagaagacggccgccttgccccggacccgcggcgccggcctcttggagtcggagcttcgcgacggcagcggcaagaaggtagcagtagctgatgtgcagtttggccccatgagatttcatcaagatcaacttcaggtacttttagtgtttaccaaagaagataaccaatgtaatggattctgcagggcatgtgaaaaagcagggtttaagtgtacagttaccaaggaggctcaggctgtccttgcctgtttcctggacaaacatcatgacattatcatcatagaccacagaaatcctcgacagctggatgcagaggcactgtgcaggtctatcagatcatcaaaactctcagaaaacacagttattgttggtgtagtacgcagggtggatagagaagagttgtccgtaatgcctttcatttctgctggatttacaaggaggtatgtagaaaaccccaacatcatggcctgctacaatgaactgctccagctggagtttggagaggtgcgatcacaactgaaactcagggcttgtaactcagtattcactgcattagaaaacagtgaagatgcaattgaaattacaagcgaagaccgttttatacagtatgcaaatcctgcatttgaaacaacaatgggctatcagtcaggtgaattaatagggaaggagttaggagaagtgcctataaatgaaaaaaaggctgacttgctcgatactataaattcatgcatcaggataggcaaggagtggcaaggaatttactatgccaaaaagaaaaacggagataatatacaacaaaatgtgaagataatacctgtcattggacagggaggaaaaattagacactatgtgtccattatcagagtgtgcaatggcaacaataaggctgagaaaatatccgaatgtgttcagtctgacactcatacagataatcagacaggcaaacataaagacaggagaaaaggctcactagacgtcaaagctgttgcctcccgtgcaactgaagtttccagccagagacgacactcttccatggcccggatacattccatgacaattgaggcgcccatcaccaaggtaatcaatattatcaatgctgcccaggaaagtagtcccatgcctgtgacagaagccctagaccgtgtgctggaaattctaagaaccactgagttatattcaccacagtttggtgctaaagatgatgatccccatgccaatgaccttgttgggggcttaatgtctgatggtttgcgaagactatcagggaatgaatatgttctttcaacaaaaaacactcaaatggtttcaagcaatataatcactcccatctcccttgatgatgtcccaccacggatagctcgggccatggaaaatgaggaatactgggactttgatatttttgaactggaggctgccacccacaataggcctttgatttatcttggtctcaaaatgtttgctcgctttggaatctgtgaattcttacactgctccgagtcaacgctaagatcatggttacaaattatcgaagccaattatcattcctccaatccctaccacaattctacacattctgctgatgtgcttcatgccactgcctattttctctccaaggagaggataaaggaaactttagatccaattgatgaggtcgctgcactcatcgcagccaccattcatgatgtggatcaccctgggagaaccaactccttcctgtgtaatgctggaagtgagctggccattttgtacaatgacactgctgtgctggagagccaccatgcggccttggccttccagctgaccactggagatgataaatgcaatatatttaaaaacatggagaggaatgattatcggacactgcgccaggggattatcgacatggtcttagccacagaaatgacaaagcactttgagcatgtcaacaaatttgtcaacagcatcaacaaacccttggcaacactagaagaaaatggggaaactgataaaaaccaggaagtgataaacactatgcttaggactccagagaaccggaccctaatcaaacgaatgctgattaaatgtgctgatgtgtccaatccctgccgacccctgcagtactgcatcgagtgggctgcacgcatttcggaagaatatttttctcagactgatgaagagaagcagcagggcttacctgtggtgatgccagtgtttgacagaaatacctgcagcatccccaaatcccaaatctctttcattgattacttcatcacagacatgtttgatgcttgggatgcctttgtagacctgcctgatttaatgcagcatcttgacaacaactttaaatactggaaaggactggacgaaatgaagctgcggaacctccgaccacctcctgaatagtgggagacaccacccagagccctgaagctttgttccttcggtcatttggaattcctgagggcagccagagctccttggtcctttcagtactaggcagaacagcccccgatctgcatagcctgtgaaagcccacggggacatcagtaaccttctgcagccaccatccaatgccattactgtcaagtgagacttggccactgtagcctgggcctgctgcaggagctcttcagaaaggcacatgaggaccacggtttgcctcagtttctggtaaaacacaaggtctggagtgcccctgcaaagggtattgatggacttcctgccagtgacagagcatgtctattgcaaacaattctctcagttacgttcagcacttaagaacggctaatggcaataggatctttagcaactttttcacatcatagaaggtgcaatcgctcacttgggaacactactgagagtgacttctcttttaaaattgagtagcagatgaaaaattaaaatttgaacttgattattaatatcaattaaaatgttttatttattttattaaaagctcaatattttctatgaattcaaaaatacttcagagccaaagccaacttcaaataccgtgaccaaatttacatgattcatattcattatgcattacttggtatacagacttattttcataatgcaaattaataaaatgacacttttactgcactatagaaatattcatgtatgttaaacttttctgattgaggctaactggaaaaagctggggtcgtattctaagtgctaaagaaggctgcttctactgtatagaacccagggctctgaaacagctctagccgcctaatgcacttcacaggtaactccccaaggtaaaactagactctcttgttggttcgcaaagaaaagttaggacttaacacttttttctaaaattttataattcaatttccaaaagtctactctattttatactgtttctacaaaatattccttataaaaacaaagaacaaaaattgaatatttaatgaattgacattttataaccaacctgtttttatctacggtgggaatctttgatgccagaaatttataaagaggttctgtatcttcacaccttgaataagcataataccataaaaaatgacacttgacatgtcaatgtatttgtcatttcattttaaactcgtatttgtggtttttttcccagataaaaatgaaattaaaccatttcttttt

SEQ ID NO: 130138 - DNA, 3716 bp, Artificial Sequence
  derived and/or modified sequence
tcggagaggacaggaaggagccggctgcaccgcgccagggtctccgcaaaccgggagcccagggagggcgggaagactggcgggggtccgaggcagcccgctacaggatacgtgatggacgcccagagacaccgccctccagctggtgggggaggagccccagccaccaagaagtagcagtagctgatgtgcagtttggccccatgagatttcatcaagatcaacttcaggtacttttagtgtttaccaaagaagataaccaatgtaatggattctgcagggcatgtgaaaaagcagggtttaagtgtacagttaccaaggaggctcaggctgtccttgcctgtttcctggacaaacatcatgacattatcatcatagaccacagaaatcctcgacagctggatgcagaggcactgtgcaggtctatcagatcatcaaaactctcagaaaacacagttattgttggtgtagtacgcagggtggatagagaagagttgtccgtaatgcctttcatttctgctggatttacaaggaggtatgtagaaaaccccaacatcatggcctgctacaatgaactgctccagctggagtttggagaggtgcgatcacaactgaaactcagggcttgtaactcagtattcactgcattagaaaacagtgaagatgcaattgaaattacaagcgaagaccgttttatacagtatgcaaatcctgcatttgaaacaacaatgggctatcagtcaggtgaattaatagggaaggagttaggagaagtgcctataaatgaaaaaaaggctgacttgctcgatactataaattcatgcatcaggataggcaaggagtggcaaggaatttactatgccaaaaagaaaaacggagataatatacaacaaaatgtgaagataatacctgtcattggacagggaggaaaaattagacactatgtgtccattatcagagtgtgcaatggcaacaataaggctgagaaaatatccgaatgtgttcagtctgacactcatacagataatcagacaggcaaacataaagacaggagaaaaggctcactagacgtcaaagctgttgcctcccgtgcaactgaagtttccagccagagacgacactcttccatggcccggatacattccatgacaattgaggcgcccatcaccaaggtaatcaatattatcaatgctgcccaggaaagtagtcccatgcctgtgacagaagccctagaccgtgtgctggaaattctaagaaccactgagttatattcaccacagtttggtgctaaagatgatgatccccatgccaatgaccttgttgggggcttaatgtctgatggtttgcgaagactatcagggaatgaatatgttctttcaacaaaaaacactcaaatggtttcaagcaatataatcactcccatctcccttgatgatgtcccaccacggatagctcgggccatggaaaatgaggaatactgggactttgatatttttgaactggaggctgccacccacaataggcctttgatttatcttggtctcaaaatgtttgctcgctttggaatctgtgaattcttacactgctccgagtcaacgctaagatcatggttacaaattatcgaagccaattatcattcctccaatccctaccacaattctacacattctgctgatgtgcttcatgccactgcctattttctctccaaggagaggataaaggaaactttagatccaattgatgaggtcgctgcactcatcgcagccaccattcatgatgtggatcaccctgggagaaccaactccttcctgtgtaatgctggaagtgagctggccattttgtacaatgacactgctgtgctggagagccaccatgcggccttggccttccagctgaccactggagatgataaatgcaatatatttaaaaacatggagaggaatgattatcggacactgcgccaggggattatcgacatggtcttagccacagaaatgacaaagcactttgagcatgtcaacaaatttgtcaacagcatcaacaaacccttggcaacactagaagaaaatggggaaactgataaaaaccaggaagtgataaacactatgcttaggactccagagaaccggaccctaatcaaacgaatgctgattaaatgtgctgatgtgtccaatccctgccgacccctgcagtactgcatcgagtgggctgcacgcatttcggaagaatatttttctcagactgatgaagagaagcagcagggcttacctgtggtgatgccagtgtttgacagaaatacctgcagcatccccaaatcccaaatctctttcattgattacttcatcacagacatgtttgatgcttgggatgcctttgtagacctgcctgatttaatgcagcatcttgacaacaactttaaatactggaaaggactggacgaaatgaagctgcggaacctccgaccacctcctgaatagtgggagacaccacccagagccctgaagctttgttccttcggtcatttggaattcctgagggcagccagagctccttggtcctttcagtactaggcagaacagcccccgatctgcatagcctgtgaaagcccacggggacatcagtaaccttctgcagccaccatccaatgccattactgtcaagtgagacttggccactgtagcctgggcctgctgcaggagctcttcagaaaggcacatgaggaccacggtttgcctcagtttctggtaaaacacaaggtctggagtgcccctgcaaagggtattgatggacttcctgccagtgacagagcatgtctattgcaaacaattctctcagttacgttcagcacttaagaacggctaatggcaataggatctttagcaactttttcacatcatagaaggtgcaatcgctcacttgggaacactactgagagtgacttctcttttaaaattgagtagcagatgaaaaattaaaatttgaacttgattattaatatcaattaaaatgttttatttattttattaaaagctcaatattttctatgaattcaaaaatacttcagagccaaagccaacttcaaataccgtgaccaaatttacatgattcatattcattatgcattacttggtatacagacttattttcataatgcaaattaataaaatgacacttttactgcactatagaaatattcatgtatgttaaacttttctgattgaggctaactggaaaaagctggggtcgtattctaagtgctaaagaaggctgcttctactgtatagaacccagggctctgaaacagctctagccgcctaatgcacttcacaggtaactccccaaggtaaaactagactctcttgttggttcgcaaagaaaagttaggacttaacacttttttctaaaattttataattcaatttccaaaagtctactctattttatactgtttctacaaaatattccttataaaaacaaagaacaaaaattgaatatttaatgaattgacattttataaccaacctgtttttatctacggtgggaatctttgatgccagaaatttataaagaggttctgtatcttcacaccttgaataagcataataccataaaaaatgacacttgacatgtcaatgtatttgtcatttcattttaaactcgtatttgtggtttttttcccagataaaaatgaaattaaaccatttctttttaagaaa

SEQ ID NO: 130139 - DNA, 2490 bp, Artificial Sequence
  derived and/or modified sequence
atgggttgtgcaccaagcattcacattagcgagagactggtggctgaagacgctccttcacccgctgctcccccactgagttctggcggaccacgcttgcctcaaggccagaaaactgccgcactaccacggactcgcggtgcgggtctcctcgaatccgagctccgagacggctccggtaagaaagttgccgtagccgacgttcaattcgggccaatgagatttcatcaggaccagctgcaggtgctcttggtgtttacaaaagaggataaccaatgtaacggcttttgccgggcatgcgagaaagctgggttcaaatgcactgtgacaaaggaagcacaggccgtgctggcctgtttcctagataaacaccatgacatcatcatcatcgaccacagaaacccacgacagctggatgccgaggccttgtgtaggtctatcagatcaagtaagttgagtgaaaataccgtgattgtgggggtggtacggagggtcgaccgggaggaacttagcgtgatgcctttcatttccgctggatttactcggagatatgtcgaaaacccaaatatcatggcctgctataatgaactgcttcagctggaatttggggaagttcgttctcagctgaagctacgcgcatgcaatagtgtgtttactgctttagaaaacagtgaggacgccattgaaatcacctcagaggatcgctttatacagtatgccaatccagcgttcgaaacgactatgggataccagtctggggaattgatcggcaaggagcttggggaagtaccaatcaatgagaagaaagcagacctcctcgataccatcaattcatgcatccgcatcggcaaggaatggcaggggatatactatgctaaaaaaaaaaatggagataatattcagcagaacgtcaagatcatccctgtaattggccagggcggtaagatacgccattacgtaagcatcatcagagtgtgtaacgggaacaataaggccgagaagatcagcgagtgcgttcagagcgacacccatacagataaccagaccggcaagcacaaggatcgtcggaaggggtcattagatgtgaaggccgtggcctctcgagctacagaggttagttcccaacgcaggcatagctcaatggcccgaattcatagcatgactattgaggctcccatcaccaaagtgataaacatcataaacgctgctcaggaatcatcacccatgcctgtaaccgaagccctggaccgcgtgttggaaattctgcggaccacagagctctatagccctcagttcggtgccaaggacgatgacccacatgctaatgacctggtgggaggtttgatgagcgacgggctgagacgactgtccggaaatgagtatgttctgtccacgaaaaacacccagatggtgagttcgaatataattacccccatcagtttagacgatgtgccccctagaatagccagagccatggaaaacgaagaatactgggactttgatatcttcgagctcgaagccgctactcacaatcggcctttgatttatctggggctcaagatgttcgccaggttcggaatctgtgagttcctgcactgtagcgagtccacgctgaggtcatggctccaaattatcgaagccaactaccatagctctaacccttaccacaattctacacattcagccgacgtcttgcatgcgacagcctattttctgtcgaaagagcgtataaaggaaactcttgaccctattgatgaagtggccgcattgatagccgctacaatccacgacgtggaccacccgggacgaacaaatagcttcctgtgcaatgccggaagcgaactggccatcttatacaatgatacagcagtgcttgaaagtcaccatgctgcacttgcattccagttgactaccggcgatgacaaatgcaatatcttcaaaaacatggagagaaatgactatcgcactctgcgccaggggattatcgatatggtcctggcgaccgaaatgactaagcacttcgagcacgtgaataagttcgtgaacagtatcaataaaccactggccacactggaagagaatggggagacagacaagaaccaggaggtgatcaacacaatgctccggacacccgaaaatcgcacgctgatcaaacggatgctgattaagtgcgccgatgtgagtaatccctgtagaccccttcagtattgtatcgagtgggccgctaggatttcagaagaatatttcagccagacagatgaggaaaagcagcagggtcttccagtggtgatgcccgtgttcgacaggaacacatgcagtatccctaagtcccaaatttcatttatagattacttcatcactgacatgttcgacgcttgggacgcatttgtggacctccccgacctgatgcagcaccttgataacaactttaaatactggaaggggctcgatgagatgaagttaaggaacctgagacccccacctgagtag

SEQ ID NO: 130140 - DNA, 2490 bp, Artificial Sequence
  derived and/or modified sequence
atgggctgcgccccttctattcacatatctgagaggcttgttgcggaggacgcgcctagtcccgctgccccacccctgtcctctggcggacctcgtcttccccagggtcagaagaccgcagccttgccccgaacacgcggagcgggtttgctagagtctgagctccgggacggctctggaaagaaggtcgctgtggcagatgtccagttcggccctatgagattccatcaagaccagctgcaggtcttgctcgtttttacgaaagaggacaatcagtgtaacggtttttgtcgggcatgcgaaaaagctggttttaaatgcacggtcacgaaagaagcacaggccgtcctggcttgtttcctggacaaacatcacgatataattattatcgatcataggaacccgcgacagctagacgccgaagcactgtgccggagcattcgctccagtaagctcagtgaaaatactgtaattgtgggggtggttagacgggtcgaccgggaggagctgtcagttatgcccttcatctcggctgggttcactagacggtatgtcgaaaaccccaatataatggcatgttataatgagctcctgcagcttgaatttggggaggtgcgaagccaactgaagctgagggcatgtaacagcgtgtttaccgcactcgagaattccgaggatgcgattgaaataacatccgaagaccggttcatccagtacgccaaccccgcatttgagaccactatggggtaccagtcaggggagctgatcggcaaggaactaggggaggttccaataaatgaaaagaaggctgacctgctggataccattaatagttgcattaggatcgggaaggaatggcaaggtatctattatgctaaaaagaaaaatggcgacaatatccaacagaatgtgaaaattatccctgtgattggtcaaggaggcaaaatccgacactatgttagcattatcagagtgtgtaatggtaataataaggccgaaaagatttccgagtgcgtccagagcgatacgcataccgacaaccagactggaaaacacaaggacagaaggaagggtagtctggatgttaaggctgtggctagcagagctaccgaggtgtcatcccaacgcagacactcatcaatggccaggatccatagtatgactattgaggctccaataaccaaagtgattaatatcattaacgcagcgcaggaatcatcacccatgcccgtgacggaagccttggaccgcgttctcgaaatcctcagaaccactgaactctactcacctcagtttggcgctaaagatgacgacccacatgctaacgatctggtagggggactcatgtccgatgggctgcgccgactgtcgggtaatgagtatgtgctgagcactaaaaacacacaaatggtgagctcgaatattatcacaccaatatctttggatgacgtgccacccagaatagccagagccatggaaaatgaggagtactgggacttcgacatattcgagctggaggcagctacccacaaccgcccactcatttatctcgggctgaaaatgtttgcgaggtttggcatctgcgaattcctgcactgtagcgagtctaccttgcggtcctggttgcagatcatcgaggcgaactaccacagtagcaatccctaccacaacagtacccacagcgctgacgtgctgcacgccacggcttactttctgagcaaagagcgaatcaaagaaacactagatcccatcgatgaggtggccgctttgattgccgcaactatccacgatgtcgaccacccgggtaggaccaattcctttctgtgcaatgcagggtctgagctcgctattttgtataatgataccgcagtcctcgagtcccaccacgccgcattggctttccagctaacaacaggagacgataagtgtaacatttttaaaaacatggaaagaaatgactaccggacactgcgacagggcatcatcgacatggtactcgcaaccgagatgacaaagcactttgagcacgtcaataaatttgtaaatagtattaacaaaccactagcaactctggaggaaaacggggaaacagataaaaatcaggaggtgatcaatacaatgctccgcacccctgaaaacagaaccttaatcaaacggatgttaattaagtgtgccgatgtatccaatccttgccgcccactgcagtactgtattgagtgggccgcacgtatctctgaggaatactttagccagacagatgaagaaaaacagcagggattaccagttgtgatgccggtgttcgatcggaacacctgttcaatccccaagtcacaaataagttttattgattattttatcacagacatgtttgacgcctgggatgccttcgttgacctcccagatctgatgcaacacttagacaacaactttaagtattggaagggtctggacgagatgaagctgagaaatctccgaccacccccagagtag

SEQ ID NO: 130141 - DNA, 2274 bp, Artificial Sequence
  derived and/or modified sequence
atgcgctttcatcaagaccagttacaggttctgctggtatttacaaaggaagataaccagtgcaacgggttctgccgagcgtgtgaaaaggccggttttaagtgcaccgtgaccaaagaggcccaggctgtgttggcgtgtttcctcgacaagcatcatgatatcatcatcatcgatcacaggaaccctaggcagctcgacgcggaggccctgtgtcgcagtatcaggagctctaagctatctgagaataccgtgatagtcggtgtcgtgaggcgcgtcgaccgcgaagagcttagcgtgatgccttttattagtgcagggtttaccagacgctatgttgaaaatcccaatatcatggcttgctataatgagctgttacagctcgagtttggtgaagtgaggagccagctgaaattgagggcctgcaatagcgtcttcacagccctcgaaaatagtgaggatgcaatcgagattacgtccgaggaccggttcattcagtatgccaaccccgcattcgaaaccaccatgggatatcagtcaggcgaattgatcggtaaggaattgggcgaagtgcccatcaatgagaagaaagcagacctgctcgacacaatcaatagctgtatccgaatagggaaagagtggcaaggaatctattatgccaagaagaagaatggggacaacatccagcagaatgtcaagatcatacccgtcattggccagggcggaaaaatcagacattacgtgtccataattagagtgtgtaacgggaacaataaggcagaaaagataagcgagtgtgtgcagtctgacacgcataccgataatcaaaccgggaaacacaaggaccgacggaagggaagtctcgacgtgaaagccgtggcatccagagccacggaggttagcagccagcgaagacacagctcaatggccaggatacacagcatgactatcgaagcaccaattaccaaggttatcaatattatcaatgcagcccaagagtcttcccctatgccagtgaccgaagcgctcgacagggtcctggagatccttcggaccacagagctttattccccacagtttggcgcaaaagacgacgacccccatgccaacgatctcgtcgggggactaatgagtgatggcctgcgcaggctctccgggaacgagtatgtgctgtcaaccaaaaacactcagatggtcagtagcaacatcatcaccccaatctcccttgacgacgttccacctagaattgctcgtgctatggagaacgaagagtattgggacttcgacatttttgaactggaggctgccacccataacagacctctgatctatcttgggcttaaaatgtttgcaagattcgggatttgcgagttcctgcattgcagcgagagcacgctgcgcagctggctgcagattattgaggcaaactaccactcttctaacccctatcataattcaacacattcggctgacgtgctacacgccacagcttactttctctccaaggagcgcattaaagaaactctggacccgattgacgaggtagctgcacttatcgccgcaacaattcatgacgtagaccacccaggtcgaaccaattcattcctatgtaacgctggcagcgaactggctatcctttacaatgacacagcggtcctggagtcccatcacgcggctctggctttccagcttaccacaggagatgacaaatgcaacatttttaaaaacatggagcgcaatgattaccggacgttgagacagggtattatagatatggtgctggcgacagaaatgaccaagcacttcgaacatgttaataaatttgtgaatagtatcaataagccgctcgctactctcgaagagaacggggagactgataaaaatcaggaagtgatcaacacaatgctgcgcactccggaaaatagaaccctcatcaagcggatgctgattaaatgcgctgacgtcagtaatccatgcagacctctgcaatattgcattgaatgggcggcacgaatctccgaggagtacttctcccagacagacgaggagaaacaacaaggactgcccgtggtgatgcccgtattcgataggaacacgtgttcaatcccaaagagccagatttcgttcattgactattttataactgacatgtttgatgcttgggatgctttcgtggatcttcctgacttgatgcagcatttagacaataacttcaagtactggaagggtttggatgagatgaagctgcggaacctgagaccaccgccagagtag

SEQ ID NO: 130142 - DNA, 2490 bp, Artificial Sequence
  derived and/or modified sequence
atgggctgcgcccccagcatccacatcagcgagagactggtggccgaggacgcccccagccccgccgccccccccctgagcagcggcggccccagactgccccagggccagaagaccgccgccctgcccagaaccagaggcgccggcctgctggagagcgagctgagagacggcagcggcaagaaggtggccgtggccgacgtgcagttcggccccatgagattccaccaggaccagctgcaggtgctgctggtgttcaccaaggaggacaaccagtgcaacggcttctgcagagcctgcgagaaggccggcttcaagtgcaccgtgaccaaggaggcccaggccgtgctggcctgcttcctggacaagcaccacgacatcatcatcatcgaccacagaaaccccagacagctggacgccgaggccctgtgcagaagcatcagaagcagcaagctgagcgagaacaccgtgatcgtgggcgtggtgagaagagtggacagagaggagctgagcgtgatgcccttcatcagcgccggcttcaccagaagatacgtggagaaccccaacatcatggcctgctacaacgagctgctgcagctggagttcggcgaggtgagaagccagctgaagctgagagcctgcaacagcgtgttcaccgccctggagaacagcgaggacgccatcgagatcaccagcgaggacagattcatccagtacgccaaccccgccttcgagaccaccatgggctaccagagcggcgagctgatcggcaaggagctgggcgaggtgcccatcaacgagaagaaggccgacctgctggacaccatcaacagctgcatcagaatcggcaaggagtggcagggcatctactacgccaagaagaagaacggcgacaacatccagcagaacgtgaagatcatccccgtgatcggccagggcggcaagatcagacactacgtgagcatcatcagagtgtgcaacggcaacaacaaggccgagaagatcagcgagtgcgtgcagagcgacacccacaccgacaaccagaccggcaagcacaaggacagaagaaagggcagcctggacgtgaaggccgtggccagcagagccaccgaggtgagcagccagagaagacacagcagcatggccagaatccacagcatgaccatcgaggcccccatcaccaaggtgatcaacatcatcaacgccgcccaggagagcagccccatgcccgtgaccgaggccctggacagagtgctggagatcctgagaaccaccgagctgtacagcccccagttcggcgccaaggacgacgacccccacgccaacgacctggtgggcggcctgatgagcgacggcctgagaagactgagcggcaacgagtacgtgctgagcaccaagaacacccagatggtgagcagcaacatcatcacccccatcagcctggacgacgtgccccccagaatcgccagagccatggagaacgaggagtactgggacttcgacatcttcgagctggaggccgccacccacaacagacccctgatctacctgggcctgaagatgttcgccagattcggcatctgcgagttcctgcactgcagcgagagcaccctgagaagctggctgcagatcatcgaggccaactaccacagcagcaacccctaccacaacagcacccacagcgccgacgtgctgcacgccaccgcctacttcctgagcaaggagagaatcaaggagaccctggaccccatcgacgaggtggccgccctgatcgccgccaccatccacgacgtggaccaccccggcagaaccaacagcttcctgtgcaacgccggcagcgagctggccatcctgtacaacgacaccgccgtgctggagagccaccacgccgccctggccttccagctgaccaccggcgacgacaagtgcaacatcttcaagaacatggagagaaacgactacagaaccctgagacagggcatcatcgacatggtgctggccaccgagatgaccaagcacttcgagcacgtgaacaagttcgtgaacagcatcaacaagcccctggccaccctggaggagaacggcgagaccgacaagaaccaggaggtgatcaacaccatgctgagaacccccgagaacagaaccctgatcaagagaatgctgatcaagtgcgccgacgtgagcaacccctgcagacccctgcagtactgcatcgagtgggccgccagaatcagcgaggagtacttcagccagaccgacgaggagaagcagcagggcctgcccgtggtgatgcccgtgttcgacagaaacacctgcagcatccccaagagccagatcagcttcatcgactacttcatcaccgacatgttcgacgcctgggacgccttcgtggacctgcccgacctgatgcagcacctggacaacaacttcaagtactggaagggcctggacgagatgaagctgagaaacctgagacccccccccgagtag

SEQ ID NO: 130143 - DNA, 2274 bp, Artificial Sequence
  derived and/or modified sequence
atgagattccaccaggaccagctgcaggtgctgctggtgttcaccaaggaggacaaccagtgcaacggcttctgcagagcctgcgagaaggccggcttcaagtgcaccgtgaccaaggaggcccaggccgtgctggcctgcttcctggacaagcaccacgacatcatcatcatcgaccacagaaaccccagacagctggacgccgaggccctgtgcagaagcatcagaagcagcaagctgagcgagaacaccgtgatcgtgggcgtggtgagaagagtggacagagaggagctgagcgtgatgcccttcatcagcgccggcttcaccagaagatacgtggagaaccccaacatcatggcctgctacaacgagctgctgcagctggagttcggcgaggtgagaagccagctgaagctgagagcctgcaacagcgtgttcaccgccctggagaacagcgaggacgccatcgagatcaccagcgaggacagattcatccagtacgccaaccccgccttcgagaccaccatgggctaccagagcggcgagctgatcggcaaggagctgggcgaggtgcccatcaacgagaagaaggccgacctgctggacaccatcaacagctgcatcagaatcggcaaggagtggcagggcatctactacgccaagaagaagaacggcgacaacatccagcagaacgtgaagatcatccccgtgatcggccagggcggcaagatcagacactacgtgagcatcatcagagtgtgcaacggcaacaacaaggccgagaagatcagcgagtgcgtgcagagcgacacccacaccgacaaccagaccggcaagcacaaggacagaagaaagggcagcctggacgtgaaggccgtggccagcagagccaccgaggtgagcagccagagaagacacagcagcatggccagaatccacagcatgaccatcgaggcccccatcaccaaggtgatcaacatcatcaacgccgcccaggagagcagccccatgcccgtgaccgaggccctggacagagtgctggagatcctgagaaccaccgagctgtacagcccccagttcggcgccaaggacgacgacccccacgccaacgacctggtgggcggcctgatgagcgacggcctgagaagactgagcggcaacgagtacgtgctgagcaccaagaacacccagatggtgagcagcaacatcatcacccccatcagcctggacgacgtgccccccagaatcgccagagccatggagaacgaggagtactgggacttcgacatcttcgagctggaggccgccacccacaacagacccctgatctacctgggcctgaagatgttcgccagattcggcatctgcgagttcctgcactgcagcgagagcaccctgagaagctggctgcagatcatcgaggccaactaccacagcagcaacccctaccacaacagcacccacagcgccgacgtgctgcacgccaccgcctacttcctgagcaaggagagaatcaaggagaccctggaccccatcgacgaggtggccgccctgatcgccgccaccatccacgacgtggaccaccccggcagaaccaacagcttcctgtgcaacgccggcagcgagctggccatcctgtacaacgacaccgccgtgctggagagccaccacgccgccctggccttccagctgaccaccggcgacgacaagtgcaacatcttcaagaacatggagagaaacgactacagaaccctgagacagggcatcatcgacatggtgctggccaccgagatgaccaagcacttcgagcacgtgaacaagttcgtgaacagcatcaacaagcccctggccaccctggaggagaacggcgagaccgacaagaaccaggaggtgatcaacaccatgctgagaacccccgagaacagaaccctgatcaagagaatgctgatcaagtgcgccgacgtgagcaacccctgcagacccctgcagtactgcatcgagtgggccgccagaatcagcgaggagtacttcagccagaccgacgaggagaagcagcagggcctgcccgtggtgatgcccgtgttcgacagaaacacctgcagcatccccaagagccagatcagcttcatcgactacttcatcaccgacatgttcgacgcctgggacgccttcgtggacctgcccgacctgatgcagcacctggacaacaacttcaagtactggaagggcctggacgagatgaagctgagaaacctgagacccccccccgagtag

SEQ ID NO: 130144 - protein, 593 aa, Artificial Sequence
  derived and/or modified sequence
MGSGSSSYRPKAIYLDIDGRIQKVIFSKYCNSSDIMDLFCIATGLPRNTTISLLTTDDAMVSIDPTMPANSERTPYKVRPVAIKQLSAGVEDKRTTSRGQSAERPLRDRRVVGLEQPRREGAFESGQVEPRPREPQGCYQEGQRIPPEREELIQSVLAQVAEQFSRAFKINELKAEVANHLAVLEKRVELEGLKVVEIEKCKSDIKKMREELAARSSRTNCPCKYSFLDNHKKLTPRRDVPTYPKYLLSPETIEALRKPTFDVWLWEPNEMLSCLEHMYHDLGLVRDFSINPVTLRRWLFCVHDNYRNNPFHNFRHCFCVAQMMYSMVWLCSLQEKFSQTDILILMTAAICHDLDHPGYNNTYQINARTELAVRYNDISPLENHHCAVAFQILAEPECNIFSNIPPDGFKQIRQGMITLILATDMARHAEIMDSFKEKMENFDYSNEEHMTLLKMILIKCCDISNEVRPMEVAEPWVDCLLEEYFMQSDREKSEGLPVAPFMDRDKVTKATAQIGFIKFVLIPMFETVTKLFPMVEEIMLQPLWESRDRYEELKRIDDAMKELQKKTDSLTSGATEKSRERSRDVKNSEGDCA

SEQ ID NO: 130145 - DNA, 1782 bp, Artificial Sequence
  derived and/or modified sequence
atgggctcaggctctagcagttacaggcccaaggccatctatctggacattgacggccggatccagaaagtgatcttttcaaaatattgcaactcctctgatatcatggacctcttttgcatcgccaccgggcttcccagaaatacaacgattagcctcctcacaaccgatgacgccatggtatccatcgaccctacaatgcctgccaactctgaaaggaccccctacaaagtgaggcccgtcgccataaagcaactatcggccggagtggaggacaagcgcaccacctccaggggccagtccgctgagagaccactgagagaccgacgcgtggtgggcttggagcagcctaggagggaaggagccttcgagtccggccaggttgagccgaggcctagagaaccacagggctgttatcaggaagggcagcggataccacccgaacgcgaagaactcatccagagtgtgcttgcccaagttgccgagcaattcagcagggccttcaaaataaacgagctcaaagcagaggtcgccaatcacctagctgtgctggagaagcgggtggaactggaagggcttaaggtggtggaaatcgagaagtgtaagtcagacattaaaaaaatgagagaagaactggccgcccgcagcagcagaaccaattgcccctgcaagtattcgttcctggataatcacaaaaagctcactcctcgccgcgacgttcctacttaccccaagtacctactatcccccgagaccattgaggcccttcgaaaacccacattcgacgtgtggctgtgggaaccgaatgagatgttatcttgccttgagcacatgtaccacgatctcggactggtgcgagacttctcaataaaccccgttaccctccgcaggtggctcttctgtgtgcacgataactaccgcaataatccattccacaacttcaggcattgtttttgcgtggcacaaatgatgtacagcatggtatggctctgctccctgcaggagaaatttagccaaaccgatattctcatattgatgactgcggctatttgccatgacctagatcaccccggctacaacaatacttaccagattaacgcacgcacggaacttgcagtgagatataacgacatcagtcctctcgaaaaccaccattgtgctgtggctttccagatccttgccgagcctgagtgcaatattttctccaacatccctccagacggcttcaagcaaattcgccaagggatgataacactgatcctggctacagacatggccagacacgcagaaattatggactcatttaaagaaaagatggagaatttcgactattctaacgaggaacacatgactctactgaaaatgattttaatcaaatgttgtgatatttctaacgaagtacgaccaatggaggtggcagaaccatgggttgattgcctgttggaagaatacttcatgcagtccgacagagagaaatcggaaggccttccagtggcgcccttcatggatagggataaagttaccaaggctaccgcccagatcggtttcatcaaatttgtactgatccccatgtttgagacagtcaccaagcttttcccaatggtggaggagatcatgctacagccactgtgggagagtagggatcgttacgaggagctaaaaaggattgacgacgcgatgaaggagctgcagaagaagacagacagcctgacaagcggcgctacagagaagtctcgtgaacgctcaagagatgtgaaaaactcagagggcgactgtgcttag

SEQ ID NO: 130146 - DNA, 1782 bp, Artificial Sequence
  derived and/or modified sequence
atgggcagcggcagcagcagctaccggcccaaggccatctacctggacattgatggccgcatccagaaggtgatcttcagcaagtactgcaacagcagtgacatcatggacctcttctgcatcgccaccggcctgcccaggaacaccaccatcagcctgctgaccacagatgatgccatggtgtccattgaccccaccatgcctgccaacagcgagaggaccccctacaaggtgcggcctgtggccatcaagcagctgtctgctggggtggaggacaagaggaccaccagccggggccagagcgctgagcggcccctgcgggacagaagagtggtgggcctggagcagccccggcgggagggcgcctttgaaagtggccaggtggagccccggccccgggagccccagggctgctaccaggagggccagaggatccccccagagcgggaggagctgatccagagcgtgctggcccaggtggccgagcagttcagccgggccttcaagatcaatgagctgaaggccgaggtggccaaccacctggccgtgctggagaagagggtggagctggagggcctgaaggtggtggagattgagaagtgcaagagtgacatcaagaagatgagggaggagctggccgcccggagcagcaggaccaactgcccctgcaagtacagcttcctggacaaccacaagaagctgaccccaagaagagatgtgcccacctaccccaagtacctgctgagccctgagaccatcgaggccctgaggaagcccacctttgatgtgtggctgtgggagcccaatgagatgctgagctgcctggagcacatgtaccatgacctgggcctggtgcgggacttcagcatcaaccctgtgaccctgcggcgctggctgttctgtgtgcatgacaactacagaaacaaccccttccacaacttccgccactgcttctgtgtggcccagatgatgtacagcatggtgtggctgtgcagcctgcaggagaagttcagccagacagacatcctgatcctgatgacagctgccatctgccacgacctggaccaccctggctacaacaacacctaccagatcaatgccaggacagagctggccgtgcgctacaatgacatcagccccctggagaaccaccactgtgctgtggccttccagatcctggccgagcctgagtgcaacatcttcagcaacatccccccagatggcttcaagcagatccggcagggcatgatcaccctcatcctggccacagacatggcccggcatgctgagatcatggacagcttcaaggagaagatggagaactttgactacagcaatgaggagcacatgaccctgctgaagatgatcctgatcaagtgctgtgacatcagcaatgaggtgcggcccatggaggtggccgagccctgggtggactgcctgctggaggagtacttcatgcagagcgaccgggagaagtctgagggcctgcctgtggcccccttcatggaccgggacaaggtgaccaaggccacagcccagatcggcttcatcaagtttgtgctgatccccatgtttgaaacagtgaccaagctgttccccatggtggaggagatcatgctgcagcccctgtgggagagccgggacagatatgaggagctgaagagaattgatgatgccatgaaggagctgcagaagaagacagacagcctgaccagcggggccacagagaagagccgggagaggagcagagatgtgaagaacagcgagggggactgtgcctag

SEQ ID NO: 130147 - DNA, 1782 bp, Artificial Sequence
  derived and/or modified sequence
atgggcagcggcagcagcagctaccggcccaaggccatctacctggacattgatggtcgtatccagaaagttattttttccaagtactgcaattcgtccgatataatggacctcttttgtatcgcaaccggattgcctcggaatactactatttccctgttgacaactgacgatgccatggtaagcatcgacccaacaatgcccgccaactctgagagaacaccctacaaggtgaggccagtggcaattaagcagctgtccgcaggcgtggaggacaaaagaaccacatcaagagggcagtccgcagagcgtccactgcgcgaccgcagggttgtggggctggagcagccccgcagggagggggccttcgagagcggacaggtggagcctagacccagagaaccccagggatgctatcaagaaggccagcgcatacctccagagcgggaagaactcatccaaagcgttttagcacaggttgccgaacagttctccagagcttttaagatcaatgaattgaaggccgaagtggccaatcatctagccgtgctcgaaaagcgcgtggagctggagggactcaaggtggtcgagatcgagaaatgcaaaagcgacattaaaaagatgagagaagagctagcagccagatcttctcggacaaactgtccatgcaaatacagtttccttgataatcataaaaagctaaccccccgccgcgacgtgccgacttatcctaaatatctgctcagtcccgaaaccattgaagctctgaggaagcccacattcgacgtatggttgtgggagcctaatgaaatgctttcttgtcttgagcatatgtaccatgacttggggcttgtgcgtgatttttcaattaaccccgtgaccctgaggaggtggctgttctgtgtccacgataactacaggaacaaccccttccacaattttaggcattgtttctgcgtggcgcagatgatgtatagcatggtatggctgtgttctctacaggaaaaattttctcagaccgatattctcattttaatgacagcggccatctgtcacgacttggatcatccagggtacaacaatacctatcagatcaatgccaggacagagctggctgtcaggtataatgacatatcacctcttgagaatcaccactgcgcagtggcctttcagattttggctgagcccgagtgcaacattttttctaacattccccctgacggctttaagcagatccggcagggcatgatcaccctgattcttgcgacagacatggcccgtcatgcagagattatggactcgttcaaagagaagatggaaaacttcgactacagcaatgaggagcacatgaccctgctaaaaatgatcctcattaaatgctgtgacatttcaaacgaggtgcgtcctatggaggtggcagagccttgggtggattgtcttttggaggaatatttcatgcagtctgatcgggagaagtctgaggggctacctgtggctccttttatggaccgagacaaggtgacaaaggccactgctcagattggcttcattaaattcgtactgatcccaatgttcgagactgtcacaaagctttttcccatggtagaagaaattatgctccagcctctgtgggaaagccgggatcgctacgaggagttgaagaggatcgatgacgccatgaaggagctacagaaaaaaacagattctctcacctccggagccacggagaagagccgcgagagaagtagagatgtgaaaaactcagaaggagactgcgcgtag

SEQ ID NO: 130148 - DNA, 2058 bp, Artificial Sequence
  derived and/or modified sequence
cgcggcggctggcgtcgggaaagtacagtaaaaagtccgagtgcagccgccgggcgcaggatgggatccggctcctccagctaccggcccaaggccatctacctggacatcgatggacgcattcagaaggtaatcttcagcaagtactgcaactccagcgacatcatggacctgttctgcatcgccaccggcctgcctcggaacacgaccatctccctgctgaccaccgacgacgccatggtctccatcgaccccaccatgcccgcgaattcagaacgcactccgtacaaagtgagacctgtggccatcaagcaactctccgctggtgtcgaggacaagagaaccacaagccgtggccagtctgctgagagaccactgagggacagacgggttgtgggcctggagcagccccggagggaaggagcatttgaaagtggacaggtagagcccaggcccagagagccccagggctgctaccaggaaggccagcgcatccctccagagagagaagaattaatccagagcgtgctggcgcaggttgcagagcagttctcaagagcattcaaaatcaatgaactgaaagctgaagttgcaaatcacttggctgtcctagagaaacgcgtggaattggaaggactaaaagtggtggagattgagaaatgcaagagtgacattaagaagatgagggaggagctggcggccagaagcagcaggaccaactgcccctgtaagtacagttttttggataaccacaagaagttgactcctcgacgcgatgttcccacttaccccaagtacctgctctctccagagaccatcgaggccctgcggaagccgacctttgacgtctggctttgggagcccaatgagatgctgagctgcctggagcacatgtaccacgacctcgggctggtcagggacttcagcatcaaccctgtcaccctcaggaggtggctgttctgcgtccacgacaactacagaaacaaccccttccacaacttccggcactgcttctgcgtggcccagatgatgtacagcatggtctggctctgcagtctccaggagaagttctcacaaacggatatcctgatcctaatgacagcggccatctgccacgatctggaccatcccggctacaacaacacgtaccagatcaatgcccgcacagagctggcggtccgctacaatgacatctcaccgctggagaaccaccactgcgccgtggccttccagatcctcgccgagcctgagtgcaacatcttctccaacatcccacctgatgggttcaagcagatccgacagggaatgatcacattaatcttggccactgacatggcaagacatgcagaaattatggattctttcaaagagaaaatggagaattttgactacagcaacgaggagcacatgaccctgctgaagatgattttgataaaatgctgtgatatctctaacgaggtccgtccaatggaagtcgcagagccttgggtggactgtttattagaggaatattttatgcagagcgaccgtgagaagtcagaaggccttcctgtggcaccgttcatggaccgagacaaagtgaccaaggccacagcccagattgggttcatcaagtttgtcctgatcccaatgtttgaaacagtgaccaagctcttccccatggttgaggagatcatgctgcagccactttgggaatcccgagatcgctacgaggagctgaagcggatagatgacgccatgaaagagttacagaagaagactgacagcttgacgtctggggccaccgagaagtccagagagagaagcagagatgtgaaaaacagtgaaggagactgtgcctgaggaaagcggggggcgtggctgcagttctggacgggctggccgagctgcgcgggatccttgtgcagggaagagctgccctgggcacctggcaccacaagaccatgttttctaagaaccattttgttcactgatacaaaaaaaaaaaaaggaattcatgatgctgtacagaattttatttttaaactgtcttttaaataatatattcttatacggaaa

SEQ ID NO: 130149 - DNA, 1782 bp, Artificial Sequence
  derived and/or modified sequence
atggggtccgggagttcttcttatagacccaaagccatataccttgacatcgacggacgcattcagaaggtcattttcagcaaatattgcaattccagtgatattatggatctattttgtatagctaccggcctgcctcgcaatacaacaatctcactgctaacgactgacgatgccatggtgtctatcgatcctacgatgcccgcaaatagtgagagaactccttacaaggttcgacctgtggccattaagcagctcagcgcaggagtagaggacaaaaggactactagtagaggacaaagcgccgagcggcctctgcgcgatagaagagtggtcggcctggaacaacccaggcgggaaggggctttcgagtcaggccaggtcgaaccgaggccacgtgaaccccagggctgttatcaggaggggcagcggatccctccggagcgcgaggagctgattcagagcgtattagctcaagtggctgagcagtttagcagagcatttaagatcaatgaactgaaggctgaggttgccaaccaccttgccgtgcttgagaaaagggtcgaacttgagggactgaaagtggtggagattgagaaatgcaagtcagatattaaaaaaatgcgagaagagttggccgctcgttctagtcgaacaaattgtccatgcaagtattcctttctggataatcacaagaaactgacgcccagaagggatgtcccgacttaccccaaatacctgctgtcccccgaaactatcgaagctctgcgaaaacctacttttgatgtttggctttgggagcctaacgagatgttgtcctgtctggagcatatgtaccacgatctcggcttggtaagagacttttcaattaaccccgtcacactccgcagatggctgttctgtgtgcacgacaattacagaaataatccattccataattttaggcactgcttttgcgtcgcccagatgatgtacagcatggtgtggttatgctctctccaggaaaagttcagccaaactgacatcctcatccttatgactgcggctatctgccatgacctggaccaccctggctataacaatacttaccaaataaacgcacgaaccgaacttgcagtaagatataatgatatctctccactggagaaccaccattgtgccgtggcttttcagattttggccgaacctgaatgcaacattttttcgaatattcccccagacggctttaaacagattagacagggaatgattacattgatcttggccacagacatggcgcgacacgcagagattatggattcctttaaagaaaagatggaaaatttcgattactcaaatgaagaacatatgaccttgctcaagatgatactgattaaatgttgcgatatttctaacgaagtgcggcctatggaagttgcggaaccctgggtagattgtttgctggaagaatacttcatgcagagtgatagggagaaatcggagggcctccctgtcgcaccgttcatggaccgcgacaaagtcaccaaagccacagcccaaatcggctttatcaaattcgtactgatcccaatgttcgagaccgtgaccaaactatttccaatggtcgaggaaatcatgctccagccgctatgggaaagccgcgacagatacgaggagctcaagcgcatcgatgatgcaatgaaggaactacaaaagaaaacagacagtctaacctcaggcgctaccgagaagtcaagagagaggtctagagatgtgaaaaactctgaaggggactgcgcctag

SEQ ID NO: 130150 - DNA, 1782 bp, Artificial Sequence
  derived and/or modified sequence
atgggcagcggcagcagcagctacagacccaaggccatctacctggacatcgacggcagaatccagaaggtgatcttcagcaagtactgcaacagcagcgacatcatggacctgttctgcatcgccaccggcctgcccagaaacaccaccatcagcctgctgaccaccgacgacgccatggtgagcatcgaccccaccatgcccgccaacagcgagagaaccccctacaaggtgagacccgtggccatcaagcagctgagcgccggcgtggaggacaagagaaccaccagcagaggccagagcgccgagagacccctgagagacagaagagtggtgggcctggagcagcccagaagagagggcgccttcgagagcggccaggtggagcccagacccagagagccccagggctgctaccaggagggccagagaatcccccccgagagagaggagctgatccagagcgtgctggcccaggtggccgagcagttcagcagagccttcaagatcaacgagctgaaggccgaggtggccaaccacctggccgtgctggagaagagagtggagctggagggcctgaaggtggtggagatcgagaagtgcaagagcgacatcaagaagatgagagaggagctggccgccagaagcagcagaaccaactgcccctgcaagtacagcttcctggacaaccacaagaagctgacccccagaagagacgtgcccacctaccccaagtacctgctgagccccgagaccatcgaggccctgagaaagcccaccttcgacgtgtggctgtgggagcccaacgagatgctgagctgcctggagcacatgtaccacgacctgggcctggtgagagacttcagcatcaaccccgtgaccctgagaagatggctgttctgcgtgcacgacaactacagaaacaaccccttccacaacttcagacactgcttctgcgtggcccagatgatgtacagcatggtgtggctgtgcagcctgcaggagaagttcagccagaccgacatcctgatcctgatgaccgccgccatctgccacgacctggaccaccccggctacaacaacacctaccagatcaacgccagaaccgagctggccgtgagatacaacgacatcagccccctggagaaccaccactgcgccgtggccttccagatcctggccgagcccgagtgcaacatcttcagcaacatcccccccgacggcttcaagcagatcagacagggcatgatcaccctgatcctggccaccgacatggccagacacgccgagatcatggacagcttcaaggagaagatggagaacttcgactacagcaacgaggagcacatgaccctgctgaagatgatcctgatcaagtgctgcgacatcagcaacgaggtgagacccatggaggtggccgagccctgggtggactgcctgctggaggagtacttcatgcagagcgacagagagaagagcgagggcctgcccgtggcccccttcatggacagagacaaggtgaccaaggccaccgcccagatcggcttcatcaagttcgtgctgatccccatgttcgagaccgtgaccaagctgttccccatggtggaggagatcatgctgcagcccctgtgggagagcagagacagatacgaggagctgaagagaatcgacgacgccatgaaggagctgcagaagaagaccgacagcctgaccagcggcgccaccgagaagagcagagagagaagcagagacgtgaagaacagcgagggcgactgcgcctag

SEQ ID NO: 130151 - DNA, 636 bp, Artificial Sequence
  derived and/or modified sequence
atgagaaccctggcctgcctgctgctgctgggctgcggctacctggcccacgtgctggccgaggaggccgagatccccagagaggtgatcgagagactggccagaagccagatccacagcatcagagacctgcagagactgctggagatcgacagcgtgggcagcgaggacagcctggacaccagcctgagagcccacggcgtgcacgccaccaagcacgtgcccgagaagagacccctgcccatcagaagaaagagaagcatcgaggaggccgtgcccgccgtgtgcaagaccagaaccgtgatctacgagatccccagaagccaggtggaccccaccagcgccaacttcctgatctggcccccctgcgtggaggtgaagagatgcaccggctgctgcaacaccagcagcgtgaagtgccagcccagcagagtgcaccacagaagcgtgaaggtggccaaggtggagtacgtgagaaagaagcccaagctgaaggaggtgcaggtgagactggaggagcacctggagtgcgcctgcgccaccaccagcctgaaccccgactacagagaggaggacaccggcagacccagagagagcggcaagaagagaaagagaaagagactgaagcccacctag

SEQ ID NO: 130152 - DNA, 636 bp, Artificial Sequence
  derived and/or modified sequence
atgcggaccttggcttgcctcctgttgcttggatgtggttacttggctcacgttctcgccgaggaagctgaaattcctagggaggtgatagagcggctggctcgctcccaaattcactctattagggatctgcaacgtctgctggagattgattcggttggcagcgaggacagtctggatacctctcttcgggcccacggagttcatgccaccaagcatgtgcccgaaaagcggccacttccaattagaagaaaacggagcatcgaggaagccgtaccagccgtctgtaaaacaagaacagttatctatgaaattcccaggagccaagtggacccaacctcagccaactttctgatctggcccccgtgtgttgaggtaaagcgatgcactggttgttgcaataccagctccgtgaaatgccagcccagcagggtgcaccaccgaagcgtcaaggtcgcgaaggtggaatacgtcaggaagaagcccaagttgaaggaagtccaggtgcggctcgaagagcacttggagtgtgcctgcgccacaaccagccttaatcctgactatagagaggaggataccggtaggccccgtgagagcgggaagaaacgcaagaggaaaaggcttaagccgacttag

SEQ ID NO: 130153 - DNA, 636 bp, Artificial Sequence
  derived and/or modified sequence
atgaggaccctggcctgcctgctgctgctgggctgcggctacctggcccacgtgctggccgaggaggccgagatcccccgggaggtgattgaaaggctggcccggagccagatccacagcatccgggacctgcagaggctgctggagattgacagcgtgggcagcgaggacagcctggacaccagcctgcgggcccacggcgtgcacgccaccaagcacgtgcctgagaagaggcccctgcccatccggaggaagaggagcattgaggaggccgtgcctgctgtgtgcaagaccaggacagtcatctatgagatccccaggagccaggtggaccccaccagcgccaacttcctgatctggccaccctgtgtggaggtgaagcgctgcaccggctgctgcaacaccagctctgtgaagtgccagcccagccgggtgcaccacaggtctgtgaaggtggccaaggtggagtatgtgaggaagaagcccaagctgaaggaggtgcaggtgcggctggaggagcacctggagtgtgcctgtgccaccaccagcctgaacccagactaccgggaggaggacaccggccggccccgggagagcggcaagaagaggaagaggaagaggctgaagcccacctag

SEQ ID NO: 130154 - DNA, 636 bp, Artificial Sequence
  derived and/or modified sequence
atgcggaccctggcctgcctgctgctgctgggctgcggctacctggcacatgtcttggccgaggaggccgaaattcctcgcgaggtaatcgagcggttagctagaagccagatccactcgatccgtgacctccagagactgctcgaaatcgactccgtgggttctgaagactcactcgatactagccttcgggcccacggtgttcacgcaacaaagcatgtccctgaaaaaagacccctacccatccgcagaaagcggtccatagaggaggctgtaccagccgtgtgcaagaccagaaccgtgatatacgagatccccagatcccaggtggaccccacttccgcgaatttcctcatttggccaccttgcgtcgaagttaagaggtgcactggttgttgcaatacgagttctgtgaaatgccaacccagtagagttcatcatcggagtgtcaaggttgccaaagtcgagtatgtgagaaaaaaacctaagctcaaagaagtacaggtacggcttgaagagcaccttgaatgtgcctgtgctactacttcactcaaccccgattaccgagaagaagacaccggcaggcctcgagaatcaggaaaaaaaaggaaaaggaagcgactgaagccaacatag

SEQ ID NO: 130155 - DNA, 636 bp, Artificial Sequence
  derived and/or modified sequence
atgaggaccctcgcctgtctgttacttctcggctgcggatatctcgcccatgtacttgccgaggaagcggaaatcccacgagaagtcatcgaacgtcttgccaggtcccagatacactctatcagggatctccagaggttacttgaaatagacagtgtgggaagcgaagactctctggatacatctctcagagcacacggggtgcacgcgacaaagcacgtgccagaaaagcgtcccctgcctatccggcgtaagagatctatcgaggaagccgtcccggcagtctgtaagacccgcactgtgatttatgagattcccaggagccaagtggaccccacatctgccaacttcttgatctggccaccttgcgtcgaagtgaaacgctgcaccggttgctgcaacacttctagcgtgaagtgccagccctcacgcgtccatcaccggagcgtcaaagtcgctaaggtcgaatatgtgcggaagaagccaaaactcaaggaagtgcaagtaaggctcgaggagcatttggagtgtgcctgcgcaaccacttcactgaacccagattatagggaggaggacactggacgtccaagggagtccggaaaaaagagaaaacggaagaggctcaagcctacttag

SEQ ID NO: 130156 - DNA, 636 bp, Artificial Sequence
  derived and/or modified sequence
atgcgtactctcgcgtgtctgctcctactggggtgtgggtacttggcccatgtactggctgaagaggctgagataccaagagaagtcattgagcggctggcgcgcagccagattcactccatccgcgatttgcagcggcttttagagatcgattctgttggctcagaggactccctagatacatcactcagagcacatggagtgcacgccaccaagcatgtgcccgagaaacggcccctcccaattcgacgtaagagaagtattgaagaggctgttcctgctgtctgcaagactcgtaccgtaatctatgaaataccccggtctcaggtcgacccgacaagcgccaatttcctaatttggcccccttgcgttgaggtaaagagatgcacaggctgttgcaacacgtcttcagtaaaatgccagccctccagagttcatcacaggagcgtgaaggtagctaaagtggaatatgtcaggaagaaaccgaagcttaaggaggtccaggtgagacttgaggaacatttggaatgcgcctgtgccaccacttcattaaatcccgactaccgcgaagaggatacaggcagacccagggagtccggtaagaaaagaaagcgtaaaaggctcaaacctacatag

SEQ ID NO: 130157 - DNA, 636 bp, Artificial Sequence
  derived and/or modified sequence
atgagaacgcttgcctgcctcctgctcttgggatgcgggtatctagcccacgtactcgctgaggaagctgaaatcccccgagaagtaattgaacgactggctcggtcacaaatccatagcatacgcgaccttcaacgcctgctggagattgactctgttggcagcgaagatagtctggatacttccctcagggcccacggcgtacacgctactaaacacgtgccagagaagaggcctctccccatcaggcgtaagagatccatcgaggaagcagtccctgctgtatgtaaaacaagaactgtcatttacgaaatccccagatctcaggttgatcccacctctgcaaatttcctgatctggccaccttgcgttgaagtaaaaagatgtaccggctgctgtaatacctcatccgtgaaatgtcaaccaagcagagtacaccatcgctcagttaaggtggcaaaggtagaatacgttagaaagaaacccaagttaaaggaggtgcaagtccgccttgaggaacacctggagtgcgcatgcgccacaacctcacttaatcccgattaccgcgaagaagacaccggccgcccccgcgagagcggcaaaaaaagaaaaagaaaaagattaaagcctacttag

SEQ ID NO: 130158 - RNA, 636 nt, Artificial Sequence
  derived and/or modified sequence
augcguacucucgcgugucugcuccuacugggguguggguacuuggcccauguacuggcugaagaggcugagauaccaagagaagucauugagcggcuggcgcgcagccagauucacuccauccgcgauuugcagcggcuuuuagagaucgauucuguuggcucagaggacucccuagauacaucacucagagcacauggagugcacgccaccaagcaugugcccgagaaacggccccucccaauucgacguaagagaaguauugaagaggcuguuccugcugucugcaagacucguaccguaaucuaugaaauaccccggucucaggucgacccgacaagcgccaauuuccuaauuuggcccccuugcguugagguaaagagaugcacaggcuguugcaacacgucuucaguaaaaugccagcccuccagaguucaucacaggagcgugaagguagcuaaaguggaauaugucaggaagaaaccgaagcuuaaggagguccaggugagacuugaggaacauuuggaaugcgccugugccaccacuucauuaaaucccgacuaccgcgaagaggauacaggcagacccagggaguccgguaagaaaagaaagcguaaaaggcucaaaccuacauag

SEQ ID NO: 130159 - RNA, 636 nt, Artificial Sequence
  derived and/or modified sequence
augagaacgcuugccugccuccugcucuugggaugcggguaucuagcccacguacucgcugaggaagcugaaaucccccgagaaguaauugaacgacuggcucggucacaaauccauagcauacgcgaccuucaacgccugcuggagauugacucuguuggcagcgaagauagucuggauacuucccucagggcccacggcguacacgcuacuaaacacgugccagagaagaggccucuccccaucaggcguaagagauccaucgaggaagcagucccugcuguauguaaaacaagaacugucauuuacgaaauccccagaucucagguugaucccaccucugcaaauuuccugaucuggccaccuugcguugaaguaaaaagauguaccggcugcuguaauaccucauccgugaaaugucaaccaagcagaguacaccaucgcucaguuaagguggcaaagguagaauacguuagaaagaaacccaaguuaaaggaggugcaaguccgccuugaggaacaccuggagugcgcaugcgccacaaccucacuuaaucccgauuaccgcgaagaagacaccggccgcccccgcgagagcggcaaaaaaagaaaaagaaaaagauuaaagccuacuuag

SEQ ID NO: 130160 - protein, 241 aa, Artificial Sequence
  derived and/or modified sequence
MNRCWALFLSLCCYLRLVSAEGDPIPEELYEMLSDHSIRSFDDLQRLLHGDPGEEDGAELDLNMTRSHSGGELESLARGRRSLGSLTIAEPAMIAECKTRTEVFEISRRLIDRTNANFLVWPPCVEVQRCSGCCNNRNVQCRPTQVQLRPVQVRKIEIVRKKPIFKKATVTLEDHLACKCETVAAARPVTRSPGGSQEQRAKTPQTRVTIRTVRVRRPPKGKHRKFKHTHDKTALKETLGA

SEQ ID NO: 130161 - DNA, 726 bp, Artificial Sequence
  derived and/or modified sequence
atgaacagatgctgggccctgttcctgagcctgtgctgctacctgagactggtgagcgccgagggcgaccccatccccgaggagctgtacgagatgctgagcgaccacagcatcagaagcttcgacgacctgcagagactgctgcacggcgaccccggcgaggaggacggcgccgagctggacctgaacatgaccagaagccacagcggcggcgagctggagagcctggccagaggcagaagaagcctgggcagcctgaccatcgccgagcccgccatgatcgccgagtgcaagaccagaaccgaggtgttcgagatcagcagaagactgatcgacagaaccaacgccaacttcctggtgtggcccccctgcgtggaggtgcagagatgcagcggctgctgcaacaacagaaacgtgcagtgcagacccacccaggtgcagctgagacccgtgcaggtgagaaagatcgagatcgtgagaaagaagcccatcttcaagaaggccaccgtgaccctggaggaccacctggcctgcaagtgcgagaccgtggccgccgccagacccgtgaccagaagccccggcggcagccaggagcagagagccaagaccccccagaccagagtgaccatcagaaccgtgagagtgagaagaccccccaagggcaagcacagaaagttcaagcacacccacgacaagaccgccctgaaggagaccctgggcgcctag

SEQ ID NO: 130162 - DNA, 726 bp, Artificial Sequence
  derived and/or modified sequence
atgaatcgctgttgggcactgttcctaagcctgtgctgctacttaagactcgtaagtgcagagggagacccaatccccgaggagttgtacgagatgctctccgatcacagcattagatcgtttgatgacctgcagaggctgctgcacggtgatcctggcgaggaggatggtgcagaattggacctaaatatgaccaggtctcactccggaggagagctcgaatcactcgcaagaggcaggaggtcacttggctcactcacaattgctgagcccgccatgatcgctgagtgcaaaactagaactgaggtattcgaaatcagcagaagattgatcgatcgcacaaatgctaattttcttgtgtggcctccgtgtgtggaagtccagcggtgctccggttgctgtaacaaccgcaacgtgcagtgtcggcctactcaggtgcagctgaggcctgtccaggtgcggaaaattgagatagtgcgcaagaagcccatctttaagaaggcaaccgttacattggaagaccacttagcatgtaaatgcgaaacggtagctgccgccagaccagtcacaaggtcacccggcggatctcaggagcagcgcgccaaaaccccccagaccagggtgactatccgaacagtccgggtccggcggcctcccaagggtaagcaccggaaattcaagcatactcatgacaaaacggcactgaaggaaacactgggcgcctag

SEQ ID NO: 130163 - DNA, 726 bp, Artificial Sequence
  derived and/or modified sequence
atgaaccgctgctgggccctcttcctgagcctgtgctgctacctgcggctggtgtctgctgagggggaccccatccctgaggagctgtatgagatgctgagtgaccacagcatccgcagctttgatgacctgcagaggctgctgcatggagaccccggggaggaggatggagctgagctggacctgaacatgaccaggagccacagcggcggggagctggagagcctggcccggggccgccgcagcctgggcagcctgaccatcgccgagcccgccatgattgctgagtgcaagaccaggacagaggtgtttgagatcagccggcggctgattgacaggaccaatgccaacttcctggtgtggccaccctgtgtggaggtgcagcgctgcagcggctgctgcaacaacagaaatgtgcagtgccggcccacccaggtgcagctgcggcctgtgcaggtgaggaagattgagatcgtgaggaagaagcccatcttcaagaaggccaccgtgaccctggaggaccacctggcctgcaagtgtgagaccgtggccgccgcccggcctgtgaccaggagccctgggggcagccaggagcagagggccaagaccccccagaccagggtgaccatcagaacagtgcgggtgcggcggccccccaagggcaagcacaggaagttcaagcacacccatgacaagacagccctgaaggagaccctgggcgcctag

SEQ ID NO: 130164 - DNA, 726 bp, Artificial Sequence
  derived and/or modified sequence
atgaaccggtgctgggccctgttcctgagcctgtgctgctacctgcggctggtgtctgccgaaggggaccccattccagaggagctctacgagatgctttccgatcattctatccggtcgttcgatgacctgcagcgtctactgcatggagaccccggcgaggaagatggcgccgagttggatctgaatatgactcgttcacattctgggggtgaactggagagtctcgcacgcggtaggcggtccctcggcagcttaaccatcgcagagcccgccatgattgccgagtgcaaaacacggaccgaagtcttcgaaatctcacgcaggctgattgatcggactaatgccaacttcctggtctggccgccctgcgttgaggtgcaacgctgctcagggtgctgcaacaatcgcaacgtgcagtgccgccccacccaggtgcagctcaggcctgtgcaggttcgcaagatcgagatcgtgagaaagaagcccattttcaaaaaggcaaccgtgacactggaggatcacttggcctgtaagtgcgagacagttgcggctgctcggcccgtcacaaggagtccaggcggatcccaggaacagagagcaaagaccccacagactcgtgtgacgattcgaaccgtccgcgtgcgccgcccacccaagggtaaacaccggaagtttaaacatacacacgataagacagccttgaaggaaactctcggcgcgtag

SEQ ID NO: 130165 - DNA, 726 bp, Artificial Sequence
  derived and/or modified sequence
atgaataggtgttgggctttatttctgtccctttgctgttaccttaggctcgtatccgccgaaggagacccaatccccgaagagctatacgagatgttgagtgatcactctattcggtccttcgatgatttacaaaggctgctgcacggcgacccaggcgaggaggacggggcagagctagatctcaacatgactcggtcacattctgggggagagttagagtcactggctcgaggcagaagaagcctaggaagtctgactatagccgagccagctatgattgccgaatgtaaaacccgaacagaggtgttcgagatcagtagaaggctaatcgatcggacgaatgctaacttccttgtctggcctccctgcgtggaagttcagagatgtagcgggtgctgcaataataggaatgtacagtgccggcctacacaggtccagctgcgccctgtgcaggttcgaaagatagaaattgtgagaaagaaacccatcttcaaaaaggccactgtcactctggaggaccacctggcttgcaagtgcgagacggtggcagcagcccgtcctgtcacgcgcagccccggaggatctcaggagcaacgggctaagactccccagacacgcgtaacaattcgcacggtcagggtgaggcggcctcctaagggcaaacatcggaaatttaagcatacacacgataagaccgcgctcaaagagactttgggcgcttag

SEQ ID NO: 130166 - DNA, 726 bp, Artificial Sequence
  derived and/or modified sequence
atgaaccgctgctgggccctgttcctatccctctgctgctatctccggctcgtttctgcggagggggaccccattcctgaggaactgtacgaaatgcttagcgatcactccattcgatctttcgacgatctacaaaggttgctgcacggcgaccctggggaggaagatggtgccgagctggacttgaacatgactcgatctcacagcggcggtgagctcgaatcccttgctcgtggccgccggagcctgggttctctgacaattgccgagcccgccatgatagccgaatgcaagacccgaacagaggtttttgagatctctaggcgactgattgatcgtacaaacgccaacttcctcgtttggcccccctgcgttgaagtgcaacgctgctccggttgttgtaataatagaaatgtgcaatgtcgccctacccaagtacaattacgcccagttcaggttcggaagattgaaatagttcgaaaaaaaccaatctttaagaaagcgacagttaccctagaggatcacctggcgtgcaagtgcgaaacagtagctgcagctagaccagtgacacgttctcccggagggtctcaagaacagcgcgcaaaaacacctcagaccagagtgacaatccgaactgtgcgagttcgcaggcctccaaaggggaagcatcgtaagttcaagcatacgcacgataaaacggctctcaaagaaaccctgggagcatag

SEQ ID NO: 130167 - DNA, 726 bp, Artificial Sequence
  derived and/or modified sequence
atgaaccgatgctgggccttgtttctgtccctttgttgctacctccgactagtgtctgccgagggagaccctatcccagaggagttatatgaaatgttatcggaccattccattcgcagttttgacgatctacagcgcctgttgcatggcgaccccggggaggaagacggtgctgaattggatctaaatatgacacgtagtcacagtggcggcgaactcgagtcattggccaggggaagaaggagcctcggatctctgacaatagctgaaccagccatgatcgctgagtgtaagacaaggacagaggtttttgagatctctaggcgactgattgatcgtacaaacgccaacttcctcgtttggcccccctgcgttgaagtgcaacgctgctccggttgttgtaataatagaaatgtgcaatgtcgccctacccaagtacaattacgcccagttcaggttcggaagattgaaatagttcgaaaaaaaccaatctttaagaaagcgacagttaccctagaggatcacctggcgtgcaagtgcgaaacagtagctgcagctagaccagtgacacgttctcccggagggtctcaagaacagcgcgcaaagacccctcaaaccagagtaaccattcggaccgttcgagtacgacgacctccaaagggcaagcacaggaaattcaagcatacccatgataagaccgccctgaaagaaacacttggagcatag

SEQ ID NO: 130168 - DNA, 3497 bp, Artificial Sequence
  derived and/or modified sequence
gcagctcgcagctcgcagcccgcagcccgcagaggacgcccagagcggcgagcgggcgggcagacggaccgacggactcgcgccgcgtccacctgtcggccgggcccagccgagcgcgcagcgggcacgccgcgcgcgcggagcagccgtgcccgccgcccgggccccgcgccagggcgcacacgctcccgcccccctacccggcccgggcgggagtttgcacctctccctgcccgggtgctcgagctgccgttgcaaagccaactttggaaaaagttttttgggggagacttgggccttgaggtgcccagctccgcgctttccgattttgggggcctttccagaaaatgttgcaaaaaagctaagccggcgggcagaggaaaacgcctgtagccggcgagtgaagacgaaccatcgactgccgtgttccttttcctcttggaggttggagtcccctgggcgcccccacacggctagacgcctcggctggttcgcgacgcagccccccggccgtggatgctcactcgggctcgggatccgcccaggtagcggcctcggacccaggtcctgcgcccaggtcctcccctgccccccagcgacggagccggggccgggggcggcggcgcccgggggccatgcgggtgagccgcggctgcagaggcctgagcgcctgatcgccgcggacccgagccgagcccacccccctccccagccccccaccctggccgcgggggcggcgcgctcgatctacgcgtccggggccccgcggggccgggcccggagtcggcatgaatcgctgctgggcgctcttcctgtctctctgctgctacctgcgtctggtcagcgccgagggggaccccattcccgaggagctttatgagatgctgagtgaccactcgatccgctcctttgatgatctccaacgcctgctgcacggagaccccggagaggaagatggggccgagttggacctgaacatgacccgctcccactctggaggcgagctggagagcttggctcgtggaagaaggagcctgggttccctgaccattgctgagccggccatgatcgccgagtgcaagacgcgcaccgaggtgttcgagatctcccggcgcctcatagaccgcaccaacgccaacttcctggtgtggccgccctgtgtggaggtgcagcgctgctccggctgctgcaacaaccgcaacgtgcagtgccgccccacccaggtgcagctgcgacctgtccaggtgagaaagatcgagattgtgcggaagaagccaatctttaagaaggccacggtgacgctggaagaccacctggcatgcaagtgtgagacagtggcagctgcacggcctgtgacccgaagcccggggggttcccaggagcagcgagccaaaacgccccaaactcgggtgaccattcggacggtgcgagtccgccggccccccaagggcaagcaccggaaattcaagcacacgcatgacaagacggcactgaaggagacccttggagcctaggggcatcggcaggagagtgtgtgggcagggttatttaatatggtatttgctgtattgcccccatggggtccttggagtgataatattgtttccctcgtccgtctgtctcgatgcctgattcggacggccaatggtgcttcccccacccctccacgtgtccgtccacccttccatcagcgggtctcctcccagcggcctccggcgtcttgcccagcagctcaagaagaaaaagaaggactgaactccatcgccatcttcttcccttaactccaagaacttgggataagagtgtgagagagactgatggggtcgctctttgggggaaacgggctccttcccctgcacctggcctgggccacacctgagcgctgtggactgtcctgaggagccctgaggacctctcagcatagcctgcctgatccctgaacccctggccagctctgaggggaggcacctccaggcaggccaggctgcctcggactccatggctaagaccacagacgggcacacagactggagaaaacccctcccacggtgcccaaacaccagtcacctcgtctccctggtgcctctgtgcacagtggcttcttttcgttttcgttttgaagacgtggactcctcttggtgggtgtggccagcacaccaagtggctgggtgccctctcaggtgggttagagatggagtttgctgttgaggtggctgtagatggtgacctgggtatcccctgcctcctgccaccccttcctccccacactccactctgattcacctcttcctctggttcctttcatctctctacctccaccctgcattttcctcttgtcctggcccttcagtctgctccaccaaggggctcttgaaccccttattaaggccccagatgatcccagtcactcctctctagggcagaagactagaggccagggcagcaagggacctgctcatcatattccaacccagccacgactgccatgtaaggttgtgcagggtgtgtactgcacaaggacattgtatgcagggagcactgttcacatcatagataaagctgatttgtatatttattatgacaatttctggcagatgtaggtaaagaggaaaaggatccttttcctaattcacacaaagactccttgtggactggctgtgcccctgatgcagcctgtggcttggagtggccaaataggagggagactgtggtaggggcagggaggcaacactgctgtccacatgacctccatttcccaaagtcctctgctccagcaactgcccttccaggtgggtgtgggacacctgggagaaggtctccaagggagggtgcagccctcttgcccgcacccctccctgcttgcacacttccccatctttgatccttctgagctccacctctggtggctcctcctaggaaaccagctcgtgggctgggaatgggggagagaagggaaaagatccccaagaccccctggggtgggatctgagctcccacctcccttcccacctactgcactttcccccttcccgccttccaaaacctgcttccttcagtttgtaaagtcggtgattatatttttgggggctttccttttattttttaaatgtaaaatttatttatattccgtatttaaagttgtaaaaaaaaataaccacaaaacaaaaccaaatgaatccgccggaggtctgtctgttggcatcgtgcgtgacaattaacctttctgccttggcaggatgtgccgacagcttgcggcgtgttcctctcactctgggagcctcaggcgtgatctcacacactggcgtgcacatacacacacacacacatacatgctcacacatgcgtgcacatacacgcaggcctgcaacttgggggaggcctctgtctggcgggaagaagagacacacaggctactctgttggtcttggtcctggcacagctcctgacacgtggacttgtgcgtgtctctggcagtgacgagagatgggtttctgcag

SEQ ID NO: 130169 - DNA, 556 bp, Artificial Sequence
  derived and/or modified sequence
acacttcttccgggaaagagtgaagggccccactgccctttgccatccagcttcctctggctttgctaatggccctagggggcaggagaccaactgctggaatcccagagccctggagggggaccccattcccgaggagctttatgagatgctgagtgaccactcgatccgctcctttgatgatctccaacgcctgctgcacggagaccccggagaggaagatggggccgagttggacctgaacatgacccgctcccactctggaggcgagctggagagcttggctcgtggaagaaggagcctgggttccctgaccattgctgagccggccatgatcgccgagtgcaagacgcgcaccgaggtgttcgagatctcccggcgcctcatagaccgcaccaacgccaacttcctggtgtggccgccctgtgtggaggtgcagcgctgctccggctgctgcaacaaccgcaacgtgcagtgccgccccacccaggtgcagctgcgacctgtccaggtgagaaagatcgagattgtgcggaagaagccaatctttaagaag

SEQ ID NO: 130170 - DNA, 554 bp, Artificial Sequence
  derived and/or modified sequence
aaaaacatctgagggagcgctggggtcggagccgtccccacccctcccagcctcacgtagccgtgagttggcaagtctacccggaatccagggggaccccattcccgaggagctttatgagatgctgagtgaccactcgatccgctcctttgatgatctccaacgcctgctgcacggagaccccggagaggaagatggggccgagttggacctgaacatgacccgctcccactctggaggcgagctggagagcttggctcgtggaagaaggagcctgggttccctgaccattgctgagccggccatgatcgccgagtgcaagacgcgcaccgaggtgttcgagatctcccggcgcctcatagaccgcaccaacgccaacttcctggtgtggccgccctgtgtggaggtgcagcgctgctccggctgctgcaacaaccgcaacgtgcagtgccgccccacccaggtgcagctgcgacctgtccaggtgagaaagatcgagattgtgcggaagaagccaatctttaagaaggccacggtgacgctggaagaccacc

SEQ ID NO: 130171 - DNA, 3393 bp, Artificial Sequence
  derived and/or modified sequence
cctgcctgcctccctgcgcacccgcagcctcccccgctgcctccctagggctcccctccggccgccagcgcccatttttcattccctagatagagatactttgcgcgcacacacatacatacgcgcgcaaaaaggaaaaaaaaaaaaaaaagcccaccctccagcctcgctgcaaagagaaaaccggagcagccgcagctcgcagctcgcagctcgcagcccgcagcccgcagaggacgcccagagcggcgagcgggcgggcagacggaccgacggactcgcgccgcgtccacctgtcggccgggcccagccgagcgcgcagcgggcacgccgcgcgcgcggagcagccgtgcccgccgcccgggccccgcgccagggcgcacacgctcccgcccccctacccggcccgggcgggagtttgcacctctccctgcccgggtgctcgagctgccgttgcaaagccaactttggaaaaagttttttgggggagacttgggccttgaggtgcccagctccgcgctttccgattttgggggcctttccagaaaatgttgcaaaaaagctaagccggcgggcagaggaaaacgcctgtagccggcgagtgaagacgaaccatcgactgccgtgttccttttcctcttggaggttggagtcccctgggcgcccccacacggctagacgcctcggctggttcgcgacgcagccccccggccgtggatgctcactcgggctcgggatccgcccaggtagcggcctcggacccaggtcctgcgcccaggtcctcccctgccccccagcgacggagccggggccgggggcggcggcgcccgggggccatgcgggtgagccgcggctgcagaggcctgagcgcctgatcgccgcggacccgagccgagcccacccccctccccagccccccaccctggccgcgggggcggcgcgctcgatctacgcgtccggggccccgcggggccgggcccggagtcggcatgaatcgctgctgggcgctcttcctgtctctctgctgctacctgcgtctggtcagcgccgagggggaccccattcccgaggagctttatgagatgctgagtgaccactcgatccgctcctttgatgatctccaacgcctgctgcacggagaccccggagaggaagatggggccgagttggacctgaacatgacccgctcccactctggaggcgagctggagagcttggctcgtggaagaaggagcctgggttccctgaccattgctgagccggccatgatcgccgagtgcaagacgcgcaccgaggtgttcgagatctcccggcgcctcatagaccgcaccaacgccaacttcctggtgtggccgccctgtgtggaggtgcagcgctgctccggctgctgcaacaaccgcaacgtgcagtgccgccccacccaggtgcagctgcgacctgtccaggtgagaaagatcgagattgtgcggaagaagccaatctttaagaaggccacggtgacgctggaagaccacctggcatgcaagtgtgagacagtggcagctgcacggcctgtgacccgaagcccggggggttcccaggagcagcgagccaaaacgccccaaactcgggtgaccattcggacggtgcgagtccgccggccccccaagggcaagcaccggaaattcaagcacacgcatgacaagacggcactgaaggagacccttggagcctaggggcatcggcaggagagtgtgtgggcagggttatttaatatggtatttgctgtattgcccccatggggtccttggagtgataatattgtttccctcgtccgtctgtctcgatgcctgattcggacggccaatggtgcttcccccacccctccacgtgtccgtccacccttccatcagcgggtctcctcccagcggcctccggcgtcttgcccagcagctcaagaagaaaaagaaggactgaactccatcgccatcttcttcccttaactccaagaacttgggataagagtgtgagagagactgatggggtcgctctttgggggaaacgggctccttcccctgcacctggcctgggccacacctgagcgctgtggactgtcctgaggagccctgaggacctctcagcatagcctgcctgatccctgaacccctggccagctctgaggggaggcacctccaggcaggccaggctgcctcggactccatggctaagaccacagacgggcacacagactggagaaaacccctcccacggtgcccaaacaccagtcacctcgtctccctggtgcctctgtgcacagtggcttcttttcgttttcgttttgaagacgtggactcctcttggtgggtgtggccagcacaccaagtggctgggtgccctctcaggtgggttagagatggagtttgctgttgaggtggctgtagatggtgacctgggtatcccctgcctcctgccaccccttcctccccacactccactctgattcacctcttcctctggttcctttcatctctctacctccaccctgcattttcctcttgtcctggcccttcagtctgctccaccaaggggctcttgaaccccttattaaggccccagatgatcccagtcactcctctctagggcagaagactagaggccagggcagcaagggacctgctcatcatattccaacccagccacgactgccatgtaaggttgtgcagggtgtgtactgcacaaggacattgtatgcagggagcactgttcacatcatagataaagctgatttgtatatttattatgacaatttctggcagatgtaggtaaagaggaaaaggatccttttcctaattcacacaaagactccttgtggactggctgtgcccctgatgcagcctgtggcttggagtggccaaataggagggagactgtggtaggggcagggaggcaacactgctgtccacatgacctccatttcccaaagtcctctgctccagcaactgcccttccaggtgggtgtgggacacctgggagaaggtctccaagggagggtgcagccctcttgcccgcacccctccctgcttgcacacttccccatctttgatccttctgagctccacctctggtggctcctcctaggaaaccagctcgtgggctgggaatgggggagagaagggaaaagatccccaagaccccctggggtgggatctgagctcccacctcccttcccacctactgcactttcccccttcccgccttccaaaacctgcttccttcagtttgtaaagtcggtgattatatttttgggggctttccttttattttttaaatgtaaaatttatttatattccgtatttaaagttgtaaaaaaaaataaccacaaaacaaaaccaaatgaaaaaaaaaaaaaaaaaa

SEQ ID NO: 130172 - RNA, 726 nt, Artificial Sequence
  derived and/or modified sequence
augaaccgcugcugggcccuguuccuaucccucugcugcuaucuccggcucguuucugcggagggggaccccauuccugaggaacuguacgaaaugcuuagcgaucacuccauucgaucuuucgacgaucuacaaagguugcugcacggcgacccuggggaggaagauggugccgagcuggacuugaacaugacucgaucucacagcggcggugagcucgaaucccuugcucguggccgccggagccuggguucucugacaauugccgagcccgccaugauagccgaaugcaagacccgaacagagguuuuugagaucucuaggcgacugauugaucguacaaacgccaacuuccucguuuggccccccugcguugaagugcaacgcugcuccgguuguuguaauaauagaaaugugcaaugucgcccuacccaaguacaauuacgcccaguucagguucggaagauugaaauaguucgaaaaaaaccaaucuuuaagaaagcgacaguuacccuagaggaucaccuggcgugcaagugcgaaacaguagcugcagcuagaccagugacacguucucccggagggucucaagaacagcgcgcaaaaacaccucagaccagagugacaauccgaacugugcgaguucgcaggccuccaaaggggaagcaucguaaguucaagcauacgcacgauaaaacggcucucaaagaaacccugggagcauag

SEQ ID NO: 130173 - RNA, 726 nt, Artificial Sequence
  derived and/or modified sequence
augaaccgaugcugggccuuguuucugucccuuuguugcuaccuccgacuagugucugccgagggagacccuaucccagaggaguuauaugaaauguuaucggaccauuccauucgcaguuuugacgaucuacagcgccuguugcauggcgaccccggggaggaagacggugcugaauuggaucuaaauaugacacguagucacaguggcggcgaacucgagucauuggccaggggaagaaggagccucggaucucugacaauagcugaaccagccaugaucgcugaguguaagacaaggacagagguuuuugagaucucuaggcgacugauugaucguacaaacgccaacuuccucguuuggccccccugcguugaagugcaacgcugcuccgguuguuguaauaauagaaaugugcaaugucgcccuacccaaguacaauuacgcccaguucagguucggaagauugaaauaguucgaaaaaaaccaaucuuuaagaaagcgacaguuacccuagaggaucaccuggcgugcaagugcgaaacaguagcugcagcuagaccagugacacguucucccggagggucucaagaacagcgcgcaaagaccccucaaaccagaguaaccauucggaccguucgaguacgacgaccuccaaagggcaagcacaggaaauucaagcauacccaugauaagaccgcccugaaagaaacacuuggagcauag

SEQ ID NO: 130174 - protein, 1106 aa, Artificial Sequence
  derived and/or modified sequence
MRLPGAMPALALKGELLLLSLLLLLEPQISQGLVVTPPGPELVLNVSSTFVLTCSGSAPVVWERMSQEPPQEMAKAQDGTFSSVLTLTNLTGLDTGEYFCTHNDSRGLETDERKRLYIFVPDPTVGFLPNDAEELFIFLTEITEITIPCRVTDPQLVVTLHEKKGDVALPVPYDHQRGFSGIFEDRSYICKTTIGDREVDSDAYYVYRLQVSSINVSVNAVQTVVRQGENITLMCIVIGNEVVNFEWTYPRKESGRLVEPVTDFLLDMPYHIRSILHIPSAELEDSGTYTCNVTESVNDHQDEKAINITVVESGYVRLLGEVGTLQFAELHRSRTLQVVFEAYPPPTVLWFKDNRTLGDSSAGEIALSTRNVSETRYVSELTLVRVKVAEAGHYTMRAFHEDAEVQLSFQLQINVPVRVLELSESHPDSGEQTVRCRGRGMPQPNIIWSACRDLKRCPRELPPTLLGNSSEEESQLETNVTYWEEEQEFEVVSTLRLQHVDRPLSVRCTLRNAVGQDTQEVIVVPHSLPFKVVVISAILALVVLTIISLIILIMLWQKKPRYEIRWKVIESVSSDGHEYIYVDPMQLPYDSTWELPRDQLVLGRTLGSGAFGQVVEATAHGLSHSQATMKVAVKMLKSTARSSEKQALMSELKIMSHLGPHLNVVNLLGACTKGGPIYIITEYCRYGDLVDYLHRNKHTFLQHHSDKRRPPSAELYSNALPVGLPLPSHVSLTGESDGGYMDMSKDESVDYVPMLDMKGDVKYADIESSNYMAPYDNYVPSAPERTCRATLINESPVLSYMDLVGFSYQVANGMEFLASKNCVHRDLAARNVLICEGKLVKICDFGLARDIMRDSNYISKGSTFLPLKWMAPESIFNSLYTTLSDVWSFGILLWEIFTLGGTPYPELPMNEQFYNAIKRGYRMAQPAHASDEIYEIMQKCWEEKFEIRPPFSQLVLLLERLLGEGYKKKYQQVDEEFLRSDHPAILRSQARLPGFHGLRSPLDTSSVLYTAVQPNEGDNDYIIPLPDPKPEVADEGPLEGSPSLASSTLNEVNTSSTISCDSPLEPQDEPEPEPQLELQVEPEPELEQLPDSGCPAPRAEAEDSFL

SEQ ID NO: 130175 - protein, 776 aa, Artificial Sequence
  derived and/or modified sequence
AASEPDTAGSVRGLPTAHCPVVDNRTLGDSSAGEIALSTRNVSETRYVSELTLVRVKVAEAGHYTMRAFHEDAEVQLSFQLQINVPVRVLELSESHPDSGEQTVRCRGRGMPQPNIIWSACRDLKRCPRELPPTLLGNSSEEESQLETNVTYWEEEQEFEVVSTLRLQHVDRPLSVRCTLRNAVGQDTQEVIVVPHSLPFKVVVISAILALVVLTIISLIILIMLWQKKPRYEIRWKVIESVSSDGHEYIYVDPMQLPYDSTWELPRDQLVLGRTLGSGAFGQVVEATAHGLSHSQATMKVAVKMLKSTARSSEKQALMSELKIMSHLGPHLNVVNLLGACTKGGPIYIITEYCRYGDLVDYLHRNKHTFLQHHSDKRRPPSAELYSNALPVGLPLPSHVSLTGESDGGYMDMSKDESVDYVPMLDMKGDVKYADIESSNYMAPYDNYVPSAPERTCRATLINESPVLSYMDLVGFSYQVANGMEFLASKNCVHRDLAARNVLICEGKLVKICDFGLARDIMRDSNYISKGSTFLPLKWMAPESIFNSLYTTLSDVWSFGILLWEIFTLGGTPYPELPMNEQFYNAIKRGYRMAQPAHASDEIYEIMQKCWEEKFEIRPPFSQLVLLLERLLGEGYKKKYQQVDEEFLRSDHPAILRSQARLPGFHGLRSPLDTSSVLYTAVQPNEGDNDYIIPLPDPKPEVADEGPLEGSPSLASSTLNEVNTSSTISCDSPLEPQDEPEPEPQLELQVEPEPELEQLPDSGCPAPRAEAEDSFL

SEQ ID NO: 130176 - DNA, 3321 bp, Artificial Sequence
  derived and/or modified sequence
atgagactgcccggcgccatgcccgccctggccctgaagggcgagctgctgctgctgagcctgctgctgctgctggagccccagatcagccagggcctggtggtgaccccccccggccccgagctggtgctgaacgtgagcagcaccttcgtgctgacctgcagcggcagcgcccccgtggtgtgggagagaatgagccaggagcccccccaggagatggccaaggcccaggacggcaccttcagcagcgtgctgaccctgaccaacctgaccggcctggacaccggcgagtacttctgcacccacaacgacagcagaggcctggagaccgacgagagaaagagactgtacatcttcgtgcccgaccccaccgtgggcttcctgcccaacgacgccgaggagctgttcatcttcctgaccgagatcaccgagatcaccatcccctgcagagtgaccgacccccagctggtggtgaccctgcacgagaagaagggcgacgtggccctgcccgtgccctacgaccaccagagaggcttcagcggcatcttcgaggacagaagctacatctgcaagaccaccatcggcgacagagaggtggacagcgacgcctactacgtgtacagactgcaggtgagcagcatcaacgtgagcgtgaacgccgtgcagaccgtggtgagacagggcgagaacatcaccctgatgtgcatcgtgatcggcaacgaggtggtgaacttcgagtggacctaccccagaaaggagagcggcagactggtggagcccgtgaccgacttcctgctggacatgccctaccacatcagaagcatcctgcacatccccagcgccgagctggaggacagcggcacctacacctgcaacgtgaccgagagcgtgaacgaccaccaggacgagaaggccatcaacatcaccgtggtggagagcggctacgtgagactgctgggcgaggtgggcaccctgcagttcgccgagctgcacagaagcagaaccctgcaggtggtgttcgaggcctaccccccccccaccgtgctgtggttcaaggacaacagaaccctgggcgacagcagcgccggcgagatcgccctgagcaccagaaacgtgagcgagaccagatacgtgagcgagctgaccctggtgagagtgaaggtggccgaggccggccactacaccatgagagccttccacgaggacgccgaggtgcagctgagcttccagctgcagatcaacgtgcccgtgagagtgctggagctgagcgagagccaccccgacagcggcgagcagaccgtgagatgcagaggcagaggcatgccccagcccaacatcatctggagcgcctgcagagacctgaagagatgccccagagagctgccccccaccctgctgggcaacagcagcgaggaggagagccagctggagaccaacgtgacctactgggaggaggagcaggagttcgaggtggtgagcaccctgagactgcagcacgtggacagacccctgagcgtgagatgcaccctgagaaacgccgtgggccaggacacccaggaggtgatcgtggtgccccacagcctgcccttcaaggtggtggtgatcagcgccatcctggccctggtggtgctgaccatcatcagcctgatcatcctgatcatgctgtggcagaagaagcccagatacgagatcagatggaaggtgatcgagagcgtgagcagcgacggccacgagtacatctacgtggaccccatgcagctgccctacgacagcacctgggagctgcccagagaccagctggtgctgggcagaaccctgggcagcggcgccttcggccaggtggtggaggccaccgcccacggcctgagccacagccaggccaccatgaaggtggccgtgaagatgctgaagagcaccgccagaagcagcgagaagcaggccctgatgagcgagctgaagatcatgagccacctgggcccccacctgaacgtggtgaacctgctgggcgcctgcaccaagggcggccccatctacatcatcaccgagtactgcagatacggcgacctggtggactacctgcacagaaacaagcacaccttcctgcagcaccacagcgacaagagaagaccccccagcgccgagctgtacagcaacgccctgcccgtgggcctgcccctgcccagccacgtgagcctgaccggcgagagcgacggcggctacatggacatgagcaaggacgagagcgtggactacgtgcccatgctggacatgaagggcgacgtgaagtacgccgacatcgagagcagcaactacatggccccctacgacaactacgtgcccagcgcccccgagagaacctgcagagccaccctgatcaacgagagccccgtgctgagctacatggacctggtgggcttcagctaccaggtggccaacggcatggagttcctggccagcaagaactgcgtgcacagagacctggccgccagaaacgtgctgatctgcgagggcaagctggtgaagatctgcgacttcggcctggccagagacatcatgagagacagcaactacatcagcaagggcagcaccttcctgcccctgaagtggatggcccccgagagcatcttcaacagcctgtacaccaccctgagcgacgtgtggagcttcggcatcctgctgtgggagatcttcaccctgggcggcaccccctaccccgagctgcccatgaacgagcagttctacaacgccatcaagagaggctacagaatggcccagcccgcccacgccagcgacgagatctacgagatcatgcagaagtgctgggaggagaagttcgagatcagaccccccttcagccagctggtgctgctgctggagagactgctgggcgagggctacaagaagaagtaccagcaggtggacgaggagttcctgagaagcgaccaccccgccatcctgagaagccaggccagactgcccggcttccacggcctgagaagccccctggacaccagcagcgtgctgtacaccgccgtgcagcccaacgagggcgacaacgactacatcatccccctgcccgaccccaagcccgaggtggccgacgagggccccctggagggcagccccagcctggccagcagcaccctgaacgaggtgaacaccagcagcaccatcagctgcgacagccccctggagccccaggacgagcccgagcccgagccccagctggagctgcaggtggagcccgagcccgagctggagcagctgcccgacagcggctgccccgcccccagagccgaggccgaggacagcttcctgtag

SEQ ID NO: 130177 - DNA, 2331 bp, Artificial Sequence
  derived and/or modified sequence
gccgccagcgagcccgacaccgccggcagcgtgagaggcctgcccaccgcccactgccccgtggtggacaacagaaccctgggcgacagcagcgccggcgagatcgccctgagcaccagaaacgtgagcgagaccagatacgtgagcgagctgaccctggtgagagtgaaggtggccgaggccggccactacaccatgagagccttccacgaggacgccgaggtgcagctgagcttccagctgcagatcaacgtgcccgtgagagtgctggagctgagcgagagccaccccgacagcggcgagcagaccgtgagatgcagaggcagaggcatgccccagcccaacatcatctggagcgcctgcagagacctgaagagatgccccagagagctgccccccaccctgctgggcaacagcagcgaggaggagagccagctggagaccaacgtgacctactgggaggaggagcaggagttcgaggtggtgagcaccctgagactgcagcacgtggacagacccctgagcgtgagatgcaccctgagaaacgccgtgggccaggacacccaggaggtgatcgtggtgccccacagcctgcccttcaaggtggtggtgatcagcgccatcctggccctggtggtgctgaccatcatcagcctgatcatcctgatcatgctgtggcagaagaagcccagatacgagatcagatggaaggtgatcgagagcgtgagcagcgacggccacgagtacatctacgtggaccccatgcagctgccctacgacagcacctgggagctgcccagagaccagctggtgctgggcagaaccctgggcagcggcgccttcggccaggtggtggaggccaccgcccacggcctgagccacagccaggccaccatgaaggtggccgtgaagatgctgaagagcaccgccagaagcagcgagaagcaggccctgatgagcgagctgaagatcatgagccacctgggcccccacctgaacgtggtgaacctgctgggcgcctgcaccaagggcggccccatctacatcatcaccgagtactgcagatacggcgacctggtggactacctgcacagaaacaagcacaccttcctgcagcaccacagcgacaagagaagaccccccagcgccgagctgtacagcaacgccctgcccgtgggcctgcccctgcccagccacgtgagcctgaccggcgagagcgacggcggctacatggacatgagcaaggacgagagcgtggactacgtgcccatgctggacatgaagggcgacgtgaagtacgccgacatcgagagcagcaactacatggccccctacgacaactacgtgcccagcgcccccgagagaacctgcagagccaccctgatcaacgagagccccgtgctgagctacatggacctggtgggcttcagctaccaggtggccaacggcatggagttcctggccagcaagaactgcgtgcacagagacctggccgccagaaacgtgctgatctgcgagggcaagctggtgaagatctgcgacttcggcctggccagagacatcatgagagacagcaactacatcagcaagggcagcaccttcctgcccctgaagtggatggcccccgagagcatcttcaacagcctgtacaccaccctgagcgacgtgtggagcttcggcatcctgctgtgggagatcttcaccctgggcggcaccccctaccccgagctgcccatgaacgagcagttctacaacgccatcaagagaggctacagaatggcccagcccgcccacgccagcgacgagatctacgagatcatgcagaagtgctgggaggagaagttcgagatcagaccccccttcagccagctggtgctgctgctggagagactgctgggcgagggctacaagaagaagtaccagcaggtggacgaggagttcctgagaagcgaccaccccgccatcctgagaagccaggccagactgcccggcttccacggcctgagaagccccctggacaccagcagcgtgctgtacaccgccgtgcagcccaacgagggcgacaacgactacatcatccccctgcccgaccccaagcccgaggtggccgacgagggccccctggagggcagccccagcctggccagcagcaccctgaacgaggtgaacaccagcagcaccatcagctgcgacagccccctggagccccaggacgagcccgagcccgagccccagctggagctgcaggtggagcccgagcccgagctggagcagctgcccgacagcggctgccccgcccccagagccgaggccgaggacagcttcctgtag

SEQ ID NO: 130178 - DNA, 3321 bp, Artificial Sequence
  derived and/or modified sequence
atgagactccccggagctatgcctgccttggcattgaagggggagctgctgttgctgtcattgctcctgttgctcgagcctcaaattagccagggccttgtggttaccccccccggacccgagttggtgttgaatgtctcttctacgtttgtcttgacatgttccgggtccgctcccgtggtttgggaacggatgagccaggaaccaccccaagagatggcaaaagctcaggacggaacattttcaagcgtgctgacactgaccaaccttaccggcttagatactggcgaatatttctgtacgcacaatgattcacgcggccttgagacggatgagcgcaagcgactgtacatcttcgtgcctgaccccactgtgggcttccttcccaacgacgctgaagagcttttcatcttcctgactgagatcaccgagattacaattccatgcagggttacagatcctcaattggtagtgacgttacatgaaaagaagggtgacgtcgctctcccggtgccgtatgaccaccagagaggattcagtggcatattcgaggaccgtagctatatatgcaaaacaacaatcggcgatcgggaggttgattctgacgcttactacgtttatagactgcaggtgtcaagtatcaatgtgagtgtgaacgccgtgcagacagtggtgcggcaaggagagaatatcacactgatgtgtatcgttatcgggaacgaagtggtgaattttgagtggacctacccgcgtaaggagtccggtagactcgtcgagccagtcacagacttcctcttggacatgccttaccatatacgcagcatactacatataccaagcgctgagctggaagattcaggcacctatacttgtaacgtgactgagagcgtgaatgaccatcaggatgaaaaggcaataaacatcacagtagttgagagtggctacgtaagactgttgggagaggtaggtactctgcagtttgccgagctgcatagaagccggacactgcaggttgtgttcgaggcatatcccccgcccaccgttctgtggttcaaggataaccgcactttgggagacagtagtgccggggagatagcccttagcactcgcaacgtttcagagactagatacgtctctgagctgacattggtccgcgttaaggtagcggaggctgggcactacacaatgcgtgcattccatgaagacgctgaagtccagttgagcttccagctgcaaataaacgtccctgtgcgtgtacttgagttatccgagagtcacccggactcgggagagcaaacagtgcggtgcagaggtcgcgggatgccgcagccaaacataatctggagcgcttgcagggatctcaagaggtgtcctagagagctccctccaacactccttgggaacagctctgaagaggaatcgcagttggagaccaatgtcacttactgggaggaagagcaggaatttgaggtcgttagtaccctgcgactccagcatgttgacaggcccttgtcagttaggtgcactctccggaatgcagtgggacaggacacacaagaggtcattgttgtcccccatagtctcccattcaaagtcgtggtgattagcgctattctcgcgcttgtggtcttgactattatttcccttatcatcttgatcatgctgtggcagaaaaagccgaggtacgagatccgatggaaagttattgagagcgtgagctccgacggccacgaatacatttacgtcgatcctatgcagctcccgtatgatagcacatgggagctgcccagggaccagctagtgctgggtaggactctggggtcaggcgctttcgggcaggttgtcgaggcgaccgcccatggcctatcccactcccaagcaaccatgaaagtcgccgtaaagatgttgaagagcactgccagatctagcgagaagcaggcccttatgtccgaactgaagatcatgtctcacctgggaccgcacctgaacgtcgtcaatttgcttggcgcatgcactaagggcggtcctatatatataatcacggaatattgtcgctacggcgacctggtcgactaccttcacagaaataagcatacctttttgcaacaccactcagataaacgccgtcccccatccgccgagctgtattccaacgcactccctgtcggcctgcccctgccttcgcatgttagcctaactggggagtctgatggcgggtatatggacatgtccaaggacgaaagcgttgattatgtgcctatgttggacatgaaaggggatgttaaatatgccgatatcgaatcaagcaattatatggctccttatgataactatgttccctcggccccagaaaggacatgtagggccaccttgatcaacgaaagcccagtgctctcatacatggatttagtgggattcagctatcaggttgctaacggtatggaatttttggcatcaaaaaactgcgtgcacagggatctggctgcccgcaacgtcctcatttgtgaaggcaagctcgttaaaatttgcgatttcgggttagcacgggatattatgagggattcaaactatatatcgaagggctccacatttctgccactgaagtggatggctcccgagtccatcttcaacagcctttacacaactctgagcgacgtatggagctttggaatcctgctgtgggagattttcaccctgggtggcacaccgtatcctgaactgccaatgaatgaacaattctataacgccattaagcgcggttataggatggcccagcccgcccatgcaagcgatgagatctacgagatcatgcagaaatgctgggaagaaaagtttgagattagaccaccgttctcccagctcgtgctgctattggaacggctactgggggagggatacaagaagaaatatcagcaggtagacgaagaattcttgaggagcgaccatcccgccattttgcgctcccaggctcgtttgccgggattccacggattaagaagccctctcgatacctcctccgtgctgtacaccgccgtccaaccaaatgaaggcgataacgactacattatccctttacccgatcccaaaccagaggtggccgatgaggggccacttgagggcagcccctccctagctagcagcactctgaatgaggtgaacacgagtagtaccatctcttgtgattccccacttgaaccacaggatgagccagaacccgaacctcagctcgaactacaggtggaacccgagcccgagctagagcagcttcccgacagtggctgccccgcgccgcgggccgaggcagaggactcattcttgtag

SEQ ID NO: 130179 - DNA, 2331 bp, Artificial Sequence
  derived and/or modified sequence
gctgccagcgaacccgacaccgccggaagcgttcgaggtctgccaactgctcactgtcccgttgtggacaaccgaaccctcggcgacagctcggcgggcgagatcgctctttcaactcgcaacgtgagtgaaacgcgttatgtctcagagctcactctggtaagggtcaaagttgcggaggcaggccactacacgatgcgcgcctttcatgaagacgcggaagtgcaactgtcattccagctccaaatcaatgtgcctgtccgcgtcctggaattgagcgaatcacatccagactccggcgaacagacagtccgatgtcgcgggaggggcatgcctcaaccgaacattatctggtcagcctgtagagatctgaagcggtgtccacgagaactaccacccactctactggggaattcgtcagaggaagaaagccagctagaaaccaatgtgacttattgggaggaagaacaggaatttgaggtcgtgtccactctcagactccaacacgtggaccggccattgagcgtgcggtgcaccctgcgcaatgcggtgggacaggacacacaggaggtgattgtggtcccccactcactgccattcaaggttgtggttatctctgccattctggccttggtggtcctcaccatcataagtttaattattctgataatgctctggcaaaaaaagccacgttatgagataagatggaaagtgattgagagtgtaagttcagacggccatgagtatatttatgttgatcccatgcaattgccgtatgattccacgtgggagctaccacgcgaccaactcgtgctcggtaggacccttggctcaggcgccttcggacaagtggtggaggctaccgcgcacggtctgagtcacagccaagcgaccatgaaggtcgccgttaagatgctgaagagcacagcccgttcctcagaaaagcaggcactcatgtccgaactgaaaatcatgagtcatttgggcccgcacctgaatgtcgtcaatctgttgggcgcgtgcactaaaggggggcccatatacataattactgaatactgccgctacggcgatctcgtagactatctgcaccggaataagcatacctttttgcagcaccattcggacaagcgacggccaccctcagctgagctgtactccaatgcactccccgtgggattaccacttccaagccatgtgagccttactggcgaatcagacggggggtatatggacatgtccaaggacgaatctgttgattatgttcccatgctggacatgaaaggcgacgtgaagtatgcagatatcgagtcttcgaattacatggctccttatgacaattacgtaccttcggcacccgagcgaacctgccgcgcaaccctcattaatgagtctccggtcttaagttacatggacctggtaggtttcagttaccaggtcgctaatggcatggaatttctggcaagcaagaattgcgtccaccgggacttagcagctagaaatgtgctaatctgcgaaggcaagttagtgaagatatgcgatttcggcctggcgagggatatcatgcgggacagcaactatatcagcaagggctccactttcctgcctctgaaatggatggcccccgaatccatcttcaacagtctctatactactctcagcgatgtatggagcttcggcatacttctgtgggagattttcaccttgggcggcactccatacccggaactaccaatgaatgagcagttttacaacgcaataaaacgggggtacaggatggcccagcccgcccacgctagcgacgaaatctacgaaattatgcagaagtgttgggaggagaaattcgaaatacggcctcccttctcacaactcgtgctgctgctggaaaggctcttaggagaaggatacaaaaaaaagtatcagcaggtggatgaggagtttctgcggtccgatcatccagctatactgagaagccaggcccgcttgccaggttttcacggtctgagatctccccttgacacaagctccgtcctgtacacagccgtgcagccaaacgaaggtgataatgattacatcatccctctcccagatcctaagccagaggttgctgacgagggccctcttgagggttcaccaagtttagcatcatcaaccctcaatgaagtgaacacttcttcaacaatttcttgtgatagtcccttggagcctcaggatgaacccgagcccgagcctcagctggaacttcaggtcgaacctgagcccgagttggaacaactgccggattctggatgtcccgctcctagggcagaagctgaggattctttcctctag

SEQ ID NO: 130180 - DNA, 3321 bp, Artificial Sequence
  derived and/or modified sequence
atgaggctgcccggggccatgcctgccctggccctgaagggggagctgctgctgctgagcctgctgctgctgctggagccccagatcagccagggcctggtggtgaccccacctggccctgagctggtgctgaatgtgagcagcacctttgtgctgacctgcagcggcagcgcccctgtggtgtgggagaggatgagccaggagcccccccaggagatggccaaggcccaggacggcaccttcagctctgtgctgaccctgaccaacctgaccggcctggacacaggagagtacttctgcacccacaatgacagccggggcctggagacagatgagaggaagaggctgtacatctttgtgcctgaccccaccgtgggcttcctgcccaatgatgctgaggagctgttcatcttcctgacagagatcacagagatcaccatcccctgccgggtgacagacccccagctggtggtgaccctgcacgagaagaagggagatgtggccctgcctgtgccctatgaccaccagaggggcttcagcggcatctttgaggacaggagctacatctgcaagaccaccatcggggaccgggaggtggacagtgatgcctactacgtgtaccgcctgcaggtgagcagcatcaacgtgtctgtgaatgctgtgcagacagtggtgcggcagggcgagaacatcaccctgatgtgcatcgtgattggaaatgaggtggtgaactttgagtggacctaccccaggaaggagagcggccgcctggtggagcctgtgacagacttcctgctggacatgccctaccacatccgcagcatcctgcacatccccagcgctgagctggaggacagcggcacctacacctgcaatgtgacagagagcgtgaatgaccaccaggatgagaaggccatcaacatcaccgtggtggagagcggctacgtgcggctgctgggggaggtgggcaccctgcagtttgctgagctgcacaggagcaggaccctgcaggtggtgtttgaggcctaccccccacccaccgtgctgtggttcaaggacaacagaaccctgggggacagcagcgctggggagatcgccctgagcaccagaaatgtgtctgagaccaggtatgtgtctgagctgaccctggtgcgggtgaaggtggccgaggccggccactacaccatgagggccttccatgaagatgctgaggtgcagctgtccttccagctgcagatcaacgtgcctgtgcgggtgctggagctgtctgagagccacccagattctggagagcagacagtgcgctgccggggccggggcatgccccagcccaacatcatctggagcgcctgccgggacctgaagcgctgcccccgggagctgccccccaccctgctgggcaacagcagcgaggaggagagccagctggagaccaacgtgacctactgggaggaggagcaggagtttgaggtggtgtccaccctgcggctgcagcacgtggaccggcccctgtctgtgcgctgcaccctgagaaatgctgtgggccaggacacccaggaggtgattgtggtgccccacagcctgcccttcaaggtggtggtgatcagcgccatcctggccctggtggtgctgaccatcatcagcctcatcatcctgatcatgctgtggcagaagaagcccaggtatgagatccgctggaaggtgattgaatctgtgtccagtgatggccacgagtacatctacgtggaccccatgcagctgccctatgacagcacctgggagctgccccgggaccagctggtgctgggccgcaccctgggcagcggggccttcggccaggtggtggaggccacagcccacggcctgagccacagccaggccaccatgaaggtggccgtgaagatgctgaagagcacagcccggagcagcgagaagcaggccctgatgtctgagctgaagatcatgagccacctgggcccccacctgaatgtggtgaacctgctgggcgcctgcaccaagggcggccccatctacatcatcacagagtactgccgctacggggacctggtggactacctgcacaggaacaagcacaccttcctgcagcaccacagcgacaagaggcggccccccagcgctgagctgtacagcaatgccctgcctgtgggcctgcccctgcccagccacgtgtccctgactggagagagtgatggcggctacatggacatgagcaaggatgagagcgtggactatgtgcccatgctggacatgaagggagatgtgaagtatgctgacatcgagagcagcaactacatggccccctatgacaactacgtgcccagcgcccctgagaggacctgccgggccaccctcatcaatgaaagccctgtgctgagctacatggacctggtgggcttctcctaccaggtggccaacggcatggagttcctggccagcaagaactgtgtgcaccgggacctggccgccagaaatgtgctgatctgtgagggcaagctggtgaagatctgtgactttggcctggcccgggacatcatgagggacagcaactacatcagcaagggcagcaccttcctgcccctgaagtggatggcccctgagagcatcttcaacagcctgtacaccaccctgagtgatgtgtggagctttggcatcctgctgtgggagatcttcaccctgggcggcaccccctacccagagctgcccatgaatgagcagttctacaatgccatcaagaggggctacaggatggcccagcctgcccacgccagtgatgagatctatgagatcatgcagaagtgctgggaggagaagtttgagatccggccccccttcagccagctggtgctgctgctggagcggctgctgggggagggctacaagaagaagtaccagcaggtggatgaggagttcctgcggagtgaccacccagccatcctgcggagccaggcccggctgcccggcttccacggcctgcggagccccctggacaccagctctgtgctgtacacagctgtgcagcccaatgaaggagacaatgactacatcatccccctgcctgaccccaagccagaggtggctgatgagggccccctggagggcagccccagcctggccagcagcaccctgaatgaggtgaacaccagcagcaccatcagctgtgacagccccctggagccccaggatgagcctgagcctgagccccagctggagctgcaggtggagcctgagcctgagctggagcagctgcctgacagcggctgcccagcccccagggctgaggccgaggacagcttcctgtag

SEQ ID NO: 130181 - DNA, 2331 bp, Artificial Sequence
  derived and/or modified sequence
gctgccagcgagccagacacagctggctctgtgcggggcctgcccacagcccactgccctgtggtggacaacagaaccctgggggacagcagcgctggggagatcgccctgagcaccagaaatgtgtctgagaccaggtatgtgtctgagctgaccctggtgcgggtgaaggtggccgaggccggccactacaccatgagggccttccatgaagatgctgaggtgcagctgtccttccagctgcagatcaacgtgcctgtgcgggtgctggagctgtctgagagccacccagattctggagagcagacagtgcgctgccggggccggggcatgccccagcccaacatcatctggagcgcctgccgggacctgaagcgctgcccccgggagctgccccccaccctgctgggcaacagcagcgaggaggagagccagctggagaccaacgtgacctactgggaggaggagcaggagtttgaggtggtgtccaccctgcggctgcagcacgtggaccggcccctgtctgtgcgctgcaccctgagaaatgctgtgggccaggacacccaggaggtgattgtggtgccccacagcctgcccttcaaggtggtggtgatcagcgccatcctggccctggtggtgctgaccatcatcagcctcatcatcctgatcatgctgtggcagaagaagcccaggtatgagatccgctggaaggtgattgaatctgtgtccagtgatggccacgagtacatctacgtggaccccatgcagctgccctatgacagcacctgggagctgccccgggaccagctggtgctgggccgcaccctgggcagcggggccttcggccaggtggtggaggccacagcccacggcctgagccacagccaggccaccatgaaggtggccgtgaagatgctgaagagcacagcccggagcagcgagaagcaggccctgatgtctgagctgaagatcatgagccacctgggcccccacctgaatgtggtgaacctgctgggcgcctgcaccaagggcggccccatctacatcatcacagagtactgccgctacggggacctggtggactacctgcacaggaacaagcacaccttcctgcagcaccacagcgacaagaggcggccccccagcgctgagctgtacagcaatgccctgcctgtgggcctgcccctgcccagccacgtgtccctgactggagagagtgatggcggctacatggacatgagcaaggatgagagcgtggactatgtgcccatgctggacatgaagggagatgtgaagtatgctgacatcgagagcagcaactacatggccccctatgacaactacgtgcccagcgcccctgagaggacctgccgggccaccctcatcaatgaaagccctgtgctgagctacatggacctggtgggcttctcctaccaggtggccaacggcatggagttcctggccagcaagaactgtgtgcaccgggacctggccgccagaaatgtgctgatctgtgagggcaagctggtgaagatctgtgactttggcctggcccgggacatcatgagggacagcaactacatcagcaagggcagcaccttcctgcccctgaagtggatggcccctgagagcatcttcaacagcctgtacaccaccctgagtgatgtgtggagctttggcatcctgctgtgggagatcttcaccctgggcggcaccccctacccagagctgcccatgaatgagcagttctacaatgccatcaagaggggctacaggatggcccagcctgcccacgccagtgatgagatctatgagatcatgcagaagtgctgggaggagaagtttgagatccggccccccttcagccagctggtgctgctgctggagcggctgctgggggagggctacaagaagaagtaccagcaggtggatgaggagttcctgcggagtgaccacccagccatcctgcggagccaggcccggctgcccggcttccacggcctgcggagccccctggacaccagctctgtgctgtacacagctgtgcagcccaatgaaggagacaatgactacatcatccccctgcctgaccccaagccagaggtggctgatgagggccccctggagggcagccccagcctggccagcagcaccctgaatgaggtgaacaccagcagcaccatcagctgtgacagccccctggagccccaggatgagcctgagcctgagccccagctggagctgcaggtggagcctgagcctgagctggagcagctgcctgacagcggctgcccagcccccagggctgaggccgaggacagcttcctgtag

SEQ ID NO: 130182 - DNA, 3321 bp, Artificial Sequence
  derived and/or modified sequence
atgcggctgcccggcgccatgcccgccctggccctgaagggcgagctgctcctgctttcactcttacttcttctcgagcctcagatcagccagggactggttgttactccacccggaccagaactggttctgaatgtgtcttcaacatttgtcctgacctgtagtggctcagcacccgttgtgtgggagcggatgtcccaggagcccccccaggagatggccaaggcacaggatggcacattcagtagcgtactgacactaacaaacttaactgggttggacaccggagaatatttctgtactcacaacgattcaagagggctagaaactgacgaacggaagcgcctgtatatcttcgtcccggatcccacggttggatttttaccaaacgacgctgaagagctgttcatctttttgactgagattaccgaaatcactattccttgcagggttaccgatccacaactggttgtgaccctgcacgaaaagaagggcgacgtggccttgccagttccatacgaccatcagcggggatttagcggtatctttgaagataggagttacatttgtaagacaacaattggcgatagagaagtggactccgacgcatattacgtgtatcgcctgcaggtatcctcaattaacgtgtccgtcaacgcagttcagacggtggtccgccagggcgaaaacataaccctcatgtgtatcgtcattggaaacgaggtggtgaacttcgaatggacatacccaagaaaggaatctgggcggctggtggagccagtgactgactttctgctggacatgccttaccacatcaggagcatcctccacatccccagcgcagagctggaggacagcggaacttatacctgcaatgtaaccgaaagcgtgaatgatcatcaggatgagaaggctattaacattactgtcgtcgaatcggggtatgttagattactcggcgaggtcggcacgctccaatttgcagagctacatcgaagcagaactttgcaggtcgtgttcgaagcatacccacctcctaccgtgctgtggtttaaggacaaccggactctaggcgactcaagtgccggagagattgccctatccactcggaacgtgtctgagacacggtatgtgtcagagcttaccctcgtcagagtcaaagttgcggaggctggccattatacaatgcgggccttccacgaggacgcggaggtacagctctcctttcagctgcagataaacgtgcctgtacgggtcttggagctgtctgaatctcacccagacagtggtgaacagaccgttagatgtcgtggccggggtatgccccaacccaatatcatctggagtgcctgtagagacctgaagcgctgtccaagggagctcccacctaccctcctgggcaactcttcggaagaagagtctcaactcgaaacgaacgtgacctattgggaggaggaacaggagtttgaagtcgtaagcactttgcggctccagcacgtggatcgaccgttgtccgtccggtgcactcttcggaacgcggttggccaagatacccaagaggtgatcgttgtcccacattccctcccgtttaaggtggtagtcatctcagccattttggcgttggttgtcctgactattatctctctgatcatcctgataatgctgtggcagaagaagccccgatatgagattagatggaaggtgattgagagtgtaagttctgacggacacgagtacatctatgtggaccccatgcagttgccatacgatagcacctgggagctgcccagagatcaactggtgcttggaaggactctcggtagtggggctttcgggcaggtggtggaagctactgcgcacggtctgagccattcccaggcgaccatgaaggttgccgtaaaaatgctgaaaagcaccgcgcgcagcagcgaaaagcaggctctcatgagcgagttaaaaattatgtcccatctcggtcctcatcttaacgtcgtgaacttgctgggagcttgcaccaagggaggtcccatttacatcataacagaatactgccgatacggtgatctcgtggactatctccatcgcaacaagcacacatttctacagcaccattctgataagcgaagacccccatccgccgaactctacagtaatgctctccccgtgggtctgccactgccttcacacgtaagcctcaccggcgagagcgatggtggttacatggacatgtctaaagatgagtccgtggattacgttcccatgctggacatgaagggcgacgtaaaatatgccgatatcgagagtagcaactacatggcaccatacgataattatgtcccctcggcgccagaaaggacatgcagggctactcttatcaatgaatctcccgtgctgtcatatatggatctggttggcttctcctaccaggtagccaacggcatggagtttcttgccagcaaaaactgcgtccacagagacctagccgcaagaaacgtactgatttgtgaggggaagctcgttaagatttgtgattttggcctggcacgtgacattatgcgcgactctaactatatctccaaaggctccacattcctaccacttaaatggatggcaccggagtctatcttcaacagcctgtacaccacactttccgatgtgtggagctttggaattctgctttgggaaatcttcaccttggggggcaccccatatcccgaattgcccatgaatgaacagttttacaacgccatcaagcgtggatacaggatggctcaaccggctcatgcttcggatgaaatctacgagatcatgcaaaaatgttgggaagaaaaatttgaaatccgcccaccattctctcagctcgtcctgcttctggagcgactgttgggggaaggctacaagaagaagtaccagcaggtcgatgaagaattcctgcggtccgatcatcctgccatcctcaggtcacaagctcggttgcctggctttcacggacttcgctcacctctggacaccagctctgtgctttataccgctgtgcaaccaaatgagggagacaacgattacatcatcccacttccagatcccaagcccgaagtcgccgatgagggtccactggaggggtctcctagcctagcctcttccacccttaacgaggtgaatacaagtagtactatttcatgcgattcccccctggagccccaagatgaacccgaacccgaaccgcagctcgagctgcaggtggagcctgagccggagctggaacaactccctgactctggctgtcccgctcctagggcagaagccgaagactccttcctttag

SEQ ID NO: 130183 - DNA, 2331 bp, Artificial Sequence
  derived and/or modified sequence
gccgccagcgagcccgacaccgccggcagcgtgcggggcctgcccaccgcacactgccctgtggtggacaaccgcactttgggagacagctcagctggcgagatagccctcagcacccggaacgtgtcagagactcgctatgtgtccgagctcaccttggttcgtgtcaaggttgccgaggctggacattatacaatgcgggcgttccacgaagatgctgaggttcaactttccttccagctgcagatcaatgttccggttcgcgttttggagctgtctgaatctcatcccgattctggtgagcagacagtccgatgccgcgggcgcggtatgccacagccgaacataatatggagcgcctgccgtgatcttaagcggtgcccccgtgaactcccccctactcttctgggcaattcctcagaagaagagtctcagctggaaaccaatgttacgtattgggaagaggagcaggaattcgaggtggtgagcacccttagattgcagcatgtcgaccgcccgctatctgttcgttgcacccttcgaaacgccgttggccaggacacacaggaggtgatcgtggtgcctcactctcttccattcaaggttgtagtgatctccgctattctggccctggtcgtgctcacaatcatttccctgattattctgatcatgttgtggcagaaaaaaccccgctacgaaataaggtggaaggtaatcgagtcagtgagcagtgacggacacgaatatatctacgttgaccctatgcagctgccttacgattcaacctgggagttgccacgcgatcaactagttctagggaggacgctgggcagcggagcatttggccaggtggtggaagctacagcacatggcctgagtcatagccaggctaccatgaaggtggcagtcaaaatgctcaagtctactgctaggtcttccgagaagcaggcactcatgtctgaactcaagattatgtctcacttgggtccccatttgaatgttgtcaacctgttgggggcatgcacgaaaggtgggccaatctacattattactgagtactgccgatatggtgacttagtggattatcttcaccgaaataagcatacattcctgcagcatcactctgacaaacggcggccgccttcagccgagctatattccaacgccttacccgtggggctgccccttccctcccacgtgtcactgacgggggagagtgatggtggatacatggatatgtcaaaggacgagagtgtcgactacgtacccatgctggacatgaaaggggacgtgaagtacgcagacattgagtcaagtaactatatggccccctatgataattatgtcccttctgcacccgaacgcacttgccgcgccacactgatcaatgaatctcccgtgctctcatacatggatctcgtgggcttctcataccaagtcgccaatggcatggaattccttgcttcaaagaactgtgtccatcgggatctcgccgcccggaatgttctcatctgcgaaggcaagttagtcaagatctgtgactttggactggctcgcgatatcatgagagatagcaactacatctcaaaaggtagtacattcctcccgctgaagtggatggcccccgaatccatcttcaattccctgtatacgaccctgtcagacgtttggagctttggcatattgctgtgggagattttcaccttaggaggaactccttaccctgagctccctatgaacgagcagttttacaatgctataaaacgaggctaccgcatggcacagccggcccatgctagcgatgaaatctacgaaatcatgcagaagtgctgggaggaaaagtttgagatccgtccgcccttcagtcagctggtgctcctactcgagcgcttgttgggtgaagggtataagaagaagtaccagcaggtggacgaggagttccttaggtctgaccatccggccatcctgcggagccaggctagattgcctggttttcatggcctccgtagtccccttgatacttcatcagttctgtacactgcggtacagccgaatgagggcgataacgattatatcatccctctgccagacccaaagcctgaagtcgcagacgaaggcccgttggagggatctccatccttggcctcctctacgctgaacgaagtcaatacctcctcgaccatttcctgtgatagtccgcttgaaccacaagacgaaccagagccagaaccccagctcgagctccaggtggaaccagagccggagctagagcaactgccggattcagggtgcccggctccacgagcagaggcggaggattcttttttatag

SEQ ID NO: 130184 - DNA, 3321 bp, Artificial Sequence
  derived and/or modified sequence
atgcggcttcctggcgcaatgcctgcactcgctttgaagggagagctattgctattatccttgctgctcctgctcgagccgcagatcagccagggattggttgttacacctcctggcccagagctggtgctcaatgtgagctctaccttcgtgttaacgtgttcaggctccgccccagtggtgtgggaacggatgagccaggaaccacctcaggaaatggccaaggctcaggacggaacgttttcctctgttctgaccctgaccaacttgactgggctcgacacaggagaatacttctgtacacataacgatagtcgagggctggagacggacgaaagaaaacgcctgtacattttcgtcccagaccccactgtaggatttttaccgaacgatgcagaagaattattcatttttctgaccgaaattacggaaattacgattccttgccgggttactgatccacaactcgttgtcacactgcacgaaaaaaaaggcgatgttgctttgcccgtgccctacgaccatcagagaggcttttcaggtatctttgaggatcgatcctacatttgtaaaacaaccattggtgatcgggaagttgactcggacgcgtactatgtgtaccgtctgcaagtctccagtattaatgtttccgtgaatgcagttcaaaccgtggtcagacaaggggaaaatatcaccttaatgtgcatcgtgattggcaatgaagtcgtcaacttcgagtggacctatcctcggaaggaatcaggtcgcctcgttgagcccgtgaccgactttctgctggacatgccctaccacatccgaagtatcctccacatccccagcgcagagctggaggactccggaacatacacgtgcaacgtcacagaatctgtgaacgatcatcaggacgaaaaagcaattaacattacagtggtggaaagtggctacgtcagattactgggagaagtcggcacactgcagttcgcagaactgcacaggagtcggacactccaggtagtgtttgaagcatatccacccccaactgtgctatggttcaaggacaaccgcaccctcggagactcatccgccggtgagatcgccctttcgacccgcaatgtgtctgaaacccgctacgtaagcgagttaaccctcgtccgagtgaaggtggcagaagcaggacattataccatgagggcattccatgaagatgctgaagttcagttatcatttcagctccaaattaatgtgcccgtgcgggtgcttgaactttccgaaagccacccagacagtggagaacagactgtgaggtgccgaggaagaggaatgccccagccgaacatcatatggagcgcctgccgtgatttaaaaagatgccctcgggagcttccgccaactctgctcggcaatagttctgaggaagagagccaattggaaaccaatgtgacatattgggaggaagagcaggagttcgaggtcgtgtccaccctgcgccttcagcacgtagatcgtcctctgtcagtgcgctgcaccctgcgtaacgcagtcgggcaggacacgcaggaagttattgttgtcccccactctctcccttttaaggtcgtcgtgatcagtgccatactcgccctggtggtactcacgatcatcagtttgataatcctgatcatgttatggcagaaaaagccaaggtacgagataaggtggaaagtgatcgagtcggtgtccagtgatgggcacgagtatatctatgtagacccgatgcagctgccatatgactctacatgggagctgccacgagaccagttggtgctgggcagaactctgggctctggtgctttcggccaggtagtcgaggccacggcacatggattgagccactcacaggcaaccatgaaggttgcggtcaaaatgttgaagtctacagctcgatccagcgagaaacaggcgctgatgtcagagctgaagattatgtcacacctcggccctcatctgaatgttgttaaccttctcggtgcctgcaccaagggaggacccatttatatcataacggagtactgcagatatggagatttggtggactatctacaccggaataagcatacctttctccagcatcactccgacaagagaagacctccttctgccgagctgtactccaatgcgctgccagtgggcctgcccttgcctagtcacgtgtcgctcacgggagaatccgacggtgggtacatggatatgagcaaagacgagtctgtcgattatgtgccaatgctggacatgaagggcgatgttaagtacgccgacatcgagtcttccaactatatggccccatatgataactacgtgcccagcgccccagaacgcacatgtcgggcaaccctgataaacgaatctcccgtgttgtcctatatggacctggtgggcttctcttatcaggtggctaatggaatggagtttcttgcctccaagaactgtgtccatagggaccttgcggctaggaacgtgttgatctgtgaggggaaactcgtgaagatctgtgactttgggctagctcgggacataatgcgggacagtaactatatatccaaaggttctacctttctgccacttaagtggatggccccagagtcgatctttaacagcctgtatactacactctccgatgtttggtcctttggtatccttctgtgggaaattttcactctgggagggacaccctatcctgagctacccatgaacgagcagttttataacgctataaaacggggttacaggatggcgcagccagctcatgcctctgatgagatctacgagattatgcagaagtgttgggaggagaaattcgagattcggcctccatttagccaactggtactgctcctcgaaagactgctgggggaaggatacaagaaaaagtaccaacaggtcgatgaggagtttctccgctctgaccacccagccattctgcgttcacaggcgcgtctccccggttttcatggtcttagatcgcctctagatacaagcagtgtactatacactgcggtgcaaccaaatgagggcgacaatgactacattatccccttgcctgatcccaagccagaagtggcggatgagggccctctggagggatctccgagcctggcaagtagcacactaaacgaggttaatacctcgagcaccattagctgtgacagcccactggagccccaagacgagcccgaaccggaaccccagctggagctgcaggtagaaccagagccggaattggaacagttacccgatagtggatgccccgcacctagagcagaggcagaagatagttttttgtag

SEQ ID NO: 130185 - DNA, 2331 bp, Artificial Sequence
  derived and/or modified sequence
gctgccagcgagccagatacggccggatctgtgcgcggtttacccacagctcattgtcctgtggtcgataatcggaccctaggtgacagcagtgccggagagattgctttgtccacacgtaacgtttcagagacacgctacgtgtccgagttaaccctcgtgcgcgtgaaagttgccgaggcaggccactacaccatgagagccttccacgaggatgcagaagtccagctcagcttccagctgcagatcaatgttcccgtgcgtgtcctggagctttctgaatcccaccccgactcgggggaacagacggtgcggtgccgcggtcgtggcatgcctcagcctaacatcatctggagcgcctgccgggatctgaaacgatgtcccagagagcttcccccaactctcttgggtaactccagtgaggaggaatctcagctggagactaacgtcacatactgggaggaagagcaggaattcgaggtggtgtccacacttcgccttcagcatgtcgaccgtccccttagtgtgcgatgtacattgagaaacgccgtcggccaggatacacaggaagtcatagtcgtgcctcactctctcccgtttaaggttgttgtgatcagcgccattctcgcgcttgtggtcttaactattataagcctgattatactgatcatgctgtggcagaagaagccacgctacgaaatacggtggaaagtgattgaatcagtgtcaagcgacgggcatgaatacatttacgtagacccaatgcagctgccctatgactccacatgggagctccccagagaccagctggtcctgggtagaaccctaggcagcggtgctttcggacaggttgttgaggctacagcgcacggcctgtctcacagccaagctaccatgaaggtagccgtaaagatgcttaaaagtacggctaggtctagcgagaaacaggccctcatgtccgagctcaagataatgtcacatttaggaccccatctgaacgtggtcaatctcttgggagcctgcactaagggaggcccaatctatattatcacagagtattgtaggtatggcgacttagtcgattacctgcatcgcaataagcacaccttcctccagcatcattcagacaaacgacgcccaccgagcgctgaactctactctaacgctttgcccgtcggcctccccctgcccagccatgtttcgctaaccggcgaaagcgatggtggctatatggatatgtctaaggacgagtccgtggactacgttcccatgctggatatgaagggggacgtaaagtacgctgatatcgagagttctaattacatggctccctacgacaactacgtgccgtcagctcctgaacgcacatgtagggccacgctgatcaacgagagtcccgtgcttagctacatggacttggtgggattctcctaccaagtagctaacggcatggagttcctggcctcaaaaaattgtgtgcacagggatcttgctgctcgcaatgtcctgatctgcgaagggaagctggtgaagatctgcgatttcggcttggcacgcgacattatgcgggacagcaattatatttcaaagggaagtacctttctgcctttaaagtggatggccccagaatctatattcaacagcttgtacaccaccctgtcggatgtgtggtcttttggcattctgctatgggagatcttcaccctgggcggaaccccctaccccgagctgcccatgaatgaacagttctataatgcaattaaacggggttatagaatggcccagccagctcacgcctctgacgaaatctatgaaatcatgcaaaagtgctgggaagagaaattcgaaatcaggccccctttctctcaacttgtgctgctactcgagagactcttaggagagggatacaaaaagaaataccaacaggtcgatgaggaattcttacggtccgaccacccagcaatactcaggtcgcaggctcgccttcctggattccatggacttaggagccctctcgatacttcttctgttctgtacacagcagtacagccaaatgaaggagacaacgattacattatccccctccctgaccctaagcccgaggtggctgacgaaggaccattggaagggtccccttctctggcctcttctaccctgaacgaggttaatacaagctctactatcagctgtgacagcccactcgaaccacaggacgagcctgaacccgagccccagttggaactacaggtggagccagagccggagctagagcagctgcctgacagcgggtgtccagcccctagagcagaggcagaagacagcttcctgtag

SEQ ID NO: 130186 - DNA, 5717 bp, Artificial Sequence
  derived and/or modified sequence
gctcctgaggctgccagcagccagcagtgactgcccgccctatctgggacccaggatcgctctgtgagcaacttggagccagagaggagatcaacaaggaggaggagagagccggcccctcagccctgctgcccagcagcagcctgtgctcgccctgcccaacgcagacagccagacccagggcggcccctctggcggctctgctcctcccgaaggatgcttggggagtgaggcgaagctgggccgctcctctcccctacagcagcccccttcctccatccctctgttctcctgagccttcaggagcctgcaccagtcctgcctgtccttctactcagctgttacccactctgggaccagcagtctttctgataactgggagagggcagtaaggaggacttcctggagggggtgactgtccagagcctggaactgtgcccacaccagaagccatcagcagcaaggacaccatgcggcttccgggtgcgatgccagctctggccctcaaaggcgagctgctgttgctgtctctcctgttacttctggaaccacagatctctcagggcctggtcgtcacacccccggggccagagcttgtcctcaatgtctccagcaccttcgttctgacctgctcgggttcagctccggtggtgtgggaacggatgtcccaggagcccccacaggaaatggccaaggcccaggatggcaccttctccagcgtgctcacactgaccaacctcactgggctagacacgggagaatacttttgcacccacaatgactcccgtggactggagaccgatgagcggaaacggctctacatctttgtgccagatcccaccgtgggcttcctccctaatgatgccgaggaactattcatctttctcacggaaataactgagatcaccattccatgccgagtaacagacccacagctggtggtgacactgcacgagaagaaaggggacgttgcactgcctgtcccctatgatcaccaacgtggcttttctggtatctttgaggacagaagctacatctgcaaaaccaccattggggacagggaggtggattctgatgcctactatgtctacagactccaggtgtcatccatcaacgtctctgtgaacgcagtgcagactgtggtccgccagggtgagaacatcaccctcatgtgcattgtgatcgggaatgaggtggtcaacttcgagtggacatacccccgcaaagaaagtgggcggctggtggagccggtgactgacttcctcttggatatgccttaccacatccgctccatcctgcacatccccagtgccgagttagaagactcggggacctacacctgcaatgtgacggagagtgtgaatgaccatcaggatgaaaaggccatcaacatcaccgtggttgagagcggctacgtgcggctcctgggagaggtgggcacactacaatttgctgagctgcatcggagccggacactgcaggtagtgttcgaggcctacccaccgcccactgtcctgtggttcaaagacaaccgcaccctgggcgactccagcgctggcgaaatcgccctgtccacgcgcaacgtgtcggagacccggtatgtgtcagagctgacactggttcgcgtgaaggtggcagaggctggccactacaccatgcgggccttccatgaggatgctgaggtccagctctccttccagctacagatcaatgtccctgtccgagtgctggagctaagtgagagccaccctgacagtggggaacagacagtccgctgtcgtggccggggcatgccccagccgaacatcatctggtctgcctgcagagacctcaaaaggtgtccacgtgagctgccgcccacgctgctggggaacagttccgaagaggagagccagctggagactaacgtgacgtactgggaggaggagcaggagtttgaggtggtgagcacactgcgtctgcagcacgtggatcggccactgtcggtgcgctgcacgctgcgcaacgctgtgggccaggacacgcaggaggtcatcgtggtgccacactccttgccctttaaggtggtggtgatctcagccatcctggccctggtggtgctcaccatcatctcccttatcatcctcatcatgctttggcagaagaagccacgttacgagatccgatggaaggtgattgagtctgtgagctctgacggccatgagtacatctacgtggaccccatgcagctgccctatgactccacgtgggagctgccgcgggaccagcttgtgctgggacgcaccctcggctctggggcctttgggcaggtggtggaggccacggctcatggcctgagccattctcaggccacgatgaaagtggccgtcaagatgcttaaatccacagcccgcagcagtgagaagcaagcccttatgtcggagctgaagatcatgagtcaccttgggccccacctgaacgtggtcaacctgttgggggcctgcaccaaaggaggacccatctatatcatcactgagtactgccgctacggagacctggtggactacctgcaccgcaacaaacacaccttcctgcagcaccactccgacaagcgccgcccgcccagcgcggagctctacagcaatgctctgcccgttgggctccccctgcccagccatgtgtccttgaccggggagagcgacggtggctacatggacatgagcaaggacgagtcggtggactatgtgcccatgctggacatgaaaggagacgtcaaatatgcagacatcgagtcctccaactacatggccccttacgataactacgttccctctgcccctgagaggacctgccgagcaactttgatcaacgagtctccagtgctaagctacatggacctcgtgggcttcagctaccaggtggccaatggcatggagtttctggcctccaagaactgcgtccacagagacctggcggctaggaacgtgctcatctgtgaaggcaagctggtcaagatctgtgactttggcctggctcgagacatcatgcgggactcgaattacatctccaaaggcagcacctttttgcctttaaagtggatggctccggagagcatcttcaacagcctctacaccaccctgagcgacgtgtggtccttcgggatcctgctctgggagatcttcaccttgggtggcaccccttacccagagctgcccatgaacgagcagttctacaatgccatcaaacggggttaccgcatggcccagcctgcccatgcctccgacgagatctatgagatcatgcagaagtgctgggaagagaagtttgagattcggccccccttctcccagctggtgctgcttctcgagagactgttgggcgaaggttacaaaaagaagtaccagcaggtggatgaggagtttctgaggagtgaccacccagccatccttcggtcccaggcccgcttgcctgggttccatggcctccgatctcccctggacaccagctccgtcctctatactgccgtgcagcccaatgagggtgacaacgactatatcatccccctgcctgaccccaaacccgaggttgctgacgagggcccactggagggttcccccagcctagccagctccaccctgaatgaagtcaacacctcctcaaccatctcctgtgacagccccctggagccccaggacgaaccagagccagagccccagcttgagctccaggtggagccggagccagagctggaacagttgccggattcggggtgccctgcgcctcgggcggaagcagaggatagcttcctgtagggggctggcccctaccctgccctgcctgaagctccccccctgccagcacccagcatctcctggcctggcctgaccgggcttcctgtcagccaggctgcccttatcagctgtccccttctggaagctttctgctcctgacgtgttgtgccccaaaccctggggctggcttaggaggcaagaaaactgcaggggccgtgaccagccctctgcctccagggaggccaactgactctgagccagggttcccccagggaactcagttttcccatatgtaaaatgggaaagttaggcttgatgacccagaatctaggattctctccctggctgacaggtggggagaccgaatccctccctgggaagattcttggagttactgaggtggtaaattaacttttttctgttcagccagctacccctcaaggaatcatagctctctcctcgcacttttatccacccaggagctagggaagagaccctagcctccctggctgctggctgagctagggcctagccttgagcagtgttgcctcatccagaagaaagccagtctcctccctatgatgccagtccctgcgttccctggcccgagctggtctggggccattaggcagcctaattaatgctggaggctgagccaagtacaggacacccccagcctgcagcccttgcccagggcacttggagcacacgcagccatagcaagtgcctgtgtccctgtccttcaggcccatcagtcctggggctttttctttatcaccctcagtcttaatccatccaccagagtctagaaggccagacgggccccgcatctgtgatgagaatgtaaatgtgccagtgtggagtggccacgtgtgtgtgccagtatatggccctggctctgcattggacctgctatgaggctttggaggaatccctcaccctctctgggcctcagtttccccttcaaaaaatgaataagtcggacttattaactctgagtgccttgccagcactaacattctagagtattccaggtggttgcacatttgtccagatgaagcaaggccatataccctaaacttccatcctgggggtcagctgggctcctgggagattccagatcacacatcacactctggggactcaggaaccatgccccttccccaggcccccagcaagtctcaagaacacagctgcacaggccttgacttagagtgacagccggtgtcctggaaagcccccagcagctgccccagggacatgggaagaccacgggacctctttcactacccacgatgacctccgggggtatcctgggcaaaagggacaaagagggcaaatgagatcacctcctgcagcccaccactccagcacctgtgccgaggtctgcgtcgaagacagaatggacagtgaggacagttatgtcttgtaaaagacaagaagcttcagatgggtaccccaagaaggatgtgagaggtgggcgctttggaggtttgcccctcacccaccagctgccccatccctgaggcagcgctccatgggggtatggttttgtcactgcccagacctagcagtgacatctcattgtccccagcccagtgggcattggaggtgccaggggagtcagggttgtagccaagacgcccccgcacggggagggttgggaagggggtgcaggaagctcaacccctctgggcaccaaccctgcattgcaggttggcaccttacttccctgggatccccagagttggtccaaggagggagagtgggttctcaatacggtaccaaagatataatcacctaggtttacaaatatttttaggactcacgttaactcacatttatacagcagaaatgctattttgtatgctgttgagtttttctatctgtgtacttttttttaagggaaagattttaatattaaacctggtgcttctcactcacaga

SEQ ID NO: 130187 - DNA, 4252 bp, Artificial Sequence
  derived and/or modified sequence
gctgcatcggagccggacactgcaggtagtgttcgaggcctacccaccgcccactgtcctgtggttgacaaccgcaccctgggcgactccagcgctggcgaaatcgccctgtccacgcgcaacgtgtcggagacccggtatgtgtcagagctgacactggttcgcgtgaaggtggcagaggctggccactacaccatgcgggccttccatgaggatgctgaggtccagctctccttccagctacagatcaatgtccctgtccgagtgctggagctaagtgagagccaccctgacagtggggaacagacagtccgctgtcgtggccggggcatgccccagccgaacatcatctggtctgcctgcagagacctcaaaaggtgtccacgtgagctgccgcccacgctgctggggaacagttccgaagaggagagccagctggagactaacgtgacgtactgggaggaggagcaggagtttgaggtggtgagcacactgcgtctgcagcacgtggatcggccactgtcggtgcgctgcacgctgcgcaacgctgtgggccaggacacgcaggaggtcatcgtggtgccacactccttgccctttaaggtggtggtgatctcagccatcctggccctggtggtgctcaccatcatctcccttatcatcctcatcatgctttggcagaagaagccacgttacgagatccgatggaaggtgattgagtctgtgagctctgacggccatgagtacatctacgtggaccccatgcagctgccctatgactccacgtgggagctgccgcgggaccagcttgtgctgggacgcaccctcggctctggggcctttgggcaggtggtggaggccacggctcatggcctgagccattctcaggccacgatgaaagtggccgtcaagatgcttaaatccacagcccgcagcagtgagaagcaagcccttatgtcggagctgaagatcatgagtcaccttgggccccacctgaacgtggtcaacctgttgggggcctgcaccaaaggaggacccatctatatcatcactgagtactgccgctacggagacctggtggactacctgcaccgcaacaaacacaccttcctgcagcaccactccgacaagcgccgcccgcccagcgcggagctctacagcaatgctctgcccgttgggctccccctgcccagccatgtgtccttgaccggggagagcgacggtggctacatggacatgagcaaggacgagtcggtggactatgtgcccatgctggacatgaaaggagacgtcaaatatgcagacatcgagtcctccaactacatggccccttacgataactacgttccctctgcccctgagaggacctgccgagcaactttgatcaacgagtctccagtgctaagctacatggacctcgtgggcttcagctaccaggtggccaatggcatggagtttctggcctccaagaactgcgtccacagagacctggcggctaggaacgtgctcatctgtgaaggcaagctggtcaagatctgtgactttggcctggctcgagacatcatgcgggactcgaattacatctccaaaggcagcacctttttgcctttaaagtggatggctccggagagcatcttcaacagcctctacaccaccctgagcgacgtgtggtccttcgggatcctgctctgggagatcttcaccttgggtggcaccccttacccagagctgcccatgaacgagcagttctacaatgccatcaaacggggttaccgcatggcccagcctgcccatgcctccgacgagatctatgagatcatgcagaagtgctgggaagagaagtttgagattcggccccccttctcccagctggtgctgcttctcgagagactgttgggcgaaggttacaaaaagaagtaccagcaggtggatgaggagtttctgaggagtgaccacccagccatccttcggtcccaggcccgcttgcctgggttccatggcctccgatctcccctggacaccagctccgtcctctatactgccgtgcagcccaatgagggtgacaacgactatatcatccccctgcctgaccccaaacccgaggttgctgacgagggcccactggagggttcccccagcctagccagctccaccctgaatgaagtcaacacctcctcaaccatctcctgtgacagccccctggagccccaggacgaaccagagccagagccccagcttgagctccaggtggagccggagccagagctggaacagttgccggattcggggtgccctgcgcctcgggcggaagcagaggatagcttcctgtagggggctggcccctaccctgccctgcctgaagctccccccctgccagcacccagcatctcctggcctggcctgaccgggcttcctgtcagccaggctgcccttatcagctgtccccttctggaagctttctgctcctgacgtgttgtgccccaaaccctggggctggcttaggaggcaagaaaactgcaggggccgtgaccagccctctgcctccagggaggccaactgactctgagccagggttcccccagggaactcagttttcccatatgtaaaatgggaaagttaggcttgatgacccagaatctaggattctctccctggctgacaggtggggagaccgaatccctccctgggaagattcttggagttactgaggtggtaaattaacttttttctgttcagccagctacccctcaaggaatcatagctctctcctcgcacttttatccacccaggagctagggaagagaccctagcctccctggctgctggctgagctagggcctagccttgagcagtgttgcctcatccagaagaaagccagtctcctccctatgatgccagtccctgcgttccctggcccgagctggtctggggccattaggcagcctaattaatgctggaggctgagccaagtacaggacacccccagcctgcagcccttgcccagggcacttggagcacacgcagccatagcaagtgcctgtgtccctgtccttcaggcccatcagtcctggggctttttctttatcaccctcagtcttaatccatccaccagagtctagaaggccagacgggccccgcatctgtgatgagaatgtaaatgtgccagtgtggagtggccacgtgtgtgtgccagtatatggccctggctctgcattggacctgctatgaggctttggaggaatccctcaccctctctgggcctcagtttccccttcaaaaaatgaataagtcggacttattaactctgagtgccttgccagcactaacattctagagtattccaggtggttgcacatttgtccagatgaagcaaggccatataccctaaacttccatcctgggggtcagctgggctcctgggagattccagatcacacatcacactctggggactcaggaaccatgccccttccccaggcccccagcaagtctcaagaacacagctgcacaggccttgacttagagtgacagccggtgtcctggaaagcccccagcagctgccccagggacatgggaagaccacgggacctctttcactacccacgatgacctccgggggtatcctgggcaaaagggacaaagagggcaaatgagatcacctcctgcagcccaccactccagcacctgtgccgaggtctgcgtcgaagacagaatggacagtgaggacagttatgtcttgtaaaagacaagaagcttcagatgggtaccccaagaaggatgtgagaggtgggcgctttggaggtttgcccctcacccaccagctgccccatccctgaggcagcgctccatgggggtatggttttgtcactgcccagacctagcagtgacatctcattgtccccagcccagtgggcattggaggtgccaggggagtcagggttgtagccaagacgcccccgcacggggagggttgggaagggggtgcaggaagctcaacccctctgggcaccaaccctgcattgcaggttggcaccttacttccctgggatccccagagttggtccaaggagggagagtgggttctcaatacggtaccaaagatataatcacctaggtttacaaatatttttaggactcacgttaactcacatttatacagcagaaatgctattttgtatgctgttgagtttttctatctgtgtacttttttttaagggaaagattttaatattaaacctggtgcttctcactc

SEQ ID NO: 130188 - protein, 436 aa, Artificial Sequence
  derived and/or modified sequence
MRLARLLRGAALAGPGPGLRAAGFSRSFSSDSGSSPASERGVPGQVDFYARFSPSPLSMKQFLDFGSVNACEKTSFMFLRQELPVRLANIMKEISLLPDNLLRTPSVQLVQSWYIQSLQELLDFKDKSAEDAKAIYDFTDTVIRIRNRHNDVIPTMAQGVIEYKESFGVDPVTSQNVQYFLDRFYMSRISIRMLLNQHSLLFGGKGKGSPSHRKHIGSINPNCNVLEVIKDGYENARRLCDLYYINSPELELEELNAKSPGQPIQVVYVPSHLYHMVFELFKNAMRATMEHHANRGVYPPIQVHVTLGNEDLTVKMSDRGGGVPLRKIDRLFNYMYSTAPRPRVETSRAVPLAGFGYGLPISRLYAQYFQGDLKLYSLEGYGTDAVIYIKALSTDSIERLPVYNKAAWKHYNTNHEADDWCVPSREPKDMTTFRSA

SEQ ID NO: 130189 - protein, 360 aa, Artificial Sequence
  derived and/or modified sequence
MFLRQELPVRLANIMKEISLLPDNLLRTPSVQLVQSWYIQSLQELLDFKDKSAEDAKAIYDFTDTVIRIRNRHNDVIPTMAQGVIEYKESFGVDPVTSQNVQYFLDRFYMSRISIRMLLNQHSLLFGGKGKGSPSHRKHIGSINPNCNVLEVIKDGYENARRLCDLYYINSPELELEELNAKSPGQPIQVVYVPSHLYHMVFELFKNAMRATMEHHANRGVYPPIQVHVTLGNEDLTVKMSDRGGGVPLRKIDRLFNYMYSTAPRPRVETSRAVPLAGFGYGLPISRLYAQYFQGDLKLYSLEGYGTDAVIYIKALSTDSIERLPVYNKAAWKHYNTNHEADDWCVPSREPKDMTTFRSA

SEQ ID NO: 130190 - protein, 281 aa, Artificial Sequence
  derived and/or modified sequence
MAQGVIEYKESFGVDPVTSQNVQYFLDRFYMSRISIRMLLNQHSLLFGGKGKGSPSHRKHIGSINPNCNVLEVIKDGYENARRLCDLYYINSPELELEELNAKSPGQPIQVVYVPSHLYHMVFELFKNAMRATMEHHANRGVYPPIQVHVTLGNEDLTVKMSDRGGGVPLRKIDRLFNYMYSTAPRPRVETSRAVPLAGFGYGLPISRLYAQYFQGDLKLYSLEGYGTDAVIYIKALSTDSIERLPVYNKAAWKHYNTNHEADDWCVPSREPKDMTTFRSA

SEQ ID NO: 130191 - DNA, 1311 bp, Artificial Sequence
  derived and/or modified sequence
atgagactggccagactgctgagaggcgccgccctggccggccccggccccggcctgagagccgccggcttcagcagaagcttcagcagcgacagcggcagcagccccgccagcgagagaggcgtgcccggccaggtggacttctacgccagattcagccccagccccctgagcatgaagcagttcctggacttcggcagcgtgaacgcctgcgagaagaccagcttcatgttcctgagacaggagctgcccgtgagactggccaacatcatgaaggagatcagcctgctgcccgacaacctgctgagaacccccagcgtgcagctggtgcagagctggtacatccagagcctgcaggagctgctggacttcaaggacaagagcgccgaggacgccaaggccatctacgacttcaccgacaccgtgatcagaatcagaaacagacacaacgacgtgatccccaccatggcccagggcgtgatcgagtacaaggagagcttcggcgtggaccccgtgaccagccagaacgtgcagtacttcctggacagattctacatgagcagaatcagcatcagaatgctgctgaaccagcacagcctgctgttcggcggcaagggcaagggcagccccagccacagaaagcacatcggcagcatcaaccccaactgcaacgtgctggaggtgatcaaggacggctacgagaacgccagaagactgtgcgacctgtactacatcaacagccccgagctggagctggaggagctgaacgccaagagccccggccagcccatccaggtggtgtacgtgcccagccacctgtaccacatggtgttcgagctgttcaagaacgccatgagagccaccatggagcaccacgccaacagaggcgtgtacccccccatccaggtgcacgtgaccctgggcaacgaggacctgaccgtgaagatgagcgacagaggcggcggcgtgcccctgagaaagatcgacagactgttcaactacatgtacagcaccgcccccagacccagagtggagaccagcagagccgtgcccctggccggcttcggctacggcctgcccatcagcagactgtacgcccagtacttccagggcgacctgaagctgtacagcctggagggctacggcaccgacgccgtgatctacatcaaggccctgagcaccgacagcatcgagagactgcccgtgtacaacaaggccgcctggaagcactacaacaccaaccacgaggccgacgactggtgcgtgcccagcagagagcccaaggacatgaccaccttcagaagcgcctag

SEQ ID NO: 130192 - DNA, 1311 bp, Artificial Sequence
  derived and/or modified sequence
atgcggctcgcccggctgttacgcggggctgcactggctggcccaggaccaggactcagggctgccggctttagtcggagtttctcttctgactccggttcgtccccagcatcggagcggggcgttccggggcaggtggacttctatgctcgatttagtccctccccactgagcatgaagcagtttctggactttggctcagtcaatgcatgcgagaagacgagtttcatgtttcttcgccaggagttgcctgtgcgcctggccaatataatgaaggagatcagcctcttacccgacaacctgctccgtaccccctcagtgcaactcgtgcagagctggtacatacagtcgctgcaggagcttctggatttcaaagacaagagcgccgaggatgcaaaagccatctatgatttcacggacacggttatcagaattaggaatcggcacaatgatgtgatacccacaatggcccaaggggtcatagagtacaaagagtcatttggcgtggacccggtgacatcccagaatgtgcagtattttttggacagattttacatgtcacgaatctccatcaggatgctcctgaaccaacattctctgctgttcggggggaagggaaaagggagtccaagtcatagaaagcacattgggtccatcaaccctaactgcaatgttcttgaggtgatcaaggatggctacgaaaatgctcgccgcttatgtgatttgtattatatcaactcacccgaactcgaattggaggagcttaacgctaaatcaccagggcagcccatccaggtagtttacgtcccatcccacctctatcatatggtgttcgaattgttcaagaatgctatgagagccaccatggagcatcacgctaaccgaggcgtgtatcctcctatccaagtccacgtgacactgggaaacgaggacctgaccgtgaagatgtcagacagggggggcggggtgcccttaaggaagattgacaggttatttaactacatgtactctacagctccccggccgagggtggaaaccagtagggcggtcccgctcgccgggtttggctatggactacccatttcccggttatatgcccagtatttccagggagacctgaagctatactcactggagggctatgggacagacgcagtgatatatataaaggccctctctactgattctatagagaggctgccagtttacaataaggcggcatggaaacattacaataccaaccatgaggcggatgactggtgtgtgccctcaagggaacccaaagatatgactacgtttcgtagtgcgtag

SEQ ID NO: 130193 - DNA, 1311 bp, Artificial Sequence
  derived and/or modified sequence
atgcgcttggccagattgttgcggggggctgccttggccggacctggccctgggttgagagcggctggcttctctcgatcattttcatcagattccgggtcctccccagccagtgagcgtggagtccctggccaggtcgacttttatgctcgcttcagcccaagtccgctctctatgaagcagtttctggactttgggtctgtgaatgcatgtgagaagacctcatttatgttcctaagacaagagctgccagtccggctggcaaacatcatgaaggaaatttccttgctgcctgacaacttactgcgcactccaagcgttcagctggtgcaaagctggtacattcagtcccttcaagagctcttagatttcaaagacaagtctgccgaagacgccaaggcgatatatgattttacagacacagtgattcgaatccgtaatcgccacaacgacgtgattcccactatggcacaaggagtgattgagtataaggagtcttttggggtggatcccgttacatctcaaaatgtgcagtattttctcgaccgtttttacatgagccgaatctctatcaggatgttattaaaccagcactcgcttctctttggaggaaagggaaaggggtcacctagccatcgcaagcacatcggcagcatcaaccccaattgcaacgtcctggaagtcatcaaggacggctacgagaacgctagaagactatgtgacttatactatatcaattcacctgagttggagctcgaggagttgaatgccaaaagtcctgggcaaccgattcaggtcgtctatgtgccctctcacctgtaccacatggtgttcgaattattcaagaacgcgatgcgggcaacgatggaacaccatgcgaacagaggtgtgtatccacctatccaagtccatgtgaccctgggaaacgaggatctcacagtgaaaatgtccgatagaggcggcggagttccactgaggaagatcgatagactgttcaattatatgtattcaacagctccccggccccgggtggaaacatctcgagctgtccctctggctggatttggctatgggttgccgatctctcgtctatacgcccagtactttcagggtgacctgaagctgtactctctcgagggctatgggaccgacgcggtgatttacatcaaggcattgtcaactgatagcatcgaacgcctgccagtctacaataaggccgcctggaagcactacaataccaaccacgaggcagatgactggtgcgtcccgagcagagagccaaaggatatgacaacctttagatcagcatag

SEQ ID NO: 130194 - DNA, 1311 bp, Artificial Sequence
  derived and/or modified sequence
atgaggctggcccggctgctgcggggggccgccctggccggccctggccctggcctgcgggccgccggcttcagccgctccttcagcagtgacagcggcagcagccctgccagcgagcggggcgtgcccggccaggtggacttctacgcccgcttcagccccagccccctgtccatgaagcagttcctggactttggatctgtgaatgcctgtgagaagaccagcttcatgttcctgcggcaggagctgcctgtgcggctggccaacatcatgaaggagatcagcctgctgcctgacaacctgctgcggacccccagcgtgcagctggtgcagagctggtacatccagagcctgcaggagctgctggacttcaaggacaagtctgcagaagatgccaaggccatctatgacttcacagacaccgtcatccgcatccggaacagacacaatgatgtgatccccaccatggcccagggcgtgattgagtacaaggagagctttggagtggaccctgtgaccagccagaatgtgcagtacttcctggaccgcttctacatgagccgcatcagcatccgcatgctgctgaaccagcacagcctgctgtttggaggcaagggcaagggcagccccagccacaggaagcacatcggcagcatcaaccccaactgcaatgtgctggaggtgatcaaggatggctatgaaaatgcccggcggctgtgtgacctgtactacatcaacagccctgagctggagctggaggagctgaatgccaagagccctggccagcccatccaggtggtgtatgtgcccagccacctgtaccacatggtgtttgagctgttcaagaatgccatgagggccaccatggagcaccacgccaacagaggagtgtacccacccatccaggtgcacgtgaccctgggcaatgaagacctgactgtgaagatgtctgaccggggcggcggcgtgcccctgaggaagattgacaggctcttcaactacatgtacagcacagccccccggccccgggtggagaccagcagagctgtgcccctggccggcttcggctacggcctgcccatcagccggctgtatgcccagtacttccagggcgacctgaagctgtacagcctggagggctatggaacagatgctgtgatctacatcaaggccctgagcacagacagcattgagcggctgcctgtgtacaacaaggccgcctggaagcactacaacaccaaccatgaagcagatgactggtgtgtgcccagccgggagcccaaggacatgaccaccttccgcagcgcctag

SEQ ID NO: 130195 - DNA, 1311 bp, Artificial Sequence
  derived and/or modified sequence
atgcggctggcccggctgctgcggggcgccgccctggccggccccggtcctggtttgagggcagcgggtttttcacgctctttttcatctgacagtggtagctcacctgctagcgaacggggggtgcctggccaagttgacttttatgcaagattctctccctcccctttgtccatgaaacagttcctggacttcgggtctgtgaacgcctgcgagaaaacctccttcatgtttctgaggcaggaactgccagtgcgcctagctaacattatgaaggagatttctttactgccagacaacctgctaagaacgccctccgtgcagttagttcagagctggtacatacagagcctgcaggagctgcttgactttaaagataaatcagccgaggacgctaaggcaatctatgatttcaccgacacggtaatccgcattagaaatagacataacgacgtaatcccgaccatggcacagggggtgatcgagtacaaggaatcattcggagtggacccggtcacttcccagaatgtgcagtactttcttgatcgcttttatatgtcccggatcagcattagaatgttgctgaaccaacattcactgctgttcggggggaaaggaaaggggtcgcccagtcacagaaaacatattgggtcaattaatcccaactgcaacgtgcttgaggttataaaggacggctatgaaaatgcaagacgactctgtgacttgtactatattaactctcctgagctggagctggaggagctgaacgcgaaaagtcccggacagcctatccaagtggtctacgtgccatcccatctctatcatatggtgttcgagctcttcaagaatgccatgagggccacgatggaacatcatgctaaccgaggggtttacccaccaatccaggtgcatgtcacattgggaaatgaggacctgactgtcaagatgtctgatcgcggaggaggcgtccccctcagaaaaatcgatcgactcttcaactatatgtattctaccgcaccccggcccagagtcgagacttcgcgggcagtgcctttggctggctttgggtatggcttgcccatttccagattgtacgcgcaatacttccaaggagacctgaagctgtactccttagagggctatggaaccgatgctgtgatatacatcaaagccctaagcacagatagcatcgaacggctacccgtttacaataaagctgcctggaagcactacaacaccaaccacgaagcggacgactggtgtgtgccgtcccgagagcccaaggatatgaccacttttagatctgcttag

SEQ ID NO: 130196 - DNA, 1311 bp, Artificial Sequence
  derived and/or modified sequence
atgcggctggcccggctgctgcggggcgccgccctggccggccccggccctggtctgagggcagccgggttctctaggtctttctctagcgactctggcagctcccccgcatctgagaggggtgttcccggccaggttgacttctatgcccggttttctcctagtcccctttccatgaaacagttcctggatttcgggtccgtgaacgcatgcgagaaaacctccttcatgtttctgagacaggaattacctgtgagattagccaacatcatgaaagaaatctccttattgccagacaatttactgcggaccccttccgtgcagttggtacagtcctggtatatccagtccttacaggaactgctcgattttaaggacaagtcagcagaagacgctaaagcaatctacgatttcactgataccgtgatacgtattcgcaataggcacaatgatgttattccgaccatggcccagggggtaatcgaatacaaagagtcttttggtgtggacccagtgacatctcaaaacgtgcaatactttcttgatagattctatatgtccagaatttccatccgaatgctactgaatcagcactcactattgttcggaggcaagggaaaaggaagtccttctcacaggaagcatatcggttccattaatcccaactgcaacgttcttgaggttatcaaagacgggtatgaaaatgcgcggcggctgtgtgacctgtactatatcaactctcctgaactggagcttgaggaactgaacgctaagtcaccaggccagcctatacaagtcgtgtacgtgccctcacacctgtatcacatggtctttgaactattcaagaatgctatgcgggctacaatggaacatcacgcaaatcggggagtctacccccccattcaggtccatgtgaccctggggaatgaagacctcaccgtcaaaatgagcgatcggggtggcggtgtcccattacggaaaatagaccggctgtttaactacatgtattcgacagccccacggcccagggtcgagacaagtcgcgccgtccccctagccggattcggatatggtcttcctattagccgtctgtacgcacaatattttcagggtgatttgaagctttatagtctggaaggttacggcaccgatgctgtgatctacatcaaagcactctcaaccgacagcattgagcgtctgcctgtctataacaaggctgcgtggaaacactacaacaccaaccacgaggccgacgattggtgcgttccatcccgggagccaaaagatatgacaacttttcgatccgcctag

SEQ ID NO: 130197 - DNA, 1311 bp, Artificial Sequence
  derived and/or modified sequence
atgaggctggcccgtctgctccggggagcagccctcgccggtccaggacccggtctgagggctgctggattttcgcgttcatttagttcagactccgggagcagtcctgcgtccgagcgaggtgtacctgggcaagtagacttttacgccaggtttagcccctcgccgctctctatgaagcagtttctggacttcggatccgtcaacgcatgtgaaaagacgagtttcatgtttcttcgccaggaactgcctgttcgtctagccaacattatgaaagagatttctcttttgcctgacaacctgctgcgcaccccctcagtgcagctggttcagtcctggtatatacagtctctgcaagagctgttggatttcaaggataagtccgccgaggatgcaaaggcaatttatgattttactgacacagtcatccggatacgcaacagacataatgatgtgataccgactatggcacagggggtcatcgagtacaaggaaagcttcggcgttgaccctgtgaccagccagaacgtccaatactttctagaccggttttacatgtctagaatttccattcggatgttgctgaatcagcactctctgctgtttggtggcaaggggaaggggtctccctcgcatcggaagcacatcggatccatcaatcctaattgcaacgttctcgaggtgattaaggatggctacgagaacgctagaaggctgtgcgacctctattacattaacagcccagaacttgaacttgaggaactgaacgccaaaagtcccggtcagcctatccaggttgtgtatgtaccctcccacctctatcatatggtgttcgagctctttaagaacgccatgcgagccacgatggagcatcatgctaaccgcggtgtctaccctcccattcaggtgcacgtcactctggggaatgaagacctcactgtcaagatgtccgaccggggtggtggagtgccgttgagaaagattgaccgtctgttcaactacatgtactcaactgcgcctcggccaagagtggaaacatcgagggccgtcccactagctggatttgggtatggcttacccatttcgaggctctacgctcagtacttccagggagatctgaaattgtactccctggaaggctacggcacagacgcagtgatttatattaaagctctttctacagattcaatcgaaagattacctgtctataataaggcagcttggaaacactataacactaaccatgaggccgacgattggtgtgtgccttctcgggagcccaaggacatgactacttttcgcagcgcatag

SEQ ID NO: 130198 - DNA, 1311 bp, Artificial Sequence
  derived and/or modified sequence
atgaggttggcgaggctgctccgcggagcagctttggcagggccaggaccaggtttgagagccgcaggcttcagcaggagtttctcctctgattctggttcttccccagcttcagagcgtggcgtgccaggacaggtggacttctacgccaggttcagtccttcgccactatccatgaagcagtttctagatttcggatccgtgaatgcctgcgaaaaaacgtcattcatgttcctgaggcaggaattacccgtccgactagccaacatcatgaaggaaatttctctcctgcccgacaacctcctgcgaacaccgtcggtccagctggtacagagttggtatatccagagtctccaagaactgctagacttcaaggataagtcagctgaggatgctaaagccatctatgatttcaccgatacggtcatcagaatcagaaacaggcacaatgacgtcattccaactatggcacagggggtcatagaatacaaggagtcattcggggtggacccagttactagtcaaaacgtccagtacttcctcgaccgtttttacatgtccaggatcagtatcagaatgttgctgaaccagcacagcctgctctttggagggaaaggcaagggctccccttctcataggaagcacattggatccattaatcctaactgcaatgtattggaagtaataaaggacggctacgaaaatgcaaggaggctttgcgatctctactacattaacagccccgagctggaactagaagagctaaacgcgaagtcgccagggcagccgatccaggtggtgtacgtgccatctcatctctaccacatggtgtttgaattgttcaagaatgctatgagggcaactatggaacaccatgccaacaggggagtctatcccccaatccaggttcatgtcactctaggcaatgaagacctcacagtcaaaatgtcagaccggggtgggggagtacctttgcgcaagatagacagactatttaattacatgtactccacagccccaagaccgagagtggagacctcccgcgctgtccctctagcagggtttggatacgggctgccgataagccgcctatatgctcaatatttccagggtgacctgaagttatattcactcgaggggtacggaactgacgctgtgatttatatcaaagcgctcagcactgatagtatcgagagactccctgtgtataataaggctgcttggaagcactacaataccaatcacgaggccgacgattggtgcgtgccatctagggaaccgaaggatatgacaacttttcgttcggcatag

SEQ ID NO: 130199 - DNA, 1989 bp, Artificial Sequence
  derived and/or modified sequence
ctccttcccgctccgcgtcccgcccagcggcgcagggggccgggctccggctaggagggtgggggccgcgccggtgacagccgatccccgcccctgctgcccgccacgtccctcacgtaccactcggcagaggcgcggggaaacctggcgtactggctgtggcttctctagcgggactcggcatgaggctggcgcggctgcttcgcggagccgccttggccggcccgggcccggggctgcgcgccgccggcttcagccgcagcttcagctcggactcgggctccagcccggcgtccgagcgcggcgttccgggccaggtggacttctacgcgcgcttctcgccgtccccgctctccatgaagcagttcctggacttcggatcagtgaatgcttgtgaaaagacctcatttatgtttctgcggcaagagttgcctgtcagactggcaaatataatgaaagaaataagtctccttccagataatcttctcaggacaccatccgttcaattggtacaaagctggtatatccagagtcttcaggagcttcttgattttaaggacaaaagtgctgaggatgctaaagctatttatgactttacagatactgtgatacggatcagaaaccgacacaatgatgtcattcccacaatggcccagggtgtgattgaatacaaggagagctttggggtggatcctgtcaccagccagaatgttcagtactttttggatcgattctacatgagtcgcatttcaattagaatgttactcaatcagcactctttattgtttggtggaaaaggcaaaggaagtccatctcatcgaaaacacattggaagcataaatccaaactgcaatgtacttgaagttattaaagatggctatgaaaatgctaggcgtctgtgtgatttgtattatattaactctcccgaactagaacttgaagaactaaatgcaaaatcaccaggacagccaatacaagtggtttatgtaccatcccatctctatcacatggtgtttgaacttttcaagaatgcaatgagagccactatggaacaccatgccaacagaggtgtttacccccctattcaagttcatgtcacgctgggtaatgaggatttgactgtgaagatgagtgaccgaggaggtggcgttcctttgaggaaaattgacagacttttcaactacatgtattcaactgcaccaagacctcgtgttgagacctcccgcgcagtgcctctggctggttttggttatggattgcccatatcacgtctttacgcacaatacttccaaggagacctgaagctgtattccctagagggttacgggacagatgcagttatctacattaaggctctgtcaacagactcaatagaaagactcccagtgtataacaaagctgcctggaagcattacaacaccaaccacgaggctgatgactggtgcgtccccagcagagaacccaaagacatgacgacgttccgcagtgcctagacacacttgggacatcggaaaatccaaatgtggcttttgtattaaatttggaaggtatggtgttcagaactatattataccaagtactttatttatcgttttcacaaaactatttgagtagaataaatggaaactgaattccatttgtgcccgttaaacctcctaaaggatgaaattgcacctattttacacttatattttcacagttaattgaacatatttttaaacaactgtagttttgggcaacttttcactttgtggtagacttcagaagtgtggaaatcttcgggtttctataggaaactagttttttttttttaagaaatactttcatttatgtttgctagaaacattttctaaatgatagtgattagctggttagccatcttcctgttatttggaggagttctgccatcttttattcggtagtgacagctgtaatatggtcttcatgtttatcagtgacttgactacaagtaaagcagaaaacagttgg

SEQ ID NO: 130200 - DNA, 2987 bp, Artificial Sequence
  derived and/or modified sequence
gatccccgcccctgctgcccgccacgtccctcacgtaccactcggcagaggcgcggggaaacctggcgtactggctgtggcttctctagcgggactcggcatgaggctggcgcggctgcttcgcggagccgccttggccggcccgggcccggggctgcgcgccgccggcttcagccgcagcttcagctcggactcgggctccagcccggcgtccgagcgcggcgttccgggccaggtggacttctacgcgcgcttctcgccgtccccgctctccatgaagcagttcctggacttcggatcagtgaatgcttgtgaaaagacctcatttatgtttctgcggcaagagttgcctgtcagactggcaaatataatgaaagaaataagtctccttccagataatcttctcaggacaccatccgttcaattggtacaaagctggtatatccagagtcttcaggagcttcttgattttaaggacaaaagtgctgaggatgctaaagctatttatgactttacagatactgtgatacggatcagaaaccgacacaatgatgtcattcccacaatggcccagggtgtgattgaatacaaggagagctttggggtggatcctgtcaccagccagaatgttcagtactttttggatcgattctacatgagtcgcatttcaattagaatgttactcaatcagcactctttattgtttggtggaaaaggcaaaggaagtccatctcatcgaaaacacattggaagcataaatccaaactgcaatgtacttgaagttattaaagatggctatgaaaatgctaggcgtctgtgtgatttgtattatattaactctcccgaactagaacttgaagaactaaatgcaaaatcaccaggacagccaatacaagtggtttatgtaccatcccatctctatcacatggtgtttgaacttttcaagaatgcaatgagagccactatggaacaccatgccaacagaggtgtttacccccctattcaagttcatgtcacgctgggtaatgaggatttgactgtgaagatgagtgaccgaggaggtggcgttcctttgaggaaaattgacagacttttcaactacatgtattcaactgcaccaagacctcgtgttgagacctcccgcgcagtgcctctggctggttttggttatggattgcccatatcacgtctttacgcacaatacttccaaggagacctgaagctgtattccctagagggttacgggacagatgcagttatctacattaaggctctgtcaacagactcaatagaaagactcccagtgtataacaaagctgcctggaagcattacaacaccaaccacgaggctgatgactggtgcgtccccagcagagaacccaaagacatgacgacgttccgcagtgcctagacacacttgggacatcggaaaatccaaatgtggcttttgtattaaatttggaagtgtggcccagagttgctcagaattggagcagagcctgagacgtatctgcagatcctgtcatcagctggcaagtccaggagactgtgtcatttagagactgtgttgttagttatccctcaacatcttctaaggtggcaggaaataatattggaaataacattttaaagtaaaaattttaaagtttaaagaagagttttgccacttaaacaggggagctttgtctggaaaatacactgagttgaaacacttcatccttggaaggattatataagatgaacagttgtgataaatgtgtagattagagggatgtgaatgggcagttagtccagtgccctcatttaagaggccaagatcctgattcagaggaggcatcctttgcccagagctgcttagctaatctgaccaaatgttgggaaaaatgtctcacctaacccactattccttaattatggattttgtgaaaaacaatagaacatgttaatgagtaatttatattagttcgatgtattacaattttttagctttaaattacagttttcttataatgttgaaatgttttagaatcctttgaatctaagtatttgtttcctaaatgaaacatttgtacaacatttgatgtttttacttatgaaatattctcctcccccaagaaaatttaaactttttctctctatttaaaagctaagaaatgttttaaaggaaaaatgaaattatcttcctttagcttatttttaaggtaaaacagctttttactctgttattgtggtaatggacagaatattacatacaaaaatattctgggagagctttttcctagttggttttaaatcattgtgccacctgaaaggtttttagattttataggagctaatttgtccaccagcattaatgtaacacagtgtagttatgaaaatatattgaaggacaggaagtggacacgaagtgatttttgtaacctgagcagttaatgaatgtgccaacattttctaggaagggacagcaagaatattctgctctgtagttaaaatactggctggcttttgatgtcttcatgcttaattgtgatcactttcttgcactgtgatgtttttacgtgaatatgttgaagtagaagtctaccatattattttataaaatgttttctgtatggcaataaactgaaaacatggatcaacccttcttttgaaaataaactgagtcaatttagccttttaaaaatatagtcatctcttttaaatagaatcctcttccaccatcaaggctcaacattttgtaagcatccaaaaaattggtaattagggggcttgcactaaatttcactatcttcagtagagaggaactgtttggaacttagatttccaatgtgtatattctaatggagaaagcaagaggtagagtttgtatgtttgacttaccttagatttttattttccatacatactgcaaatgattgacttgttgcataaatgaagatcttctgttgtgtgcttttcaaacactgtaaataaatttgaaatttgaa

SEQ ID NO: 130201 - DNA, 1748 bp, Artificial Sequence
  derived and/or modified sequence
ataatatgctcctttttcaggtaaagagacggaggctcagagaggttaaacagctcactcaaaggcacagagccagtacatggcagtacatctcttctcccggggccgccgtcgcggtgatactatttagggccacacgtcccagtgttcagctttcgtatttacgtactactgtttggcaagcggggactcctgaagctctctgaccctggaaaatgcgtggcttgcgtcacagaggagcgtttctggaacgcgctcgcagcacgacaccgcggtgtgtgcaagcggaacgccgccctgtccttgagccttttggctgagattgggagggcagaggaagcaggaaggatcagtgaatgcttgtgaaaagacctcatttatgtttctgcggcaagagttgcctgtcagactggcaaatataatgaaagaaataagtctccttccagataatcttctcaggacaccatccgttcaattggtacaaagctggtatatccagagtcttcaggagcttcttgattttaaggacaaaagtgctgaggatgctaaagctatttatgactttacagatactgtgatacggatcagaaaccgacacaatgatgtcattcccacaatggcccagggtgtgattgaatacaaggagagctttggggtggatcctgtcaccagccagaatgttcagtactttttggatcgattctacatgagtcgcatttcaattagaatgttactcaatcagcactctttattgtttggtggaaaaggcaaaggaagtccatctcatcgaaaacacattggaagcataaatccaaactgcaatgtacttgaagttattaaagatggctatgaaaatgctaggcgtctgtgtgatttgtattatattaactctcccgaactagaacttgaagaactaaatgcaaaatcaccaggacagccaatacaagtggtttatgtaccatcccatctctatcacatggtgtttgaacttttcaagaatgcaatgagagccactatggaacaccatgccaacagaggtgtttacccccctattcaagttcatgtcacgctgggtaatgaggatttgactgtgaagatgagtgaccgaggaggtggcgttcctttgaggaaaattgacagacttttcaactacatgtattcaactgcaccaagacctcgtgttgagacctcccgcgcagtgcctctggctggttttggttatggattgcccatatcacgtctttacgcacaatacttccaaggagacctgaagctgtattccctagagggttacgggacagatgcagttatctacattaaggctctgtcaacagactcaatagaaagactcccagtgtataacaaagctgcctggaagcattacaacaccaaccacgaggctgatgactggtgcgtccccagcagagaacccaaagacatgacgacgttccgcagtgcctagacacacttgggacatcggaaaatccaaatgtggcttttgtattaaatttggaagattcttcagttttgggacttggactggctttccttgcccctcagcttgcagatggcctgttgtgggaccttgtgatcatgaactcctcctcccacatctgatggagctaccaatcatcagatctcctctgcctctggggtgcgtctcaggctggccaatcacgttcttcatccacgtggactatgactggccctagggagaaaacatggagatatgaatgactgtgtggagc

SEQ ID NO: 130202 - protein, 343 aa, Artificial Sequence
  derived and/or modified sequence
MKEINLLPDRVLSTPSVQLVQSWYVQSLLDIMEFLDKDPEDHRTLSQFTDALVTIRNRHNDVVPTMAQGVLEYKDTYGDDPVSNQNIQYFLDRFYLSRISIRMLINQHTLIFDGSTNPAHPKHIGSIDPNCNVSEVVKDAYDMAKLLCDKYYMASPDLEIQEINAANSKQPIHMVYVPSHLYHMLFELFKNAMRATVESHESSLILPPIKVMVALGEEDLSIKMSDRGGGVPLRKIERLFSYMYSTAPTPQPGTGGTPLAGFGYGLPISRLYAKYFQGDLQLFSMEGFGTDAVIYLKALSTDSVERLPVYNKSAWRHYQTIQEAGDWCVPSTEPKNTSTYRVS

SEQ ID NO: 130203 - protein, 407 aa, Artificial Sequence
  derived and/or modified sequence
MRWVWALLKNASLAGAPKYIEHFSKFSPSPLSMKQFLDFGSSNACEKTSFTFLRQELPVRLANIMKEINLLPDRVLSTPSVQLVQSWYVQSLLDIMEFLDKDPEDHRTLSQFTDALVTIRNRHNDVVPTMAQGVLEYKDTYGDDPVSNQNIQYFLDRFYLSRISIRMLINQHTLIFDGSTNPAHPKHIGSIDPNCNVSEVVKDAYDMAKLLCDKYYMASPDLEIQEINAANSKQPIHMVYVPSHLYHMLFELFKNAMRATVESHESSLILPPIKVMVALGEEDLSIKMSDRGGGVPLRKIERLFSYMYSTAPTPQPGTGGTPLAGFGYGLPISRLYAKYFQGDLQLFSMEGFGTDAVIYLKALSTDSVERLPVYNKSAWRHYQTIQEAGDWCVPSTEPKNTSTYRVS

SEQ ID NO: 130204 - DNA, 1224 bp, Artificial Sequence
  derived and/or modified sequence
atgagatgggtgtgggccctgctgaagaacgccagcctggccggcgcccccaagtacatcgagcacttcagcaagttcagccccagccccctgagcatgaagcagttcctggacttcggcagcagcaacgcctgcgagaagaccagcttcaccttcctgagacaggagctgcccgtgagactggccaacatcatgaaggagatcaacctgctgcccgacagagtgctgagcacccccagcgtgcagctggtgcagagctggtacgtgcagagcctgctggacatcatggagttcctggacaaggaccccgaggaccacagaaccctgagccagttcaccgacgccctggtgaccatcagaaacagacacaacgacgtggtgcccaccatggcccagggcgtgctggagtacaaggacacctacggcgacgaccccgtgagcaaccagaacatccagtacttcctggacagattctacctgagcagaatcagcatcagaatgctgatcaaccagcacaccctgatcttcgacggcagcaccaaccccgcccaccccaagcacatcggcagcatcgaccccaactgcaacgtgagcgaggtggtgaaggacgcctacgacatggccaagctgctgtgcgacaagtactacatggccagccccgacctggagatccaggagatcaacgccgccaacagcaagcagcccatccacatggtgtacgtgcccagccacctgtaccacatgctgttcgagctgttcaagaacgccatgagagccaccgtggagagccacgagagcagcctgatcctgccccccatcaaggtgatggtggccctgggcgaggaggacctgagcatcaagatgagcgacagaggcggcggcgtgcccctgagaaagatcgagagactgttcagctacatgtacagcaccgcccccaccccccagcccggcaccggcggcacccccctggccggcttcggctacggcctgcccatcagcagactgtacgccaagtacttccagggcgacctgcagctgttcagcatggagggcttcggcaccgacgccgtgatctacctgaaggccctgagcaccgacagcgtggagagactgcccgtgtacaacaagagcgcctggagacactaccagaccatccaggaggccggcgactggtgcgtgcccagcaccgagcccaagaacaccagcacctacagagtgagctag

SEQ ID NO: 130205 - DNA, 1224 bp, Artificial Sequence
  derived and/or modified sequence
atgcgatgggtgtgggcccttcttaaaaatgcttccctggcaggcgcgcccaagtacatcgaacacttttctaagttctccccaagcccattgtccatgaagcagttcctggatttcggatcctccaatgcctgcgaaaagacatctttcacctttctcaggcaagagctacctgtcagactcgctaatattatgaaggaaattaacctgctgccagacagggtgctgtctaccccaagcgtacagttggtccagagttggtacgttcagagcttgttagacattatggaattcttggacaaggatcctgaagaccatcgcacccttagccagtttacagacgccttagtgaccatcaggaacaggcacaatgacgtggttcccaccatggctcagggcgtcctggaatacaaggatacatacggggatgatcccgtatccaatcagaacatccagtacttccttgaccgcttttatttgtctagaatttcgatacggatgctgattaaccagcacaccctcatatttgacggatctactaaccccgctcaccccaaacatatcggcagtatcgatcctaattgtaatgtctctgaggtggtgaaagatgcttacgatatggccaaactgttatgtgataaatactacatggccagcccggatttggagatacaggagataaacgccgccaacagtaagcagcctattcacatggtctatgtccctagtcacttataccatatgttgtttgaactctttaagaatgcaatgcgggcaaccgtcgagagtcacgagtcctcattaatcctgcccccaatcaaggtgatggtggccctcggagaggaagacctgtctattaaaatgagcgatcgtggggggggagtgcctctcaggaaaatagaaaggctgttcagttacatgtactccacagcaccaactccccagcccggcacaggaggcactccccttgctgggttcggctatggcctgccaatctccaggttatacgctaaatatttccagggggatctccagctgttcagcatggagggcttcgggacagatgcagtgatatacctgaaggctcttagcaccgactccgtcgaaagacttcccgtgtataacaagtcagcttggagacattatcagaccatccaggaggccggggactggtgcgtcccaagtactgagccgaagaacacaagcacttaccgcgtaagttag

SEQ ID NO: 130206 - DNA, 1224 bp, Artificial Sequence
  derived and/or modified sequence
atgcgctgggtgtgggccctgctgaagaatgccagcctggccggggcccccaagtacatcgagcacttcagcaagttcagccccagccccctgtccatgaagcagttcctggactttggcagcagcaatgcctgtgagaagaccagcttcaccttcctgcggcaggagctgcctgtgcggctggccaacatcatgaaggagatcaacctgctgcctgacagagtgctgagcacccccagcgtgcagctggtgcagagctggtacgtgcagagcctgctggacatcatggagttcctggacaaggaccctgaggaccacaggaccctgagccagttcacagatgccctggtgaccatccggaacagacacaatgatgtggtgcccaccatggcccagggcgtgctggagtacaaggacacctatggagatgatcctgtgagcaaccagaacatccagtacttcctggaccgcttctacctgagccgcatcagcatccgcatgctgatcaaccagcacaccctcatctttgatggcagcaccaacccagcccaccccaagcacatcggcagcattgaccccaactgcaatgtgtctgaggtggtgaaggatgcctatgacatggccaagctgctgtgtgacaagtactacatggccagcccagacctggagatccaggagatcaatgctgccaacagcaagcagcccatccacatggtgtatgtgcccagccacctgtaccacatgctgtttgagctgttcaagaatgccatgagggccaccgtggagagccatgagagcagcctcatcctgccccccatcaaggtgatggtggccctgggggaggaggacctgagcatcaagatgtctgaccggggcggcggcgtgcccctgaggaagattgaaagactcttctcctacatgtacagcacagcccccaccccccagcccggcaccggcggcacccccctggccggcttcggctacggcctgcccatcagccggctgtatgccaagtacttccagggcgacctgcagctgttctccatggagggcttcggcacagatgctgtgatctacctgaaggccctgagcacagattctgtggagcggctgcctgtgtacaacaagagcgcctggaggcactaccagaccatccaggaggccggggactggtgtgtgcccagcacagagcccaagaacaccagcacctacagagtgtcctag

SEQ ID NO: 130207 - DNA, 1224 bp, Artificial Sequence
  derived and/or modified sequence
atgcggtgggtgtgggccctgctgaagaacgccagcctggccggcgcaccgaagtacatcgagcacttctcaaagttctctccgtcccctttgtccatgaagcagtttttagactttgggtcctcaaacgcttgtgaaaaaacaagttttacatttttgcgacaggagctgccagtgcgattggccaacataatgaaagaaatcaatctcctccctgatcgagttctgagtacaccttccgtgcagctcgtgcaatcttggtacgtgcagtcccttttggacataatggagtttcttgacaaggaccccgaagatcaccgcacactgagccagttcacggacgcgctggtgactatacggaaccggcataatgatgtcgtccccacgatggcacagggggttcttgaatataaagacacttacggcgatgacccagtcagcaaccaaaatatccaatattttctggaccgattctacctctcgcgcatctccatccgaatgctgattaaccagcacacactcatttttgacgggtccacaaaccccgcacaccctaaacacatcggaagcatagaccccaactgcaacgtttcagaggtagtcaaagatgcatatgacatggcaaagctgctatgcgacaagtattatatggccagtccggatctcgagattcaggagattaacgctgccaatagcaaacagcctattcatatggtatacgtccctagccacctctatcacatgttgtttgaactctttaaaaacgctatgcgcgccactgtagaatcacatgagagctcactgatcctacctcctatcaaagtaatggttgctttgggagaggaggacctcagcataaagatgtctgatcggggaggcggcgtccccctgcggaaaattgagaggctgttcagctacatgtatagtactgctcccactcctcagcccggtacggggggaacccccctggccggcttcggatacggacttcctatctcgcgactatatgcaaaatatttccaaggcgatttacagctcttttctatggaagggttcggtaccgacgccgtgatctacttgaaggcactgtcaacagacagcgtcgaacggctgcctgtttacaataagagcgcttggagacattaccagacaattcaagaggctggggactggtgtgtgccttctaccgagcccaagaataccagcacttacagagtgagctag

SEQ ID NO: 130208 - DNA, 1224 bp, Artificial Sequence
  derived and/or modified sequence
atgcgttgggtgtgggcgctactgaagaatgcttctcttgccggagccccaaaatacatagagcacttctcaaagttcagtccgagccctctgtcgatgaagcagttccttgattttggatccagcaatgcgtgtgagaaaacttctttcactttcctccgccaggaattgccagtaagactggctaatatcatgaaggagattaacctccttcccgatagggtgctctcaacaccaagcgtccagttggttcagtcatggtatgtccaatctctgctggacatcatggagttccttgacaaagatcctgaggaccaccggacactaagccaatttaccgatgcgctggtgacgattcgaaaccgtcataatgacgttgtgcccaccatggcccaaggagtgttagagtataaagatacctatggggacgatccggtcagtaaccaaaacatccagtacttcctggaccgtttttaccttagcagaatatctatccgcatgctgatcaaccagcacacactgatctttgacggttctacaaatcccgctcatccaaagcacattggctctatcgatcccaactgcaatgtgagtgaggtggtcaaggatgcctacgacatggctaagctgctttgcgataagtactatatggcctccccagacctggagatccaggagatcaatgccgctaacagcaagcaacctatccacatggtctacgttccgagtcacctttatcatatgctctttgaattatttaaaaatgccatgagggctaccgtagagtctcatgagagcagtctgatcttacccccaattaaggtgatggtggcgttgggagaggaagacctttccattaagatgagcgaccgcggtggaggcgtgccattaaggaaaatcgagaggctcttctcgtatatgtattctactgcccctaccccacaaccagggacaggcggtactccactagcgggatttggctatgggctgcccatctctcgattatacgctaaatatttccagggagatctccaacttttttcaatggagggattcggtaccgatgcagtgatctacctgaaggccctgagtaccgatagcgtagagaggctgccagtgtataataaatcagcctggagacactaccagactatccaggaagcgggagactggtgtgtcccctccacggagccaaaaaatacaagcacctatcgggttagctag

SEQ ID NO: 130209 - DNA, 2384 bp, Artificial Sequence
  derived and/or modified sequence
cttttcctgagccgcttggatctttgtggaagcgggtgggctgcatatatacaggacggattcgtataggcttgcaccctggttccgaattttgcaaatattcgcagtctgggtcactgtcatccggactgggaatccccaagacccgttaagggaggatagaaggagctggaccctagctgccccagtgggcaaggacacttgaagatcaaatctgttccggcctggcagcctctccccagctgggcaggggccccaggcaccgtgatgtggagtcaagccgcctatacctcccttggctgccccagggctgctaggatccagcaatgcctgtgagaaaacctccttcaccttcctcaggcaggagctgcctgtgcgcctggccaacatcatgaaagagatcaacctgcttcccgaccgagtgctgagcacaccctccgtgcagctggtgcagagctggtatgtccagagcctcctggacatcatggagttcctggacaaggatcccgaggaccatcgcaccctgagccagttcactgacgccctggtcaccatccggaaccggcacaacgacgtggtgcccaccatggcacaaggcgtgcttgagtacaaggacacctacggcgatgaccccgtctccaaccagaacatccagtacttcctggaccgcttctacctcagccgcatctccatccgcatgctcatcaaccagcacaccctcatctttgatggcagcaccaacccagcccatcccaaacacatcggcagcatcgaccccaactgcaacgtctctgaggtggtcaaagatgcctacgacatggctaagctcctgtgtgacaagtattacatggcctcacctgacctggagatccaggagatcaatgcagccaactccaaacagccgattcacatggtctacgtcccctcccacctctaccacatgctctttgagctcttcaagaatgccatgagggcgactgtggaaagccatgagtccagcctcattctcccacccatcaaggtcatggtggccttgggtgaggaagatctgtccatcaagatgagtgaccgaggtgggggtgttcccttgaggaagattgagcgactcttcagctacatgtactccacagcacccaccccccagcctggcaccgggggaacgccgctggctggctttggttatgggctccccatttcccgcctctacgccaagtacttccagggagacctgcagctcttctccatggaaggctttgggaccgatgctgtcatctatctcaaggccctgtccacggactcggtggagcgcctgcctgtctacaacaagtcagcctggcgccactaccagaccatccaggaggccggcgactggtgtgtgcccagcacggagcccaagaacacgtccacgtaccgcgtcagctaagggccgccgtgcatctgcacctgagaggacggactgccgcctctgggtccccccaccgtggtgcccctcaccatcctcctgggggagcagggggtgggttctccctgatgaccaggttctgtctctatggaagtcactgcggtgataggtctgtgatggtccctaagtgccagtccatctctgtggagacccctcggtggcctccctatctctgtgggcgatgcctgagggttagggatgtctccaccctgatggggtgtcccagagacattttcccatggcagtcctcctctctgagaccagggctgtcacttttctgccaggggtactgggtccccctcagcaccctccacagcacaggccttccaagtggatgtcccgttgccttattcccccagcccacaaaggcaccctggccttggcctgctgaagtgttaggaagagggtgggtgccctccagacctggggactgagtggggaaaggagttacacccgtgagtggggaatgaggctggtcctgcagcctctccctccgctcagggcttgaaggtcggtggcggagggggtggctctcacagggcccaactctaaagtggaagaaccttgttagaccgagagcttgccatccagccaagctgctcgaggccctgcagtggccttggcaatgtctgtgccacctcctgagccctcccagcatgtcctcacatgctcatgcccacccgctcctccacaagcctagtccatcctgcctgagctccagcccccagcccccactgtgcccagacatgtgtgctcagggtggctttctccctaggaccttctgtgtatatagttagttttataaccctgaatgcccccacccttcccctaagcacacaggggttaaagctgtgtgtccctcccagtggctgtggcagtgacagtgacacccacacccacagtaaagaggagactgaatgag

SEQ ID NO: 130210 - DNA, 3440 bp, Artificial Sequence
  derived and/or modified sequence
attggcgacgtcgaggcgccatgacgagccgattggctgggcgttggaatgcccgccagggcaagggtagggaggaggcggccgaaccgcgtcgctgggccgaaaggtgcgcgagcgctgcccgcgcggggaccacaaccaaagtcgcggccgccgcagccatgcgctgggtgtgggcgctgctgaagaatgcgtccctggcaggggcgcccaagtacatagagcacttcagcaagttctccccgtccccgctgtccatgaagcagtttctggacttcggatccagcaatgcctgtgagaaaacctccttcaccttcctcaggcaggagctgcctgtgcgcctggccaacatcatgaaagagatcaacctgcttcccgaccgagtgctgagcacaccctccgtgcagctggtgcagagctggtatgtccagagcctcctggacatcatggagttcctggacaaggatcccgaggaccatcgcaccctgagccagttcactgacgccctggtcaccatccggaaccggcacaacgacgtggtgcccaccatggcacaaggcgtgcttgagtacaaggacacctacggcgatgaccccgtctccaaccagaacatccagtacttcctggaccgcttctacctcagccgcatctccatccgcatgctcatcaaccagcacaccctcatctttgatggcagcaccaacccagcccatcccaaacacatcggcagcatcgaccccaactgcaacgtctctgaggtggtcaaagatgcctacgacatggctaagctcctgtgtgacaagtattacatggcctcacctgacctggagatccaggagatcaatgcagccaactccaaacagccgattcacatggtctacgtcccctcccacctctaccacatgctctttgagctcttcaagaatgccatgagggcgactgtggaaagccatgagtccagcctcattctcccacccatcaaggtcatggtggccttgggtgaggaagatctgtccatcaagatgagtgaccgaggtgggggtgttcccttgaggaagattgagcgactcttcagctacatgtactccacagcacccaccccccagcctggcaccgggggaacgccgctggctggctttggttatgggctccccatttcccgcctctacgccaagtacttccagggagacctgcagctcttctccatggaaggctttgggaccgatgctgtcatctatctcaaggccctgtccacggactcggtggagcgcctgcctgtctacaacaagtcagcctggcgccactaccagaccatccaggaggccggcgactggtgtgtgcccagcacggagcccaagaacacgtccacgtaccgcgtcagctaagggccgccgtgcatctgcacctgagaggacggactgccgcctctgggtccccccaccgtggtgcccctcaccatcctcctgggggagcagggggtgggttctccctgatgaccaggttctgtctctatggaagtcactgcggtgataggtctgtgatggtccctaagtgccagtccatctctgtggagacccctcggtggcctccctatctctgtgggcgatgcctgagggttagggatgtctccaccctgatggggtgtcccagagacattttcccatggcagtcctcctctctgagaccagggctgtcacttttctgccaggggtactgggtccccctcagcaccctccacagcacaggccttccaagtggatgtcccgttgccttattcccccagcccacaaaggcaccctggccttggcctgctgaagtgttaggaagagggtgggtgccctccagacctggggactgagtggggaaaggagttacacccgtgagtggggaatgaggctggtcctgcagcctctccctccgctcagggcttgaaggtcggtggcggagggggtggctctcacagggcccaactctaaagtggaagaaccttgttagaccgagagcttgccatccagccaagctgctcgaggccctgcagtggccttggcaatgtctgtgccacctcctgagccctcccagcatgtcctcacatgctcatgcccacccgctcctccacaagcctagtccatcctgcctgagctccagcccccagcccccactgtgcccagacatgtgtgctcagggtggctttctccctaggaccttctgtgtatatagttagttttataaccctgaatgcccccacccttcccctaagcacacaggggttaaagctgtgtgtccctcccagtggctgtggcagtgacagtgacacccacacccacagtaaagaggagactgaatgagactggcctggctgcatccctgggggaggggacccacacgtgcgcacgtacacacgcacactgcggtgccctgtgaccaccacatgacgcaccggggacgtccggcccagctcaggactgtgagtaaaacactgggcaaagccatctgttcagaacgccggatggcccagcacctggtgacagacctgttgtcccaccatactcagggcccagcagagtccggccaacccaacaactggagcagacagaaattctggtcactggcacatcataaggatttattgaaataaattgagaactgcctccccttcacatgcaggtgggcacccactatagctactgatggctttaaggatgtgggtgccttccaacctcccatggccctgccaccaggcccagatggtgccagtgtcctcatatctgtttccctccgaagcccctctcccagcacagatagcagaggggggataagggctgagtcccaggtacagggtgctggccgtaagccacagcccctgggcaggaatgagggagccagcatgcattggtgccatctgccgctctgtctgggcagatgggaggagctggaggggtttccaagcgggagcccccaggcctcatcggtaactctgaccagtgtcctggaagcgggactagctgctgaccagcgccacacatgaacacttcctccaaggacatttcctaaaaaggacacatgctgtccccaggctgctggtaaactccacccccatccagggagctggccccagccctcagtgtggcccagggaagcagagcttgcaccgcctgccagttctgagcccactgattccctgacaatgcctggggcagatgggggagggctgatgaacctttccaatctcgtagctgccggggacccccaggttttgcctctctgcctggctggggtgagggctgaccaggtcagcagctcctaggccttggctggtggaagtggtgtcctctgtccctatcagttcctgtttgctcagctcccaaagaggacttaggtgccctctgaggaagcagcaggaagtgaagggagtcctggcttggagaatgggtcaaagacca

SEQ ID NO: 130211 - protein, 411 aa, Artificial Sequence
  derived and/or modified sequence
MKAARFVLRSAGSLNGAGLVPREVEHFSRYSPSPLSMKQLLDFGSENACERTSFAFLRQELPVRLANILKEIDILPTQLVNTSSVQLVKSWYIQSLMDLVEFHEKSPDDQKALSDFVDTLIKVRNRHHNVVPTMAQGIIEYKDACTVDPVTNQNLQYFLDRFYMNRISTRMLMNQHILIFSDSQTGNPSHIGSIDPNCDVVAVVQDAFECSRMLCDQYYLSSPELKLTQVNGKFPDQPIHIVYVPSHLHHMLFELFKNAMRATVEHQENQPSLTPIEVIVVLGKEDLTIKISDRGGGVPLRIIDRLFSYTYSTAPTPVMDNSRNAPLAGFGYGLPISRLYAKYFQGDLNLYSLSGYGTDAIIYLKALSSESIEKLPVFNKSAFKHYQMSSEADDWCIPSREPKNLAKEVAM

SEQ ID NO: 130212 - protein, 375 aa, Artificial Sequence
  derived and/or modified sequence
MKQLLDFGSENACERTSFAFLRQELPVRLANILKEIDILPTQLVNTSSVQLVKSWYIQSLMDLVEFHEKSPDDQKALSDFVDTLIKVRNRHHNVVPTMAQGIIEYKDACTVDPVTNQNLQYFLDRFYMNRISTRMLMNQHILIFSDSQTGNPSHIGSIDPNCDVVAVVQDAFECSRMLCDQYYLSSPELKLTQVNGKFPDQPIHIVYVPSHLHHMLFELFKNAMRATVEHQENQPSLTPIEVIVVLGKEDLTIKISDRGGGVPLRIIDRLFSYTYSTAPTPVMDNSRNAPLAGFGYGLPISRLYAKYFQGDLNLYSLSGYGTDAIIYLKALSSESIEKLPVFNKSAFKHYQMSSEADDWCIPSREPKNLAKEVAM

SEQ ID NO: 130213 - DNA, 1236 bp, Artificial Sequence
  derived and/or modified sequence
atgaaggccgccagatttgtccttcggtcagccgggtccctgaatggggctggcctggtccctagagaagtcgaacatttttcaaggtattccccatctcctctctctatgaaacaactccttgacttcggctctgaaaatgcctgcgagcgtacctcatttgcctttctgaggcaggagctaccggttcgtctggccaatatattaaaagaaatcgacatcctgccaacacagctggtaaacaccagttctgttcagttagtgaagtcctggtacatccagtccctgatggatctcgttgagttccatgagaaatcccctgatgaccaaaaggctcttagtgacttcgtcgatactctgataaaggtgaggaatcgccatcacaacgtggtacctaccatggcacaagggattatcgaatacaaggatgcctgtaccgtggaccccgtgaccaatcaaaacctgcagtacttccttgacagattctatatgaatcggatctcaactagaatgctgatgaatcaacatatcctcattttctcggattctcaaacaggcaaccctagccatatcggaagcattgaccctaactgtgatgtggtggctgttgtgcaggatgcctttgaatgcagcagaatgctgtgtgatcagtattatctgtcatctcccgagctgaaactgacccaagtaaatgggaaattcccggatcagcctatccacatcgtgtatgtgccgtcacatctccatcatatgttatttgaactctttaaaaatgcaatgagagccaccgtggaacatcaggagaatcaacccagcctgaccccaattgaagtcatcgtggtattgggcaaagaggacctcaccatcaaaatctcagatagaggcggcggtgtaccgctgcgaattatagacagactgtttagctacacatactcaaccgcgcccacccctgtaatggacaattctagaaatgcgccactggccggcttcggttatggactgcccattagccgcctgtacgccaaatacttccagggagatctgaacctttactctttaagcggctacggcaccgatgctattatctacttaaaggcgctctcttcggaatctatcgagaagctgccggtttttaacaaatctgcctttaaacattaccagatgtccagcgaggctgacgactggtgcatcccgtcaagagagccgaagaacctggcgaaagaggtggccatgtag

SEQ ID NO: 130214 - DNA, 1128 bp, Artificial Sequence
  derived and/or modified sequence
atgaagcagttgttggacttcggaagtgaaaacgcatgtgagagaactagctttgcttttttaagacaggagctccccgttagattagccaacatcttaaaggagatagatatcctgccgacacagctagtgaatacctcttcggtgcaactcgtaaagagctggtatatccagtctttgatggacctcgtggaatttcatgagaaatcccctgatgaccagaaggcactcagcgattttgtagacacgctcatcaaggtgcgaaatcgtcaccacaacgtagtccccaccatggctcaggggattatagaatacaaagatgcatgtactgtggaccctgtcacgaatcagaacctccagtattttctggatcgcttttacatgaaccgaatatcaacacgcatgttgatgaatcagcacatcctgattttctctgactcccagactgggaatccttcacacatcggatctatagatcctaattgcgacgtagtggcagtggtgcaggacgcatttgagtgctctcgtatgctttgcgatcagtactacctctcatctccagaactgaagctgactcaggtcaacggtaaattccctgaccaaccaatccacattgtgtatgtcccctctcacttgcaccacatgctcttcgagctgtttaaaaacgctatgcgtgctacggtcgagcaccaggaaaaccagccttcactgaccccgattgaagtgatagtggttttgggaaaggaggacctgacaatcaaaatttccgaccgaggtggaggagttccattgcgtataattgacagactctttagttacacatatagtaccgcaccaacgcccgtgatggacaatagccggaacgctccattggctgggttcgggtatggactcccaatatcaagattgtacgcaaagtatttccagggggatttgaacctgtatagcctgtcagggtacggcactgatgctattatctatctgaaagccttgtcctctgaatctatagagaagctgcctgtgttcaacaagtcagccttcaaacattatcaaatgagttcagaggccgatgactggtgtattccttccagagaaccaaagaatttggcaaaggaggtggctatgtag

SEQ ID NO: 130215 - DNA, 1236 bp, Artificial Sequence
  derived and/or modified sequence
atgaaggccgccaggtttgtgctgcggtctgctggcagcctgaatggagctggcctggtgccccgggaggtggagcacttcagccgctacagccccagccccctgtccatgaagcagctgctggactttggaagtgaaaatgcctgtgagaggaccagctttgccttcctgcggcaggagctgcctgtgcggctggccaacatcctgaaggagattgacatcctgcccacccagctggtgaacaccagctctgtgcagctggtgaagtcctggtacatccagagcctgatggacctggtggagttccacgagaagagcccagatgaccagaaggccctgagtgactttgtggacaccctcatcaaggtgaggaacagacaccacaacgtggtgcccaccatggcccagggcatcatcgagtacaaggatgcctgcaccgtggaccctgtgaccaaccagaacctgcagtacttcctggaccgcttctacatgaaccgcatcagcaccaggatgctgatgaaccagcacatcctgatcttcagtgacagccagacaggcaaccccagccacatcggcagcattgaccccaactgtgatgtggtggccgtggtgcaggatgcctttgaatgttccaggatgctgtgtgaccagtactacctgagcagccctgagctgaagctgacccaggtgaatggcaagttcccagaccagcccatccacatcgtgtatgtgcccagccacctgcaccacatgctgtttgagctgttcaagaatgccatgagggccaccgtggagcaccaggagaaccagcccagcctgacccccatcgaggtgattgtggtgctgggcaaggaggacctgaccatcaagatcagtgacagaggaggaggagtgcccctgcgcatcatcgacaggctcttctcctacacctacagcacagcccccacccctgtgatggacaacagcagaaatgcccccctggccggcttcggctacggcctgcccatcagccggctgtatgccaagtacttccagggcgacctgaacctgtacagcctgagcggctacggcacagatgccatcatctacctgaaggccctgagcagcgagagcattgagaagctgcccgtcttcaacaagagcgccttcaagcactaccagatgagcagcgaggctgatgactggtgcatccccagccgggagcccaagaacctggccaaggaggtggccatgtag

SEQ ID NO: 130216 - DNA, 1128 bp, Artificial Sequence
  derived and/or modified sequence
atgaagcagctgctggactttggaagtgaaaatgcctgtgagaggaccagctttgccttcctgcggcaggagctgcctgtgcggctggccaacatcctgaaggagattgacatcctgcccacccagctggtgaacaccagctctgtgcagctggtgaagtcctggtacatccagagcctgatggacctggtggagttccacgagaagagcccagatgaccagaaggccctgagtgactttgtggacaccctcatcaaggtgaggaacagacaccacaacgtggtgcccaccatggcccagggcatcatcgagtacaaggatgcctgcaccgtggaccctgtgaccaaccagaacctgcagtacttcctggaccgcttctacatgaaccgcatcagcaccaggatgctgatgaaccagcacatcctgatcttcagtgacagccagacaggcaaccccagccacatcggcagcattgaccccaactgtgatgtggtggccgtggtgcaggatgcctttgaatgttccaggatgctgtgtgaccagtactacctgagcagccctgagctgaagctgacccaggtgaatggcaagttcccagaccagcccatccacatcgtgtatgtgcccagccacctgcaccacatgctgtttgagctgttcaagaatgccatgagggccaccgtggagcaccaggagaaccagcccagcctgacccccatcgaggtgattgtggtgctgggcaaggaggacctgaccatcaagatcagtgacagaggaggaggagtgcccctgcgcatcatcgacaggctcttctcctacacctacagcacagcccccacccctgtgatggacaacagcagaaatgcccccctggccggcttcggctacggcctgcccatcagccggctgtatgccaagtacttccagggcgacctgaacctgtacagcctgagcggctacggcacagatgccatcatctacctgaaggccctgagcagcgagagcattgagaagctgcccgtcttcaacaagagcgccttcaagcactaccagatgagcagcgaggctgatgactggtgcatccccagccgggagcccaagaacctggccaaggaggtggccatgtag

SEQ ID NO: 130217 - DNA, 1236 bp, Artificial Sequence
  derived and/or modified sequence
atgaaggccgcccggttcgtgctgcggagcgccggcagcctgaacggggctgggctggttcctcgcgaggtggaacatttcagtagatacagcccttctccactgtcaatgaagcagctcctggattttggctccgaaaacgcatgcgaacgtacatcattcgcctttctgaggcaggagctccccgtgaggttagctaacatccttaaggagatcgacatcctcccgacacagctggtgaatacgtccagcgtgcagctcgtaaaatcctggtatatccagtcactcatggaccttgttgaattccacgagaaaagtcctgacgaccagaaggcgttgtcagacttcgtcgatacgctgattaaagtccggaacagacatcataatgttgtgccaacaatggcccaggggattatcgaatacaaagacgcctgtactgtggacccagtgacaaaccaaaatttgcagtatttcctggatagattctatatgaacaggatcagtacacgcatgctgatgaaccagcacattctcatcttttctgattcccagacaggcaacccttcacacattggctccatcgaccctaactgcgacgttgtggcagttgtacaggacgccttcgaatgtagtcggatgttatgcgaccagtattatttgtcctcccccgagctcaagctgacacaggtgaatggcaagttccccgatcagcccatccacatcgtgtacgtccctagtcacctgcaccacatgctgttcgagctgttcaagaacgccatgagagctactgtggaacaccaggaaaaccagccatctttgacaccaattgaggtcatcgtagtcctggggaaagaggatttaacgatcaaaatctccgataggggcggcggggtacctctaagaatcattgatcggttattcagctatacctacagcaccgccccaaccccagtgatggataactcccgaaatgctcctctcgccggctttggttacgggcttccgatttcacggttatacgccaaatattttcagggtgatctgaacctctactctctatccggatacggcactgacgcaatcatttatttgaaggcactgtccagtgaaagtatcgagaaactacctgtttttaacaaatccgcgtttaagcactatcagatgagcagcgaagccgacgattggtgcatcccctcaagagaaccaaaaaacctggccaaagaagtagcaatgtag

SEQ ID NO: 130218 - DNA, 1128 bp, Artificial Sequence
  derived and/or modified sequence
atgaagcagctgctggacttcggcagcgagaacgcctgcgagcggacatccttcgccttcctgcgccaagagctcccagtccgcctcgctaacatcctgaaggagatcgatatcctcccaactcaactggtgaacacttcaagcgtgcaattggtgaaaagttggtatattcagagtctaatggacctggttgaattccacgagaagtctcctgacgaccagaaggccctgtccgattttgtcgacaccttaatcaaagtgcggaaccggcaccacaatgtggtgccaactatggctcaaggcatcatagagtacaaagatgcctgcactgtcgaccccgtcactaatcagaatttgcagtactttctggacagattctacatgaatcgcatctctacccgcatgcttatgaaccaacatatactcatctttagtgacagtcagaccgggaatccttctcacattggttctatcgatccaaactgcgacgtcgtagccgtggtacaggacgcgtttgaatgctcacgaatgctgtgcgatcagtattatctatccagtccagagctgaaattaactcaagtgaatgggaaatttcccgatcagccgatccacattgtgtatgtgccctctcacctacaccacatgctattcgaactgttcaagaacgccatgcgggctaccgtcgagcaccaagagaatcaaccgtccctgaccccgatcgaggtgatcgttgtgctgggcaaggaggacctcacaattaagatctcggatcggggtggcggggttcctcttcgcattatcgatcgactcttctcctacacatattctaccgcccccaccccggtgatggataactcacgcaatgctcctctagcgggattcggttatgggctgcctatttcaagactgtacgcaaaatactttcagggagatctgaacctgtacagcctgagcggttacggcacagacgctatcatttacttgaaagcccttagcagcgagagtatcgagaagctgccggtgttcaataaatcagccttcaaacactaccagatgagctctgaggctgatgactggtgcatccctagccgagaacccaagaacctggccaaagaggttgcaatgtag

SEQ ID NO: 130219 - DNA, 1236 bp, Artificial Sequence
  derived and/or modified sequence
atgaaagccgctaggtttgtgctgcgcagtgccggtagcctgaatggagccggtctcgttcctcgggaagtcgagcatttctccagatacagtcctagtccactaagtatgaaacagctgctggatttcgggtccgagaatgcatgcgagagaacgagctttgcatttttgcggcaggagctccccgtccgactagccaacattctgaaagagatcgacatcctacctacccaactggtcaacacatcctcagtccaactagtaaagtcctggtatatacagtccctgatggacctcgtggaatttcacgagaagtctccagacgaccagaaggctctgtccgacttcgtggataccttaataaaagtcaggaaccgtcatcacaacgttgtcccgacaatggctcagggtatcatcgagtataaagacgcctgcactgtggatccagtgacaaaccaaaatctgcagtattttctggacagattctacatgaacaggataagcacccggatgctgatgaaccaacatatattaatcttcagcgactcccagaccggaaatccaagtcacattgggtcgatagacccaaactgtgacgtcgtagctgtcgtgcaagacgcgttcgaatgttcacgtatgctgtgcgaccagtactacctatcatctcccgaactcaaactgacccaggttaacggcaaatttccggaccagccaatccatatcgtgtacgtcccatcccatcttcatcacatgctctttgagttgtttaaaaacgctatgcgcgcaaccgtggagcaccaggagaatcaaccttccctcactccaatcgaagtgatcgtagtcctcggcaaggaggacctaactatcaagataagcgatcgagggggaggggtgcccttgaggatcattgatagactattctcttacacctacagtaccgcgcctacacctgtgatggacaattcaagaaacgcacctctggccggttttggctatggactcccaatcagtcggttgtacgccaagtactttcaaggcgacctgaacctgtactccctgtcaggctatggcaccgatgctattatctatctcaaagcactgagttctgaaagtatcgaaaaactgcccgtgtttaacaagtccgctttcaaacactaccagatgagctctgaggcagacgactggtgtatcccatctcgagaaccaaaaaatctcgctaaggaggtagcgatgtag

SEQ ID NO: 130220 - DNA, 1128 bp, Artificial Sequence
  derived and/or modified sequence
atgaagcagcttctcgattttggctcagaaaacgcttgtgagcgcactagcttcgcctttctgagacaggagttgcctgtccgccttgctaacattctcaaagaaatcgatattctgccaacacagctcgtgaatacaagctctgttcagctggtcaaatcatggtatattcagtcactgatggacctggttgagttccacgagaagagccccgacgaccagaaggccctgtctgacttcgtcgatacgttgatcaaggtgcgcaaccggcatcacaatgtggtgccaacaatggcacagggaatcatcgagtacaaagacgcgtgtactgtggaccccgtgactaaccagaatctacagtatttcctggataggttttacatgaatcgtatttccacacgcatgctgatgaatcagcacatcttaatcttttccgacagtcagaccggtaatccgagtcatataggcagtattgacccgaattgcgatgttgtggctgtcgtgcaggatgcatttgagtgtagccggatgttgtgtgaccagtattaccttagtagtcccgaactgaagttaactcaggtcaacgggaagttcccggatcaaccaattcatattgtatatgtgccttctcatctgcaccacatgttgtttgagctgttcaaaaacgcgatgcgggcaactgtcgagcatcaggagaatcaaccttctctgactcccattgaggtcatcgtggtactgggcaaggaagatttgacaattaagatatctgaccgcggagggggtgtccctctgaggataatagatcgtttattttcctacacttattctaccgcacccacccctgtcatggacaactcacggaacgcacctctcgctggattcggatatggactgcccatttctaggttgtacgccaaatatttccagggcgaccttaacctctactcgctgtctggatacggcacggacgcaataatctacctgaaggccttatcttcagaatccatcgaaaaattgccagtctttaataaatcagccttcaaacactaccagatgagttctgaagccgacgattggtgtatcccctctagggagcctaaaaatctggcgaaagaggtcgcaatgtag

SEQ ID NO: 130221 - DNA, 1236 bp, Artificial Sequence
  derived and/or modified sequence
atgaaggccgctagatttgtcttacgcagtgcagggtcgttgaacggagcagggctggtgcctagggaggtggagcactttagcagatattccccgtctccgctgagcatgaagcagcttttagacttcggtagcgagaatgcatgcgagcggacatcttttgcgttcttaaggcaggaactgcccgtgaggctcgccaatatcttaaaggaaatcgacatattgccaactcagctggtcaacacctccagtgtgcagctggtaaagtcctggtacatccagagcttgatggaccttgtcgagttccacgaaaagagtcctgacgatcagaaagcgctgtccgatttcgtagatacccttataaaagtccgaaacaggcatcacaacgtcgtacccactatggctcagggaattatcgagtacaaggatgcctgcactgtcgatcccgttaccaatcaaaacctccagtacttcctcgatcgtttttatatgaaccgaatttccacacggatgttgatgaatcagcatatcctcatttttagcgattctcagaccggtaaccccagtcatataggatcaatcgatccaaactgcgatgttgtggctgtagtccaagacgcgtttgaatgttctcgtatgctgtgtgaccaatactatctgtcaagtcccgagctgaaactgacccaagttaacgggaagtttcctgaccagccaatccatatcgtgtatgtaccgagccaccttcaccatatgctatttgagctgttcaagaatgccatgcgcgccaccgtggaacaccaggagaaccaacctagtctcacacccatagaggtaattgtggttttgggcaaagaagatctaactatcaaaattagcgataggggcgggggcgtgccactgcggattattgatcgcttgttctcttacacatacagcactgctcctactcccgtcatggacaattcgagaaatgcacctttggcgggcttcggatatgggctccccatttctaggctgtatgcaaaatattttcagggagatctcaacttatactcactcagcggctacggtaccgatgccataatctatctcaaggcattgagtagtgagtccatcgaaaagttgcccgtttttaataaaagcgccttcaaacattaccaaatgagctcagaggcagacgattggtgtattccaagtagagagcctaagaatcttgcaaaggaagttgctatgtag

SEQ ID NO: 130222 - DNA, 1236 bp, Artificial Sequence
  derived and/or modified sequence
atgaaggccgcccgtttcgtactccgaagcgccgggagtctgaatggtgcaggactcgttcctcgcgaggtggagcatttctctcgttactcgccatcccccctctccatgaaacaattgcttgattttggtagtgaaaatgcctgcgagagaacctcatttgccttccttagacaagagctacccgtccggctggccaacatccttaaagagattgatatattgcccacccagctagtgaacacttcttccgtgcagctggtgaaatcatggtacatccaaagcctgatggacctggtggagttccacgaaaagtccccagacgaccaaaaggccctaagcgattttgttgacacgttgattaaggttagaaatcgccatcataatgtagttcccactatggcacaaggtattatcgagtataaggatgcttgcaccgttgacccagttacaaaccagaaccttcagtattttctcgatcgattttacatgaataggatcagcacgagaatgctgatgaatcagcacatcctgatcttttccgactcacagacaggcaacccctcccacatcggttctatcgatcctaattgcgacgtcgtggctgtggtgcaggacgctttcgagtgctcccggatgctttgtgatcaatactacctgtccagccctgagcttaaactaacacaggtcaacggcaaatttccagatcagcctatccatatcgtttatgtaccctcccatctacatcatatgttatttgagttatttaaaaacgccatgcgggcaaccgtggagcatcaggaaaaccagcccagcttaacccctatcgaggtgatcgtcgtccttggaaaagaggatcttactataaaaattagcgacagaggcggaggcgtgcccttgaggataattgacaggctcttttcttacacatactctactgctcccactcccgtcatggataattcccggaacgctcctctggctggatttggatatggactgccaatctctagactgtacgcaaaatatttccaaggggatctcaacctttattctctcagcggctacggcacagatgccattatctacctcaaagccttaagttccgaatctattgagaagctaccagtgttcaataagtccgcattcaagcactatcaaatgtctagcgaagcggatgattggtgtataccaagcagggaacccaaaaatctcgcgaaggaagtagccatgtag

SEQ ID NO: 130223 - DNA, 3576 bp, Artificial Sequence
  derived and/or modified sequence
actgcatctccgactctgcccagactcttcactccgcggcaccctcaaaccccagcccaggccggggcgcacaagccagccagcgcacctgcagtcctcgcccggacgcgccgcgccccctcggaaccaggctctgctccgagcagccttcgcccctcaagccagccacagtccccgccaggccgggtgggcgtcaagatgaaggcggcccgcttcgtgctgcgcagcgctggctcgctcaacggcgccggcctggtgccccgagaggtggagcatttctcgcgctacagcccgtccccgctgtccatgaagcagctactggactttggttcagaaaatgcatgtgaaagaacttcttttgcatttttgcgacaagaattgcctgtgagactcgccaacattctgaaggaaattgatatcctcccgacccaattagtaaatacctcttcagtgcaattggttaaaagctggtatatacagagcctgatggatttggtggaattccatgagaaaagcccagatgaccagaaagcattatcagactttgtagatacactcatcaaagttcgaaatagacaccataatgtagtccctacaatggcacaaggaatcatagagtataaagatgcctgtacagttgacccagtcaccaatcaaaatcttcaatatttcttggatcgattttacatgaaccgtatttctactcggatgctgatgaaccagcacattcttatatttagtgactcacagacaggaaacccaagccacattggaagcattgatcctaactgtgatgtggtagcagtggtccaagatgcctttgagtgttcaaggatgctctgtgatcagtattatttatcatctccagaattaaagcttacacaagtgaatggaaaatttccagaccaaccaattcacatcgtgtatgttccttctcacctccatcatatgctctttgaactatttaagaatgcaatgcgggcaacagttgaacaccaggaaaatcagccttcccttacaccaatagaggttattgttgtcttgggaaaagaagaccttaccattaagatttcagacagaggaggtggtgttcccctgagaattattgaccgcctctttagttatacatactccactgcaccaacgcctgtgatggataattcccggaatgctcctttggctggttttggttacggcttgccaatttctcgtctgtatgcaaagtactttcaaggagatctgaatctctactctttatcaggatatggaacagatgctatcatctacttaaaggctttgtcttctgagtctatagaaaaacttccagtttttaacaagtcagccttcaaacattatcagatgagctctgaggctgatgactggtgtatcccaagcagggaaccaaagaacctggcaaaagaagtggccatgtgaagagggacactcaggacactttacgggatcaaagtgggtctacaccagtgctgcttcctgaatgtttgtgtgtgaacccttgtttcctccaaaacaaacgacagcaacgaaaactccttaatcagaacactgatccaatgaggaatggagcttgtttctgtgacccaggagaacttagtgcaagactacaggagttaacagatggccagctccttattttttaatgtagaataactcctgagtttatatcaaatcctgaagaaataagcctcagttttccatctgtttttgataagaataagaaagggagtgagtgtgaagatggtggttagcagtttcactaagactgatattttaggcctcttgttcacatcaaaagatattggtgtcagaataccagcattttcctgccatgcaaaggattaaaacttagtttacactatgtggttacaaatatatgtcaatgtacattttgaacatatttatgtgctatggaaggaaatgctggtgactaaaataaggtttactctgaaagaggaggaattttattcaaagcattcaaacattttattcaagtgtttcaaaattcaaagcattgtattcaaagttgcagtgaaggcatcaacttatgtaaaaactcagaaggaaggctcctctgataaaaacacagctcctttattatgctgcttttcttgttcactttacacactaagtaaacacttattgtcaggtgcctagtcttgagtgaattgttagatgtgcactgaactcgggatgttggggattggagagagagaattgccaaagtaacagcaaaaatatctcttactttgctttgtttataaataaattagtagattggaaaaactagtgttagggaaagaaatcacatgttcagagcctaattcagtaggaagggcttttctctaccctgaaatgaaggtaatccaaaggcatccattttctaggcttaaaagatatatttttgatatatttaattatattctctacactccagcattaatatgtctgtttaaaaattactaattctcaaatggctcaagaacattagaatttaagtaccttttagagtaattattttaagcaaatagcctggacgtaagagattctcatgccagcatgctttcatttgtcagttgttgtgactgagagataatgaatgacacctgaaatgcatatggtatttttgggagagttaaggtataatttgaaggttggcagaccagttgcgctgattactcttagagaagaagaaatggaaaaatgaaagaaggcaggaaggaaagaaaggatataggaagagagggaagcagaaggcaggcatttttctattttccccacaaattatttcaaaaaaaatctgtattttctgggatatgtcattggcaagaggaagaactggtgttttgaaagcagtatggattctttaaatgcctctcactcttacaagatagtaggctttgagataataaacttacccgtgtcaattaacatttaaactggcatatagaaaaaaaggaggatttttctgcattgtaaaataatcagtatggtttatatgttgaatttgacatttgtgtgtaatttcatggtggcctagtgttgtggtgcttctggtaatggtaatagaagctcaactatttttttgtggatttcagtttttatcatcagaagtcctagacagtgacatttcttaatggtgggagtccagctcatgcatttctgattatacaaaacagtttgcagtaggttatttgtcatttcagttttttactgaaatttgagctaaacatttttacatgtaaatacttgtatttaccaaagatttaaatcagttgattaattaattaactcaaatactgtgaactatctctaaaacactagaaaaaagaaatgttagtatctcaattacaccaactgtgcaaatgaactttgataaaatagaaataatctacattggcctttgtgaaatctggggaagagctttaggattctagtagatggatactgaatactcaggcccacttaaattattaatgtatacattgtgtttttgtctttatgctatgtacagagaaatgtgataattttttataataaatattttttatgatgataaaa

SEQ ID NO: 130224 - DNA, 3491 bp, Artificial Sequence
  derived and/or modified sequence
aagacttgaacttgaatctcgaaccactgcatctccgactctgcccagactcttcactccgcggcaccctcaaaccccagcccaggccggggcgcacaagccagccagcgcacctgcagtcctcgcccggacgcgccgcgccccctcggaaccaggctctgctccgagcagccttcgcccctcaaggtggagcatttctcgcgctacagcccgtccccgctgtccatgaagcagctactggactttggttcagaaaatgcatgtgaaagaacttcttttgcatttttgcgacaagaattgcctgtgagactcgccaacattctgaaggaaattgatatcctcccgacccaattagtaaatacctcttcagtgcaattggttaaaagctggtatatacagagcctgatggatttggtggaattccatgagaaaagcccagatgaccagaaagcattatcagactttgtagatacactcatcaaagttcgaaatagacaccataatgtagtccctacaatggcacaaggaatcatagagtataaagatgcctgtacagttgacccagtcaccaatcaaaatcttcaatatttcttggatcgattttacatgaaccgtatttctactcggatgctgatgaaccagcacattcttatatttagtgactcacagacaggaaacccaagccacattggaagcattgatcctaactgtgatgtggtagcagtggtccaagatgcctttgagtgttcaaggatgctctgtgatcagtattatttatcatctccagaattaaagcttacacaagtgaatggaaaatttccagaccaaccaattcacatcgtgtatgttccttctcacctccatcatatgctctttgaactatttaagaatgcaatgcgggcaacagttgaacaccaggaaaatcagccttcccttacaccaatagaggttattgttgtcttgggaaaagaagaccttaccattaagatttcagacagaggaggtggtgttcccctgagaattattgaccgcctctttagttatacatactccactgcaccaacgcctgtgatggataattcccggaatgctcctttggctggttttggttacggcttgccaatttctcgtctgtatgcaaagtactttcaaggagatctgaatctctactctttatcaggatatggaacagatgctatcatctacttaaaggctttgtcttctgagtctatagaaaaacttccagtttttaacaagtcagccttcaaacattatcagatgagctctgaggctgatgactggtgtatcccaagcagggaaccaaagaacctggcaaaagaagtggccatgtgaagagggacactcaggacactttacgggatcaaagtgggtctacaccagtgctgcttcctgaatgtttgtgtgtgaacccttgtttcctccaaaacaaacgacagcaacgaaaactccttaatcagaacactgatccaatgaggaatggagcttgtttctgtgacccaggagaacttagtgcaagactacaggagttaacagatggccagctccttattttttaatgtagaataactcctgagtttatatcaaatcctgaagaaataagcctcagttttccatctgtttttgataagaataagaaagggagtgagtgtgaagatggtggttagcagtttcactaagactgatattttaggcctcttgttcacatcaaaagatattggtgtcagaataccagcattttcctgccatgcaaaggattaaaacttagtttacactatgtggttacaaatatatgtcaatgtacattttgaacatatttatgtgctatggaaggaaatgctggtgactaaaataaggtttactctgaaagaggaggaattttattcaaagcattcaaacattttattcaagtgtttcaaaattcaaagcattgtattcaaagttgcagtgaaggcatcaacttatgtaaaaactcagaaggaaggctcctctgataaaaacacagctcctttattatgctgcttttcttgttcactttacacactaagtaaacacttattgtcaggtgcctagtcttgagtgaattgttagatgtgcactgaactcgggatgttggggattggagagagagaattgccaaagtaacagcaaaaatatctcttactttgctttgtttataaataaattagtagattggaaaaactagtgttagggaaagaaatcacatgttcagagcctaattcagtaggaagggcttttctctaccctgaaatgaaggtaatccaaaggcatccattttctaggcttaaaagatatatttttgatatatttaattatattctctacactccagcattaatatgtctgtttaaaaattactaattctcaaatggctcaagaacattagaatttaagtaccttttagagtaattattttaagcaaatagcctggacgtaagagattctcatgccagcatgctttcatttgtcagttgttgtgactgagagataatgaatgacacctgaaatgcatatggtatttttgggagagttaaggtataatttgaaggttggcagaccagttgcgctgattactcttagagaagaagaaatggaaaaatgaaagaaggcaggaaggaaagaaaggatataggaagagagggaagcagaaggcaggcatttttctattttccccacaaattatttcaaaaaaaatctgtattttctgggatatgtcattggcaagaggaagaactggtgttttgaaagcagtatggattctttaaatgcctctcactcttacaagatagtaggctttgagataataaacttacccgtgtcaattaacatttaaactggcatatagaaaaaaaggaggatttttctgcattgtaaaataatcagtatggtttatatgttgaatttgacatttgtgtgtaatttcatggtggcctagtgttgtggtgcttctggtaatggtaatagaagctcaactatttttttgtggatttcagtttttatcatcagaagtcctagacagtgacatttcttaatggtgggagtccagctcatgcatttctgattatacaaaacagtttgcagtaggttatttgtcatttcagttttttactgaaatttgagctaaacatttttacatgtaaatacttgtatttaccaaagatttaaatcagttgattaattaattaactcaaatactgtgaactatctctaaaacactagaaaaaagaaatgttagtatctcaattacaccaactgtgcaaatgaactttgataaaatagaaataatctacattggcctttgtgaaatctggggaagagctttaggattctagtagatggatactgaatactcaggcccacttaaattattaatgtatacattgtgtttttgtctttatgctatgtacagagaaatgtgataattttttataataaatattttttatgatgat

SEQ ID NO: 130225 - DNA, 1236 bp, Artificial Sequence
  derived and/or modified sequence
atgaaggccgccagattcgtgctgagaagcgccggcagcctgaacggcgccggcctggtgcccagagaggtggagcacttcagcagatacagccccagccccctgagcatgaagcagctgctggacttcggcagcgagaacgcctgcgagagaaccagcttcgccttcctgagacaggagctgcccgtgagactggccaacatcctgaaggagatcgacatcctgcccacccagctggtgaacaccagcagcgtgcagctggtgaagagctggtacatccagagcctgatggacctggtggagttccacgagaagagccccgacgaccagaaggccctgagcgacttcgtggacaccctgatcaaggtgagaaacagacaccacaacgtggtgcccaccatggcccagggcatcatcgagtacaaggacgcctgcaccgtggaccccgtgaccaaccagaacctgcagtacttcctggacagattctacatgaacagaatcagcaccagaatgctgatgaaccagcacatcctgatcttcagcgacagccagaccggcaaccccagccacatcggcagcatcgaccccaactgcgacgtggtggccgtggtgcaggacgccttcgagtgcagcagaatgctgtgcgaccagtactacctgagcagccccgagctgaagctgacccaggtgaacggcaagttccccgaccagcccatccacatcgtgtacgtgcccagccacctgcaccacatgctgttcgagctgttcaagaacgccatgagagccaccgtggagcaccaggagaaccagcccagcctgacccccatcgaggtgatcgtggtgctgggcaaggaggacctgaccatcaagatcagcgacagaggcggcggcgtgcccctgagaatcatcgacagactgttcagctacacctacagcaccgcccccacccccgtgatggacaacagcagaaacgcccccctggccggcttcggctacggcctgcccatcagcagactgtacgccaagtacttccagggcgacctgaacctgtacagcctgagcggctacggcaccgacgccatcatctacctgaaggccctgagcagcgagagcatcgagaagctgcccgtgttcaacaagagcgccttcaagcactaccagatgagcagcgaggccgacgactggtgcatccccagcagagagcccaagaacctggccaaggaggtggccatgtag

SEQ ID NO: 130226 - DNA, 1128 bp, Artificial Sequence
  derived and/or modified sequence
atgaagcagctgctggacttcggcagcgagaacgcctgcgagagaaccagcttcgccttcctgagacaggagctgcccgtgagactggccaacatcctgaaggagatcgacatcctgcccacccagctggtgaacaccagcagcgtgcagctggtgaagagctggtacatccagagcctgatggacctggtggagttccacgagaagagccccgacgaccagaaggccctgagcgacttcgtggacaccctgatcaaggtgagaaacagacaccacaacgtggtgcccaccatggcccagggcatcatcgagtacaaggacgcctgcaccgtggaccccgtgaccaaccagaacctgcagtacttcctggacagattctacatgaacagaatcagcaccagaatgctgatgaaccagcacatcctgatcttcagcgacagccagaccggcaaccccagccacatcggcagcatcgaccccaactgcgacgtggtggccgtggtgcaggacgccttcgagtgcagcagaatgctgtgcgaccagtactacctgagcagccccgagctgaagctgacccaggtgaacggcaagttccccgaccagcccatccacatcgtgtacgtgcccagccacctgcaccacatgctgttcgagctgttcaagaacgccatgagagccaccgtggagcaccaggagaaccagcccagcctgacccccatcgaggtgatcgtggtgctgggcaaggaggacctgaccatcaagatcagcgacagaggcggcggcgtgcccctgagaatcatcgacagactgttcagctacacctacagcaccgcccccacccccgtgatggacaacagcagaaacgcccccctggccggcttcggctacggcctgcccatcagcagactgtacgccaagtacttccagggcgacctgaacctgtacagcctgagcggctacggcaccgacgccatcatctacctgaaggccctgagcagcgagagcatcgagaagctgcccgtgttcaacaagagcgccttcaagcactaccagatgagcagcgaggccgacgactggtgcatccccagcagagagcccaagaacctggccaaggaggtggccatgtag

SEQ ID NO: 130227 - protein, 556 aa, Artificial Sequence
  derived and/or modified sequence
MARTTSQLYDAVPIQSSVVLCSCPSPSMVRTQTESSTPPGIPGGSRQGPAMDGTAAEPRPGAGSLQHAQPPPQPRKKRPEDFKFGKILGEGSFSTVVLARELATSREYAIKILEKRHIIKENKVPYVTRERDVMSRLDHPFFVKLYFTFQDDEKLYFGLSYAKNGELLKYIRKIGSFDETCTRFYTAEIVSALEYLHGKGIIHRDLKPENILLNEDMHIQITDFGTAKVLSPESKQARANSFVGTAQYVSPELLTEKSACKSSDLWALGCIIYQLVAGLPPFRAGNEYLIFQKIIKLEYDFPEKFFPKARDLVEKLLVLDATKRLGCEEMEGYGPLKAHPFFESVTWENLHQQTPPKLTAYLPAMSEDDEDCYGNYDNLLSQFGCMQVSSSSSSHSLSASDTGLPQRSGSNIEQYIHDLDSNSFELDLQFSEDEKRLLLEKQAGGNPWHQFVENNLILKMGPVDKRKGLFARRRQLLLTEGPHLYYVDPVNKVLKGEIPWSQELRPEAKNFKTFFVHTPNRTYYLMDPSGNAHKWCRKIQEVWRQRYQSHPDAAVQ

SEQ ID NO: 130228 - protein, 532 aa, Artificial Sequence
  derived and/or modified sequence
MARTTSQLYDAVPIQSSVVLCSCPSPSMVRTQTESSTPPGIPGGSRQGPAMDGTAAEPRPGAGSLQHAQPPPQPRKKRPEDFKFGKILGEGSFSTVVLARELATSREYAIKILEKRHIIKENKVPYVTRERDVMSRLDHPFFVKLYFTFQDDEKLYFGLSYAKNGELLKYIRKIGSFDETCTRFYTAEIVSALEYLHGKGIIHRDLKPENILLNEDMHIQITDFGTAKVLSPESKQGVSDLWALGCIIYQLVAGLPPFRAGNEYLIFQKIIKLEYDFPEKFFPKARDLVEKLLVLDATKRLGCEEMEGYGPLKAHPFFESVTWENLHQQTPPKLTAYLPAMSEDDEDCYGNYDNLLSQFGCMQVSSSSSSHSLSASDTGLPQRSGSNIEQYIHDLDSNSFELDLQFSEDEKRLLLEKQAGGNPWHQFVENNLILKMGPVDKRKGLFARRRQLLLTEGPHLYYVDPVNKVLKGEIPWSQELRPEAKNFKTFFVHTPNRTYYLMDPSGNAHKWCRKIQEVWRQRYQSHPDAAVQ

SEQ ID NO: 130229 - DNA, 1671 bp, Artificial Sequence
  derived and/or modified sequence
atggcccgcaccacctctcagctgtacgatgcggtgcccattcagagctccgtggtactttgtagttgtccaagcccatctatggtgagaactcagactgagtcttccactcctccagggattcctggtgggtctcgtcaaggccctgccatggacggcacggccgcagagcctaggcctggcgctggaagtctgcaacatgcccagcctccacctcaaccaagaaagaaacgacccgaggatttcaaatttggtaagatactcggtgagggctcgttcagcactgtcgttctcgctcgcgagcttgccacatcccgagaatacgccatcaagatactggaaaagaggcacatcataaaagagaataaagtaccttacgtaacacgcgaaagggacgtcatgtccagactggaccaccccttcttcgtgaaactgtatttcaccttccaagatgacgagaagttatactttggcctgtcctatgctaagaacggcgaacttctcaaatatatccgcaaaatcgggagctttgatgaaacttgcacccgattctataccgccgaaatagtgagtgcgctggagtacctccatggaaaggggatcattcaccgtgatttgaaaccggagaacattctgctcaacgaagacatgcatatccagatcacagactttggcaccgccaaggtgctcagtccggaaagtaagcaggcgcgggctaatagttttgtggggacagcacagtacgtgtctcctgaactattgactgagaagtcggcctgtaaaagcagcgatttgtgggccctcggttgcattatttaccaactggtggctggcctgccaccctttagggccgggaatgaataccttatattccagaagatcattaagctggaatacgatttcccagagaagttctttcctaaggctagagatctcgtggagaagctcctcgtgttagacgccactaagagattgggatgtgaggagatggaagggtacggccccttgaaggcacacccctttttcgaaagtgtaacgtgggaaaacctgcatcagcagacacctcccaagctgactgcctatctgcccgcaatgtcagaggatgacgaggattgttacggcaactacgacaatctgctcagccagtttgggtgtatgcaggtgagtagctccagctcctcccactccctgagtgccagtgacaccgggctgccccagcgatcaggctcgaacatcgagcaatacatccacgacctggactcgaactcttttgagctcgacttgcagttcagtgaggatgagaaacggttgctgctggagaaacaggcaggaggaaacccttggcatcagtttgttgaaaacaatcttatactgaaaatgggaccagtcgacaagcgtaagggcttatttgcccggcgcaggcagctcttactgacggaaggtccccacttgtactacgtggatcctgtgaataaagtcttgaagggtgaaattccatggtcacaagaactgcgcccagaagcaaagaacttcaaaacatttttcgtgcatacccccaaccggacatactatctgatggaccctagtggcaacgcacataagtggtgcagaaagattcaggaagtatggcggcagagatatcagagccatcctgatgccgcggtgcagtag

SEQ ID NO: 130230 - DNA, 1599 bp, Artificial Sequence
  derived and/or modified sequence
atggcccggacgaccagccagttgtatgacgccgtccccatccaaagtagcgtggtgctttgctcttgccccagtccctcaatggtgcgaactcagaccgagtcatccacccctcctggcatcccaggcggatcccgccaagggcccgctatggacggaaccgccgctgagccacgcccaggggctgggtcgctccagcatgcccagccccctccccagccaagaaagaagaggccagaagatttcaaatttgggaaaatcctaggtgaagggagtttttctaccgtggtgctggcaagggagctcgctacttcaagggaatacgctatcaagatactggagaagaggcacatcatcaaagagaacaaagtcccatacgtcacaagggagcgagacgtgatgagcaggctggaccacccgttcttcgtgaaactgtacttcactttccaggacgacgagaagctgtacttcgggttgagctatgccaaaaatggggagctcttaaagtatatccgtaagatcggatcgtttgacgagacctgtacgcgcttttacaccgcagagatcgtgagcgcccttgagtacttgcacgggaagggcattattcatcgagacttaaaacccgaaaatatcctgttgaatgaggatatgcacatccaaattaccgattttgggacagcaaaagtgctgtctcccgaatcaaaacagggggtctctgatctatgggcacttgggtgcataatctatcagctcgtcgcgggccttccaccatttagagcagggaacgaatacttgatttttcaaaaaatcatcaagctcgaatacgatttcccggagaagtttttccccaaggctagagacctggtagaaaaactcttggtgctcgacgccaccaaacggctgggctgtgaggagatggagggttacggacccctcaaagcgcacccattctttgagtcagtgacatgggagaatcttcaccagcagacgccgccgaagcttacagcttacctgccagcaatgagtgaagacgatgaggattgttatggaaattacgataatctgctgagccagttcgggtgcatgcaggtgtcgagttcatccagctcacattctctcagcgctagcgataccggcctaccacagcggtcaggttctaacatcgagcaatacattcatgatttagactcaaactcatttgagttggacctgcagttctctgaggacgaaaaacgacttctactggagaagcaagccggtggaaatccctggcatcaattcgtagagaacaatctgatccttaagatggggcctgtggataagcggaaaggcttattcgccagaaggagacaactattgctgactgagggtccccacttgtattacgtggacccagttaacaaagtgctcaagggggagatcccatggtctcaagaacttcggcccgaggcaaagaactttaaaacttttttcgttcacacgcctaataggacatactaccttatggatccatcgggcaacgctcataaatggtgtcgcaagatacaggaagtgtggcgtcagcgttaccagagccatcctgacgccgccgttcagtag

SEQ ID NO: 130231 - DNA, 7241 bp, Artificial Sequence
  derived and/or modified sequence
gcggcgccgggggcggggggcggcgggcgacggggcgggcgcaggatgagggcggccattgctggggctccgcttcggggaggaggacgctgaggaggcgccgagccgcgcagcgctgcgggggaggcgcccgcgccgacgcggggcccatggccaggaccaccagccagctgtatgacgccgtgcccatccagtccagcgtggtgttatgttcctgcccatccccatcaatggtgaggacccagactgagtccagcacgccccctggcattcctggtggcagcaggcagggccccgccatggacggcactgcagccgagcctcggcccggcgccggctccctgcagcatgcccagcctccgccgcagcctcggaagaagcggcctgaggacttcaagtttgggaaaatccttggggaaggctctttttccacggttgtcctggctcgagaactggcaacctccagagaatatgcgattaaaattctggagaagcgacatatcataaaagagaacaaggtcccctatgtaaccagagagcgggatgtcatgtcgcgcctggatcaccccttctttgttaagctttacttcacatttcaggacgacgagaagctgtatttcggccttagttatgccaaaaatggagaactacttaaatatattcgcaaaatcggttcattcgatgagacctgtacccgattttacacggctgagattgtgtctgctttagagtacttgcacggcaagggcatcattcacagggaccttaaaccggaaaacattttgttaaatgaagatatgcacatccagatcacagattttggaacagcaaaagtcttatccccagagagcaaacaagccagggccaactcattcgtgggaacagcgcagtacgtttctccagagctgctcacggagaagtccgcctgtaagagttcagacctttgggctcttggatgcataatataccagcttgtggcaggactcccaccattccgagctggaaacgagtatcttatatttcagaagatcattaagttggaatatgactttccagaaaaattcttccctaaggcaagagacctcgtggagaaacttttggttttagatgccacaaagcggttaggctgtgaggaaatggaaggatacggacctcttaaagcacacccgttcttcgagtccgtcacgtgggagaacctgcaccagcagacgcctccgaagctcaccgcttacctgccggctatgtcggaagacgacgaggactgctatggcaattatgacaatctcctgagccagtttggctgcatgcaggtgtcttcgtcctcctcctcacactccctgtcagcctccgacacgggcctgccccagaggtcaggcagcaacatagagcagtacattcacgatctggactcgaactcctttgaactggacttacagttttccgaagatgagaagaggttgttgttggagaagcaggctggcggaaacccttggcaccagtttgtagaaaataatttaatactaaagatgggcccagtggataagcggaagggtttatttgcaagacgacgacagctgttgctcacagaaggaccacatttatattatgtggatcctgtcaacaaagttctgaaaggtgaaattccttggtcacaagaacttcgaccagaggccaagaattttaaaactttctttgtccacacgcctaacaggacgtattatctgatggaccccagcgggaacgcacacaagtggtgcaggaagatccaggaggtttggaggcagcgataccagagccacccggacgccgctgtgcagtgacgtggcctgcggccgggctgcccttcgctgccaggacacctgccccagcgcggcttggccgccatccgggacgcttccagaccacctgccagccatcacaaggggaacgcagaggcggaaaccttgcagcatttttatttaaaagaaaagaagaaaaaaaacacccaaccacacaaagaacaaaaccagtaacaaacacaaaggaattcagggtcgctttgcttgctctctgtgctccgtggaggcctccgtgtgccctcgttgccgtggggacccagctccatgcacgtcaacccagtcccgcccagactagtggacagacctggtgtcaccagtttttcctagcatcagtccgaaccatgcgcccgccctgccccaactgtgtgctggtcctgctgtggccgaggggaccgggtgtgtttggctctttatgcccctcccgctgtggtcctggaactcttcaccagggagggagccctgcgggggccgcagctttgtggagggagccgccgtgcttctgtcacctgctccctttcttgcgtctccctgtgatgggcccttaggcctggctgggcccattacatatccctgtggtggctctggtggcagctttctgtggcccctgctgtgttggcaggcaggtttgcgtggtgaggagcgggaggggttggagtggtgcgggagcaggctgccgagtggagggtgccatcgagggctccggatcccttatcctacttagcagtgttggtctctggggctggaagccgagcgcatgctgggagcggtactgtcagaagtgagcccagttagtaccccgctggctcactgcacgagagagtcctgccccgagccctaggtggggccaggaggtgccttggagaagccagccagagcagagagggctgctgacttccgtgtggagcagagaggcctgagggcctcctaaaaggtttaaatgtccacgcctctccagttgctgaagtagggtctgagagaaccctggcatcagcagacccagggtgcttctgtctcctgcagaccacgccagggagtgcagacaccaccgtcacacacgccccttttgtgttttggttcaagtttctcagagcccctcagagcttctacatctgtgcatcagaaatctcacagccttctcatgctgccggctcatctgggcccatagagtgggctttgccagttgctgttgcacaggaggcgagaacagcacacttcaaccccagcttgctggtcggctttcctctagagagagccggttttggggccatttccctttgatgctttggtggccttgccccgctctgcagcacagacaggccagatgcatttgtcctttgcctagctactccccaggtagagagtgctcctggtggcctggcaggtctgggcccttctctccctgcccaggttgtccctggagggcagccctcactccctttgggggagaggcagacattgctgcccacagacctgcctctgactcaactgtgtccaccctccctggtccctacccccaagtcacaggtgactcagcagtgaccctgtgtgccaggccagatccaaactgagagggaaggtgtcgtttttacactgctaatgacgagagtggctctttttagctaggcgagtacagacggggcctgggagggggcagagatgttccccaggccctgcctgtggttcctgcctgggccttggctgctgctgtgtgagagctgcatgtgagcctgtgaccgtgagctggggtgagctgggccgcacctaccctggggccccagggagcaggacgctccggggcccagcacgttgccctgggcctgtggccggagtcggagtcctctctcctcctcctggcttttggaaaggcttggctgtgttggggagtctctcttagccctttcaggaatttctgttcaggcttcctcctcctcatcagctattttacccatctcagaacgtcctgtgtctccatgtaggagagtggctctctcagatctctcagggcgtctggttatagggaaacaagtggagcagggacgtggctttaattggagcactcggctgggctgcttggggagactcttccgtgcgttcttcctctggatagaaccaccacctcctgggcgtcactgacaagctccatcttaacctccaaagccacagaactaggggctcagagccagagctggcagccgccagccaaaatgatgccattgcctgagctgacagccaagcccttctgtgggtcacctttctcctcacccagccccttgctcttcccttttgaaaggcccgtgtgttttctttccttaccctgtgcttgctcatgtctactccggttttctctaccacatccttagagccatcacctggcacgcaggcgccttacattctacggtagaacgtggggtactgtgtgtgcacatagacacacttacgtggaattacagttgtgggtttatccaagatgaggaagatttcacctgctgtttaatagacttggggccatgtgcctccccacacatgggcaaggacaggtggaatgtcgggaccacactgtgcggcttctcggcacaaagcggagggaggctgtggtcgctgccggcctaggtgtcccaggtgccccgcctttctctgggacacagttgggggctggcttctgagggattcctttctcccctctttgtgtggccccagccagggcggtgggcagtcctggtgtagagcacaagcctctccaccctagagaaatgcctctgtaccacggctaccatgtggaaccttaacttgcagaaggcttgttaacaattgttttgagagagatggctggtcatgccacagctgctggggactccgcctactccagccctcttgggacacactgtgggatttgtggcccttccccagaggaattgtggagactgtcccatggaacaaaccctcaggcaccagcacagggctctgggtgactcagtaaaactaacgtttgtctctgacaagatcagctgtaggctcaccggccagagaagaccactgtgagcattttgccgtatatcctgccctgccatttgttcactttttaaactaaaataggaacatccgacacacaccgtttgcatcgtcttctcccttgatattttaagcattttcccatgtcatgagtttctcagaaacatgtttttaacaattgtactatttagtcattgtccatttactataatttatctgaccatttccctactgtaaaatacttaagacggtttctgatttttccactatttaaataatgctgtgatgaatatctttaaaatcttctgatttcttacttttttcccccttagatgcctggaagtggtattttgaggtgaaagagtttgttcattttgaagatatttctgtctctctctcgacctgatgtgtagacgctcacttccagtagcagaaccaccttagttgtgtcttacagattctgaacaaatcggtttctgataagccatgtgttccaaagaatgtctgaataagaccgctctttatttaaatgctaagaggatgtcactactgcaatccatctgtggccgattttttccaagagccaatttccttgttttggttgcaagaacctggctctgcctgcatgtcagctctctgccctccctgctgccgtggctttcaagcgcttggcagaatcttgtacttcgtgtccacaatggtactgaatttgcatctgcacagtcagcagagataacaagtgttgaactgaccttgccacatgcttagtgagtgatttgtaattaagtttatagactcagaaggtatattaggacatttggaatcagtagcagagcaaagcctctttgaaaaaaaccacgtagctgattgggttttacaagagtgcatttgtctcccccttccacccgtggggccccaccttcaggtcttagtggttcacaagagcccagcagccaggctggctttttcattgtagggcgtggttgtcccagctggtgtagatttcaggccgccccccccaactccctgcccacagtgttgcagattgcctggctggcagcaagtccagaccacccaaatttggttggattcttcatttctccactgtagttggggtccattgattgtgcaggggaacgtgcaggaggtttttctaggcaccgtgttcagtgctgcttcactctaccagagattatggccaaattgcacggaatttggtttcttgccctctgaagcctgagggcccccccttgcctggctggttgacagacccggggtggtcactgctgagacttcagagatcgcagctgctgtgagaatacggtgaaggtactttgttctggaagatgttgtcatacacttttccccagttattttcaaacttgacatgagcctatgttgactcactgggtgggggtcccttcttacgcagcacacgtggcaagtgcctgaatcggggctggaggcacttcagagcctctgaggggccaccacttctggcccaaaattgcagggttgtagatgaggctgcctgtggagaactggtgtgaggaggaagctgtttccaacaaagagcactttcatctgttgagatggctgtggtgagcaactgaacgagcctacgtgtgtacctgaattttccccgtaactcatttcttccatatgaagaaacaccaaactatgtacagagaactttttacaaaaggcagaccttttttaagctgtgtaacccacatagcctaaccacctggcagaatgactacgaataggggtcattgtgctggtaaaagcctctattacgactgtaagtaagttggatgttggcaaaattaaattgttacagtatttagagctgctgtagctgttccttcacaacataaaataggataaatgactagtacgtctttcaggtgggtggcaagcagaacatgcgtaatattctctacctggtctgtagctgtaactgtgatgtacagacaaagcaaaaattaaaagaacttatgaaaacaaatgcaatgatactaggatatacacttttgtatttttattcttatataaggttatttgctggctattgttggcctctagttcagtctgtgttatttaaattctaatatatgaattatttgaattgaattcatgttcggggccacgttgttgtatgtattgatgtacagccttgaatgtgaataattattgtaaactatattttacaactttttttctggctttattatataaattttctattgggtcagtgatttaatcatataatttaatgaatctgtttatcctttttttttttccaaatacttgtgctttaggtgtagttaccagatgatgaattttcctcgtatggtcagtagtcttgtaataaaaagcatgtagagtgta

SEQ ID NO: 130232 - DNA, 1819 bp, Artificial Sequence
  derived and/or modified sequence
ccgcttcggggaggaggacgctgaggaggcgccgagccgcgcagcgctgcgggggaggcgcccgcgccgacgcggggcccatggccaggaccaccagccagctgtatgacgccgtgcccatccagtccagcgtggtgttatgttcctgcccatccccatcaatggtgaggacccagactgagtccagcacgccccctggcattcctggtggcagcaggcagggccccgccatggacggcactgcagccgagcctcggcccggcgccggctccctgcagcatgcccagcctccgccgcagcctcggaagaagcggcctgaggacttcaagtttgggaaaatccttggggaaggctctttttccacggttgtcctggctcgagaactggcaacctccagagaatatgcgattaaaattctggagaagcgacatatcataaaagagaacaaggtcccctatgtaaccagagagcgggatgtcatgtcgcgcctggatcaccccttctttgttaagctttacttcacatttcaggacgacgagaagctgtatttcggccttagttatgccaaaaatggagaactacttaaatatattcgcaaaatcggttcattcgatgagacctgtacccgattttacacggctgagattgtgtctgctttagagtacttgcacggcaagggcatcattcacagggaccttaaaccggaaaacattttgttaaatgaagatatgcacatccagatcacagattttggaacagcaaaagtcttatccccagagagcaaacaaggtgtttcagacctttgggctcttggatgcataatataccagcttgtggcaggactcccaccattccgagctggaaacgagtatcttatatttcagaagatcattaagttggaatatgactttccagaaaaattcttccctaaggcaagagacctcgtggagaaacttttggttttagatgccacaaagcggttaggctgtgaggaaatggaaggatacggacctcttaaagcacacccgttcttcgagtccgtcacgtgggagaacctgcaccagcagacgcctccgaagctcaccgcttacctgccggctatgtcggaagacgacgaggactgctatggcaattatgacaatctcctgagccagtttggctgcatgcaggtgtcttcgtcctcctcctcacactccctgtcagcctccgacacgggcctgccccagaggtcaggcagcaacatagagcagtacattcacgatctggactcgaactcctttgaactggacttacagttttccgaagatgagaagaggttgttgttggagaagcaggctggcggaaacccttggcaccagtttgtagaaaataatttaatactaaagatgggcccagtggataagcggaagggtttatttgcaagacgacgacagctgttgctcacagaaggaccacatttatattatgtggatcctgtcaacaaagttctgaaaggtgaaattccttggtcacaagaacttcgaccagaggccaagaattttaaaactttctttgtccacacgcctaacaggacgtattatctgatggaccccagcgggaacgcacacaagtggtgcaggaagatccaggaggtttggaggcagcgataccagagccacccggacgccgctgtgcagtgacgtggcctgcggccgggctgcccttcgctgccaggacacctgccccagcgcggcttggccgccatccgggacgcttccagaccacctgccagccatcacaaggggaacgcagaggcggaaaccttgcagcatttttattt

SEQ ID NO: 130233 - DNA, 1671 bp, Artificial Sequence
  derived and/or modified sequence
atggcccggaccaccagccagctgtatgatgctgtgcccatccagagctctgtggtgctgtgcagctgccccagccccagcatggtgaggacccagacagagagcagcaccccacctggcatccctgggggcagccggcagggccctgccatggatggaacagctgctgagcccaggcctggggccggcagcctgcagcacgcccagcccccaccccagcccaggaagaagaggcctgaggacttcaagtttgggaagatcctgggggagggcagcttcagcacagtggtgctggcccgggagctggccaccagccgggagtatgccatcaagatcctggagaagaggcacatcatcaaggagaacaaggtgccctacgtgacccgggagagagatgtgatgagccggctggaccaccccttctttgtgaagctgtacttcaccttccaggatgatgagaagctgtacttcggcctgtcctatgccaagaatggagagctgctgaagtacatcaggaagattggcagctttgatgagacctgcacccgcttctacacagctgagatcgtgtctgccctggagtacctgcacggcaagggcatcatccaccgggacctgaagccagagaacatcctgctgaatgaagacatgcacatccagatcacagactttggaacagccaaggtgctgagccctgagagcaagcaggcccgggccaacagctttgtgggcacagcccagtatgtgtccccagagctgctgacagagaagagcgcctgcaagagcagtgacctgtgggccctgggctgcatcatctaccagctggtggccggcctgccccccttccgggctggaaatgagtacctgatcttccagaagatcatcaagctggagtatgacttccctgagaagttcttccccaaggcccgggacctggtggagaagctgctggtgctggatgccaccaagaggctgggctgtgaggagatggagggctacggccccctgaaggcccaccccttctttgagagcgtgacctgggagaacctgcaccagcagaccccacccaagctgacagcctacctgcctgccatgtctgaagatgatgaggactgctacggcaactatgacaacctgctgagccagtttggctgcatgcaggtgagcagcagcagcagcagccacagcctgagcgccagtgacaccggcctgccccagaggagcggcagcaacatcgagcagtacatccatgacctggacagcaacagctttgagctggacctgcagttctctgaagatgagaagaggctgctgctggagaagcaggccggcggcaacccctggcaccagtttgtggagaacaacctgatcctgaagatgggccctgtggacaagaggaagggcctgtttgcccggcggcggcagctgctgctgacagagggcccccacctgtactacgtggaccctgtgaacaaggtgctgaagggggagatcccctggagccaggagctgcggcctgaggccaagaacttcaagaccttctttgtgcacacccccaacagaacctactacctgatggaccccagcggaaatgcccacaagtggtgcaggaagatccaggaggtgtggaggcagcgctaccagagccacccagatgctgctgtgcagtag

SEQ ID NO: 130234 - DNA, 1599 bp, Artificial Sequence
  derived and/or modified sequence
atggcccggaccaccagccagctgtatgatgctgtgcccatccagagctctgtggtgctgtgcagctgccccagccccagcatggtgaggacccagacagagagcagcaccccacctggcatccctgggggcagccggcagggccctgccatggatggaacagctgctgagcccaggcctggggccggcagcctgcagcacgcccagcccccaccccagcccaggaagaagaggcctgaggacttcaagtttgggaagatcctgggggagggcagcttcagcacagtggtgctggcccgggagctggccaccagccgggagtatgccatcaagatcctggagaagaggcacatcatcaaggagaacaaggtgccctacgtgacccgggagagagatgtgatgagccggctggaccaccccttctttgtgaagctgtacttcaccttccaggatgatgagaagctgtacttcggcctgtcctatgccaagaatggagagctgctgaagtacatcaggaagattggcagctttgatgagacctgcacccgcttctacacagctgagatcgtgtctgccctggagtacctgcacggcaagggcatcatccaccgggacctgaagccagagaacatcctgctgaatgaagacatgcacatccagatcacagactttggaacagccaaggtgctgagccctgagagcaagcagggcgtgtctgacctgtgggccctgggctgcatcatctaccagctggtggccggcctgccccccttccgggctggaaatgagtacctgatcttccagaagatcatcaagctggagtatgacttccctgagaagttcttccccaaggcccgggacctggtggagaagctgctggtgctggatgccaccaagaggctgggctgtgaggagatggagggctacggccccctgaaggcccaccccttctttgagagcgtgacctgggagaacctgcaccagcagaccccacccaagctgacagcctacctgcctgccatgtctgaagatgatgaggactgctacggcaactatgacaacctgctgagccagtttggctgcatgcaggtgagcagcagcagcagcagccacagcctgagcgccagtgacaccggcctgccccagaggagcggcagcaacatcgagcagtacatccatgacctggacagcaacagctttgagctggacctgcagttctctgaagatgagaagaggctgctgctggagaagcaggccggcggcaacccctggcaccagtttgtggagaacaacctgatcctgaagatgggccctgtggacaagaggaagggcctgtttgcccggcggcggcagctgctgctgacagagggcccccacctgtactacgtggaccctgtgaacaaggtgctgaagggggagatcccctggagccaggagctgcggcctgaggccaagaacttcaagaccttctttgtgcacacccccaacagaacctactacctgatggaccccagcggaaatgcccacaagtggtgcaggaagatccaggaggtgtggaggcagcgctaccagagccacccagatgctgctgtgcagtag

SEQ ID NO: 130235 - DNA, 1671 bp, Artificial Sequence
  derived and/or modified sequence
atggcccggaccaccagccagctgtacgacgccgtgcccatccagtcttcggttgtgctgtgctcatgcccttctccaagtatggtgcggacccagaccgagtcttccacaccacccggaattcccggtgggtctagacaaggccccgcaatggatgggaccgcggctgaacccaggcctggagccgggtctttacagcacgcccagccccctccccaaccacgtaaaaagcggccagaggattttaagttcggcaaaatactgggagagggtagtttcagcacagtggtcttagcacgagagctggcaacttccagagaatacgctattaagatcctagagaagcggcatattattaaagagaataaagtgccatacgttacccgcgaaagagatgtgatgagccgtctggatcaccccttctttgttaagctgtacttcaccttccaggatgatgagaaactgtacttcggactgtcgtacgctaaaaatggtgaactgctgaagtatataaggaagattggcagtttcgacgaaacttgcactagattttataccgccgaaatcgtttcagccctggagtaccttcatgggaaaggcatcattcacagggatctgaagcccgaaaacatcctgctaaacgaagatatgcacatccagattacggatttcggcaccgctaaggtgctgtcgcctgaatccaaacaggcacgggctaactcatttgtgggtacagcccaatatgtcagccccgaactgctgaccgagaagagcgcttgtaagtctagcgatctgtgggccctgggttgcattatttatcagctggtggcaggactacctccatttcgcgcaggaaatgagtatctgatcttccagaagattattaagctcgagtatgacttccctgaaaagttttttcctaaggcccgggatttagttgaaaagctccttgtgctcgacgccaccaaaaggctggggtgtgaggagatggaagggtatgggccgctgaaggctcacccattctttgagagcgtgacctgggagaatcttcaccagcagacaccgcccaagctgaccgcctatctgcccgccatgtctgaagacgatgaagactgttacggcaattatgataacctgctatcacagtttgggtgcatgcaagtgtcatcatcttctagcagccacagcttatctgcctccgacactgggctgcctcagagatctggatccaacatcgagcagtacattcacgacctggattcaaacagtttcgaactcgacctgcagttcagcgaggacgaaaagcgccttctcctcgaaaagcaggcagggggcaacccttggcatcaattcgttgagaataacctcattctgaagatgggccccgtggacaaaagaaaaggtttgttcgcacgccgcagacagctgctgctcactgagggccctcacttatactatgtggaccctgtcaataaagtcctgaagggcgaaattccctggagtcaggaactaagacccgaggcaaaaaatttcaaaacattttttgtgcacactccaaatcgcacttactacttgatggacccatcgggaaatgcacacaaatggtgtagaaaaatccaagaagtctggaggcaaagataccagtcccatcccgacgcagccgttcaatag

SEQ ID NO: 130236 - DNA, 1599 bp, Artificial Sequence
  derived and/or modified sequence
atggcccggaccaccagccagctgtacgacgccgtgcccatccagtcctctgttgtcctgtgctcctgtccaagcccgagcatggtcaggactcagactgaaagtagcactccacctggtatccctggcggtagcaggcagggtcccgccatggatgggacggcggctgaacctcgcccaggtgctggctcactgcaacacgcccagccccctcctcagccacgcaagaaacgccctgaagacttcaagtttggcaaaatcctcggggagggaagctttagcacagtggtgttagcacgcgaattagcaacgagccgggagtacgccataaaaatcttagagaagaggcatattattaaggagaataaggttccttacgtgactcgggagcgagatgtcatgtcccgtctggatcacccatttttcgtgaaactctacttcaccttccaagatgacgagaagctatacttcggactgagttacgcaaagaacggcgagctgttgaaatacatccggaagatcggctcattcgacgagacatgtacccgcttctataccgccgagattgttagcgctctggagtaccttcacggcaaagggataatccaccgagacctgaaacctgagaatatcttactcaatgaggacatgcacatccaaatcaccgacttcggcactgccaaagtgctctcgcccgaaagcaagcagggcgtttccgacctgtgggcactcggctgcattatttaccagctggtggctggcctgcccccgttccgtgccggaaatgaatatctgatcttccagaaaattataaaattggagtatgatttccctgaaaagttttttccaaaagctagggatctggtcgagaagctacttgtactggatgctactaagcggcttggttgcgaagaaatggaaggatacggcccactaaaggctcacccatttttcgagtccgtgacatgggaaaacctccatcaacagaccccccccaagctcactgcatatctgccagcaatgagcgaggacgatgaggattgctacggaaactacgataacctcctgtcccagtttggctgtatgcaggtgagttccagcagttcctctcattctttgagcgctagcgacactggcctcccacagagatccggctcaaatatcgagcagtacatccatgatctggatagcaatagctttgaactcgatctacagttctcagaggacgaaaaaaggctgcttctggagaaacaagctggcggtaatccctggcaccaatttgtggaaaacaacctcatcctcaagatggggcctgtggacaagcgcaaaggtctctttgctaggaggcgacagctgctccttaccgaagggcctcatctgtattacgttgatcctgtgaacaaggttttgaagggggaaattccttggagtcaggagttgcgacctgaagctaagaacttcaagaccttctttgtgcatacccccaacaggacatattaccttatggatccctcaggaaatgcccacaagtggtgtcggaagattcaggaggtgtggcgccaaaggtatcaatcgcatcccgacgctgcagtacaatag

SEQ ID NO: 130237 - DNA, 1671 bp, Artificial Sequence
  derived and/or modified sequence
atggccaggaccacttcacagctttacgacgccgtgccaattcagtcgtccgtggtcctatgcagctgtccctcgccatctatggtgcgaactcagactgagtcctcaactccaccaggcatcccgggaggttcacgacaggggccagccatggatgggacggccgctgagcccaggcccggtgcaggcagcttacagcatgcacaaccaccacctcagccacgaaaaaagagacctgaagatttcaagttcggtaaaatcctgggagagggttcattctcgacagtggttctcgcgagagaactggcaacctccagagaatatgcgatcaagatactcgaaaagcggcacattattaaggaaaataaagtgccctacgtcacgagagagcgagacgtgatgtctcggttggatcatccgttcttcgtgaagttgtacttcacctttcaggacgatgaaaagctctacttcggcttgtcctacgccaagaatggcgagctgctgaaatacatccggaagataggcagcttcgatgaaacatgcactaggttctacacggctgaaattgtcagcgcgttggaatatctccacggcaagggaatcatccaccgcgacctcaagccagaaaatatcctgcttaatgaggacatgcatatacaaatcacggattttggcacggctaaggtattaagccccgagtctaagcaggcgagggcaaattcattcgtcggcacggcccagtatgtatcccctgagttgcttacggagaaaagtgcttgtaagtcttcagatttgtgggctttaggctgcatcatctaccaactagttgctggactgccaccattcagagccggaaacgaatacttgatttttcaaaaaatcatcaagctggagtacgacttccccgaaaaattcttccctaaagcaagggatctggtggaaaaacttcttgtgttggatgcaacgaagagactgggttgtgaagaaatggaggggtatgggccactcaaagctcaccctttctttgagtcggtgacgtgggagaatctgcatcagcagacaccgccaaagctaactgcatacctacctgctatgtccgaggatgacgaggattgctatggaaattacgacaacttgctctcccagttcggatgtatgcaggtgagtagcagcagctcttcccactcactctccgcttctgatactgggctgccacaacgctctgggagcaatattgaacaatacattcatgacctggactcaaatagtttcgagctggatctgcaattttcggaggacgagaagcgtttgcttctggagaaacaggccggtggcaacccttggcatcagtttgtggagaataatctgattttaaagatggggccagtggacaaacgaaagggactatttgcaagacgaagacagctcctgctaaccgaggggcctcacctgtactacgtcgaccctgtgaacaaggtcctgaagggggaaattccatggtcccaagagctgcggccagaagctaaaaatttcaaaacattcttcgtgcatacacctaatcgcacttattatttgatggacccttccgggaacgcccacaaatggtgccgaaaaatccaagaagtgtggcgacagcggtatcaatcgcaccccgacgcggctgtgcagtag

SEQ ID NO: 130238 - DNA, 1599 bp, Artificial Sequence
  derived and/or modified sequence
atggcacggaccacgtcccagctatacgacgccgtccctattcagtcaagcgtggtgctgtgttcttgcccgtcccccagtatggttagaactcagacagaatcctcaacccctccaggtataccaggcggttcacgccagggtccggcaatggacggcacggcggcagaaccacggcctggagctggaagcttgcaacacgcgcaacctcccccacagccgcgaaagaaacgtccggaggactttaagttcggcaaaatattaggcgagggcagcttttctaccgttgttctcgcgagggaactcgccacaagcagagaatacgccatcaaaattttagagaagcgtcacataattaaggagaacaaagtgccttatgtaaccagagaaagggacgttatgtcaagactggatcatcccttcttcgtgaaactttactttacttttcaagacgacgaaaagctgtacttcgggctgagctacgcaaagaatggagaactgctcaaatatattcggaagattgggtctttcgatgaaacttgtacaaggttctataccgcagagatcgtctcggctctcgaatacctccatggcaaggggattatccaccgcgatctgaagcccgaaaatatcctcctcaacgaagacatgcatatccagatcaccgacttcggcacggctaaggtcttatcacccgaaagcaagcagggggtctctgacctctgggccttgggttgtatcatttatcagctcgtcgctggcctccccccatttcgtgcgggtaacgagtatctcatcttccagaaaatcattaagctcgagtatgacttccccgaaaagttttttcccaaagccagggacctcgtcgaaaagctgttggtcctagatgctactaagaggctgggatgtgaagagatggaggggtacggcccactaaaagcccacccattcttcgaaagtgtaacctgggaaaatctgcaccagcagacaccacctaagttaaccgcgtacctaccagccatgtccgaggacgacgaggactgctatggcaattacgacaacctcctgtcccaatttgggtgcatgcaggtaagtagctccagctcttcgcacagcctgtccgccagcgacactggtttgccgcaaagaagcgggagtaacatcgagcagtatatccatgacctggacagcaactcttttgaattagatctgcagttcagcgaagatgaaaaacggctgctgttagagaagcaggcagggggtaacccatggcatcaatttgtggagaacaacctcattcttaaaatgggccctgtggataagcgaaagggcctgttcgcacggagacgccagcttctgctgactgagggaccacatctttactacgtggaccctgtgaacaaggtgttaaagggtgaaataccctggtctcaggagctacggcctgaggctaagaactttaaaacattttttgtgcacacaccaaatagaacctactacttaatggatcctagcgggaatgcccataaatggtgtaggaaaatacaggaagtttggaggcagaggtaccagagccacccagatgcagcagtgcagtag

SEQ ID NO: 130239 - DNA, 1671 bp, Artificial Sequence
  derived and/or modified sequence
atggccagaaccaccagccagctgtacgacgccgtgcccatccagagcagcgtggtgctgtgcagctgccccagccccagcatggtgagaacccagaccgagagcagcaccccccccggcatccccggcggcagcagacagggccccgccatggacggcaccgccgccgagcccagacccggcgccggcagcctgcagcacgcccagccccccccccagcccagaaagaagagacccgaggacttcaagttcggcaagatcctgggcgagggcagcttcagcaccgtggtgctggccagagagctggccaccagcagagagtacgccatcaagatcctggagaagagacacatcatcaaggagaacaaggtgccctacgtgaccagagagagagacgtgatgagcagactggaccaccccttcttcgtgaagctgtacttcaccttccaggacgacgagaagctgtacttcggcctgagctacgccaagaacggcgagctgctgaagtacatcagaaagatcggcagcttcgacgagacctgcaccagattctacaccgccgagatcgtgagcgccctggagtacctgcacggcaagggcatcatccacagagacctgaagcccgagaacatcctgctgaacgaggacatgcacatccagatcaccgacttcggcaccgccaaggtgctgagccccgagagcaagcaggccagagccaacagcttcgtgggcaccgcccagtacgtgagccccgagctgctgaccgagaagagcgcctgcaagagcagcgacctgtgggccctgggctgcatcatctaccagctggtggccggcctgccccccttcagagccggcaacgagtacctgatcttccagaagatcatcaagctggagtacgacttccccgagaagttcttccccaaggccagagacctggtggagaagctgctggtgctggacgccaccaagagactgggctgcgaggagatggagggctacggccccctgaaggcccaccccttcttcgagagcgtgacctgggagaacctgcaccagcagaccccccccaagctgaccgcctacctgcccgccatgagcgaggacgacgaggactgctacggcaactacgacaacctgctgagccagttcggctgcatgcaggtgagcagcagcagcagcagccacagcctgagcgccagcgacaccggcctgccccagagaagcggcagcaacatcgagcagtacatccacgacctggacagcaacagcttcgagctggacctgcagttcagcgaggacgagaagagactgctgctggagaagcaggccggcggcaacccctggcaccagttcgtggagaacaacctgatcctgaagatgggccccgtggacaagagaaagggcctgttcgccagaagaagacagctgctgctgaccgagggcccccacctgtactacgtggaccccgtgaacaaggtgctgaagggcgagatcccctggagccaggagctgagacccgaggccaagaacttcaagaccttcttcgtgcacacccccaacagaacctactacctgatggaccccagcggcaacgcccacaagtggtgcagaaagatccaggaggtgtggagacagagataccagagccaccccgacgccgccgtgcagtag

SEQ ID NO: 130240 - DNA, 1599 bp, Artificial Sequence
  derived and/or modified sequence
atggccagaaccaccagccagctgtacgacgccgtgcccatccagagcagcgtggtgctgtgcagctgccccagccccagcatggtgagaacccagaccgagagcagcaccccccccggcatccccggcggcagcagacagggccccgccatggacggcaccgccgccgagcccagacccggcgccggcagcctgcagcacgcccagccccccccccagcccagaaagaagagacccgaggacttcaagttcggcaagatcctgggcgagggcagcttcagcaccgtggtgctggccagagagctggccaccagcagagagtacgccatcaagatcctggagaagagacacatcatcaaggagaacaaggtgccctacgtgaccagagagagagacgtgatgagcagactggaccaccccttcttcgtgaagctgtacttcaccttccaggacgacgagaagctgtacttcggcctgagctacgccaagaacggcgagctgctgaagtacatcagaaagatcggcagcttcgacgagacctgcaccagattctacaccgccgagatcgtgagcgccctggagtacctgcacggcaagggcatcatccacagagacctgaagcccgagaacatcctgctgaacgaggacatgcacatccagatcaccgacttcggcaccgccaaggtgctgagccccgagagcaagcagggcgtgagcgacctgtgggccctgggctgcatcatctaccagctggtggccggcctgccccccttcagagccggcaacgagtacctgatcttccagaagatcatcaagctggagtacgacttccccgagaagttcttccccaaggccagagacctggtggagaagctgctggtgctggacgccaccaagagactgggctgcgaggagatggagggctacggccccctgaaggcccaccccttcttcgagagcgtgacctgggagaacctgcaccagcagaccccccccaagctgaccgcctacctgcccgccatgagcgaggacgacgaggactgctacggcaactacgacaacctgctgagccagttcggctgcatgcaggtgagcagcagcagcagcagccacagcctgagcgccagcgacaccggcctgccccagagaagcggcagcaacatcgagcagtacatccacgacctggacagcaacagcttcgagctggacctgcagttcagcgaggacgagaagagactgctgctggagaagcaggccggcggcaacccctggcaccagttcgtggagaacaacctgatcctgaagatgggccccgtggacaagagaaagggcctgttcgccagaagaagacagctgctgctgaccgagggcccccacctgtactacgtggaccccgtgaacaaggtgctgaagggcgagatcccctggagccaggagctgagacccgaggccaagaacttcaagaccttcttcgtgcacacccccaacagaacctactacctgatggaccccagcggcaacgcccacaagtggtgcagaaagatccaggaggtgtggagacagagataccagagccaccccgacgccgccgtgcagtag

SEQ ID NO: 130241 - protein, 418 aa, Artificial Sequence
  derived and/or modified sequence
MQALVLLLCIGALLGHSSCQNPASPPEEGSPDPDSTGALVEEEDPFFKVPVNKLAAAVSNFGYDLYRVRSSTSPTTNVLLSPLSVATALSALSLGAEQRTESIIHRALYYDLISSPDIHGTYKELLDTVTAPQKNLKSASRIVFEKKLRIKSSFVAPLEKSYGTRPRVLTGNPRLDLQEINNWVQAQMKGKLARSTKEIPDEISILLLGVAHFKGQWVTKFDSRKTSLEDFYLDEERTVRVPMMSDPKAVLRYGLDSDLSCKIAQLPLTGSMSIIFFLPLKVTQNLTLIEESLTSEFIHDIDRELKTVQAVLTVPKLKLSYEGEVTKSLQEMKLQSLFDSPDFSKITGKPIKLTQVEHRAGFEWNEDGAGTTPSPGLQPAHLTFPLDYHLNQPFIFVLRDTDTGALLFIGKILDPRGP

SEQ ID NO: 130242 - DNA, 1257 bp, Artificial Sequence
  derived and/or modified sequence
atgcaggcccttgtgctgctgctgtgtattggtgcattgcttggccactcttcttgccaaaaccctgcgtctcctccagaagaaggctcccccgatcccgacagcaccggtgctctagtggaagaggaggatcccttcttcaaagtgccggtaaacaaactggcggccgccgtgtctaactttggatacgatctttacagagtaaggtcatcaacctcccccacgacaaatgtgctgctgtcccctctgtcagtggctacagcactgtctgctctgagcctgggggcagagcaacgaacggagagtattatccatcgtgccctgtattacgacctgatctcatctcctgacatacatggaacctataaggagttgctcgacacagtgacagcgccccagaagaacctgaaaagtgcttctaggatcgtgttcgagaagaagctgcgaattaagagttctttcgtagctcccctggagaaaagctacggcactcgccccagagttcttacgggcaaccctaggctggacttgcaggaaataaacaattgggtccaggcacagatgaaagggaagcttgcgcgctcaacaaaggagattcccgatgagatctcaatcctactcctgggtgttgcccactttaaaggccagtgggtcaccaaatttgattcgcgaaagacgtccctcgaagacttttacctagatgaagagaggacagtgcgggtgccaatgatgtcagatcccaaggcagtgctgcgttatggcttagattccgacctgtcctgtaaaatcgcacaactaccgcttacaggctccatgtctatcattttctttttacccctaaaagtaacacaaaacctcactttgattgaggaaagcctcacatcagagttcattcacgatatagaccgggagctgaagaccgtgcaagcggtcctgactgtgcccaagctgaaactatcttatgagggcgaggttacgaaaagccttcaggagatgaaattgcagtctctattcgattcaccagacttttctaagattaccgggaaaccaatcaagctgacgcaggttgaacacagagcggggttcgagtggaacgaagacggcgcaggtactactccctcacccggcctccagccagctcacctcacctttccccttgactatcacctgaaccagccatttattttcgtgctgagggacaccgatacgggcgctctcctattcatcggcaagatcctagatccgaggggtccctag

SEQ ID NO: 130243 - DNA, 1257 bp, Artificial Sequence
  derived and/or modified sequence
atgcaggccctggtgctgctgctgtgcatcggggccctgctgggccacagcagctgccagaacccagccagccccccagaggagggcagcccagaccctgacagcactggagccctggtggaggaggaggaccccttcttcaaggtgcctgtgaacaagctggccgctgctgtgagcaactttggctatgacctgtacagagtgcgcagcagcaccagccccaccaccaacgtgctgctgagccccctgtctgtggccacagccctgagcgccctgagcctgggcgctgagcagaggacagagagcatcatccaccgggccctgtactatgacctgatcagcagcccagacatccacggcacctacaaggagctgctggacacagtgacagccccccagaagaacctgaagagcgccagccgcatcgtgtttgagaagaagctgcgcatcaagagcagctttgtggcccccctggagaagagctatggcacccggccccgggtgctgaccggcaacccccggctggacctgcaggagatcaacaactgggtgcaggcccagatgaagggcaagctggcccggagcaccaaggagatcccagatgagatcagcatcctgctgctgggcgtggcccacttcaagggccagtgggtgaccaagtttgacagcaggaagaccagcctggaggacttctacctggatgaggagaggacagtgcgggtgcccatgatgtctgaccccaaggctgtgctgcgctatggcctggacagcgacctgagctgcaagatcgcccagctgcccctgaccggctccatgagcatcatcttcttcctgcccctgaaggtgacccagaacctgaccctgattgaggagagcctgaccagcgagttcatccatgacatcgaccgggagctgaagacagtgcaggccgtgctgactgtgcccaagctgaagctgtcctatgaaggagaggtgaccaagagcctgcaggagatgaagctgcagagcctgtttgacagcccagacttcagcaagatcaccgggaagcccatcaagctgacccaggtggagcaccgggccggctttgagtggaatgaagatggagctggcaccacccccagccctggcctgcagcctgcccacctgaccttccccctggactaccacctgaaccagcccttcatctttgtgctgcgggacacagacacaggagccctgctcttcatcggcaagatcctggacccccggggcccctag

SEQ ID NO: 130244 - DNA, 1257 bp, Artificial Sequence
  derived and/or modified sequence
atgcaggccctggtgctgctgctgtgcatcggcgccctgctgggccacagcagctgccagaatcctgcaagtcccccggaggaggggtcaccggatcccgactccacgggggcactagtcgaggaagaagacccctttttcaaggttcccgtcaataagcttgcagctgcagtttccaactttggatatgatttatatagggttagatcaagcacctctccgaccacaaatgtgctccttagccccctgtccgtggccaccgccctgtccgccctgtccctgggagccgaacagcgcactgaatctatcatccatagggcgctgtattacgaccttatctcttctcccgacattcacggaacatataaagagctgctagatactgtgaccgcgccccagaagaacctgaagtccgcttctcgcatcgtattcgaaaagaagctccgcatcaagtcctcctttgtggccccacttgaaaaatcctatgggacacgtccgcgcgtgctcactggtaatccgcggctcgacctacaggagatcaataattgggtccaggcgcagatgaaggggaaactagctcgcagtactaaggaaatacctgacgaaattagtatcctgcttctgggggtggctcatttcaaggggcagtgggtgacgaaattcgattcccgaaaaacttccttggaggatttttacttggacgaagagcggacggtgagagtgcctatgatgtctgatccaaaagcagtcctgaggtacgggctggattccgacctttcttgcaagatcgcgcaactgcctctgaccggatctatgtccatcatcttcttcctcccactgaaggtgactcagaaccttactctgatcgaggaatcacttacatccgagttcattcatgatattgatcgggaattgaagaccgtgcaagcagtgttaactgtgcctaagttgaaattgtcgtatgagggcgaagtcacaaaaagcctgcaggagatgaagcttcagagtttgtttgacagcccagatttctccaagatcacagggaagcccatcaagctgactcaggtggagcaccgagcaggcttcgaatggaatgaagacggagcagggactaccccctctcccggcctacaaccagcccacctcacctttcctctggactatcacctgaaccaacccttcatctttgtactgagggacacagacacaggcgccttactcttcatcggaaaaatactggatcctcgcggaccatag

SEQ ID NO: 130245 - DNA, 1257 bp, Artificial Sequence
  derived and/or modified sequence
atgcaggctttagtgctgctgctctgcattggcgctttgcttggtcattcctcgtgtcaaaaccccgcttcgcccccagaagagggttccccagacccggattctaccggggcactcgtagaagaggaagatcctttctttaaggttcccgtcaacaaacttgcagcagccgtctctaacttcggctatgacctgtacagggtgcggagttctaccagcccaacaacaaacgtgttgttatctccactgagcgttgcaactgcacttagtgctctctcacttggcgcagaacagagaaccgagtctattatccacagggccctgtactacgatttgatcagttcacctgacattcatggcacatataaagagcttctcgacacagttacagctcctcagaagaacttgaagtcggccagcagaatcgttttcgagaaaaaactgcggattaagagcagttttgtagcgccactggaaaaaagctatgggaccaggccgcgagtcctgacaggcaacccgagacttgacttgcaggaaatcaacaactgggtacaggcgcagatgaaggggaaacttgcaagatcaacaaaggagatcccagatgaaatcagtatccttctgcttggggtggctcatttcaagggccagtgggtcaccaagttcgattcccggaaaacaagtctcgaagacttttatcttgacgaggagcgcacagtgcgcgttcctatgatgtcggaccctaaagctgtgctgcgatacgggctcgacagcgacttgtcatgtaaaatcgcccagctacctctgacaggcagtatgtcaattatcttcttcctgcccctcaaggtgacacagaatctgacattaattgaggagtcattgactagtgagttcatccatgatattgacagggaactgaagacagtgcaggctgttttgactgtccctaaactgaaactttcatacgaaggcgaggtcactaaaagcctccaggagatgaagctgcaatctttgtttgactcacctgacttcagcaaaattaccggcaaaccgataaagctgacacaggtagagcatagggcgggattcgagtggaacgaggacggtgccggtacaactcccagcccgggtctgcaacccgcacacctcacattcccactcgactatcacctgaaccagccttttatctttgttctgcgggacacagataccggagcgttactgtttattggtaagatcttggatccgagaggaccttag

SEQ ID NO: 130246 - DNA, 1539 bp, Artificial Sequence
  derived and/or modified sequence
agtgcaggtcgctttaagaaaggagtagctgtaatctgaagcctgctggacgctggattagaaggcagcaaaaaaagctctgtgctggctggagccccctcagtgtgcaggcttagagggactaggctgggtgtggagctgcagcgtatccacaggccccaggatgcaggccctggtgctactcctctgcattggagccctcctcgggcacagcagctgccagaaccctgccagccccccggaggagggctccccagaccccgacagcacaggggcgctggtggaggaggaggatcctttcttcaaagtccccgtgaacaagctggcagcggctgtctccaacttcggctatgacctgtaccgggtgcgatccagcacgagccccacgaccaacgtgctcctgtctcctctcagtgtggccacggccctctcggccctctcgctgggagcggagcagcgaacagaatccatcattcaccgggctctctactatgacttgatcagcagcccagacatccatggtacctataaggagctccttgacacggtcactgccccccagaagaacctcaagagtgcctcccggatcgtctttgagaagaagctgcgcataaaatccagctttgtggcacctctggaaaagtcatatgggaccaggcccagagtcctgacgggcaaccctcgcttggacctgcaagagatcaacaactgggtgcaggcgcagatgaaagggaagctcgccaggtccacaaaggaaattcccgatgagatcagcattctccttctcggtgtggcgcacttcaaggggcagtgggtaacaaagtttgactccagaaagacttccctcgaggatttctacttggatgaagagaggaccgtgagggtccccatgatgtcggaccctaaggctgttttacgctatggcttggattcagatctcagctgcaagattgcccagctgcccttgaccggaagcatgagtatcatcttcttcctgcccctgaaagtgacccagaatttgaccttgatagaggagagcctcacctccgagttcattcatgacatagaccgagaactgaagaccgtgcaggcggtcctcactgtccccaagctgaagctgagttatgaaggcgaagtcaccaagtccctgcaggagatgaagctgcaatccttgtttgattcaccagactttagcaagatcacaggcaaacccatcaagctgactcaggtggaacaccgggctggctttgagtggaacgaggatggggcgggaaccacccccagcccagggctgcagcctgcccacctcaccttcccgctggactatcaccttaaccagcctttcatcttcgtactgagggacacagacacaggggcccttctcttcattggcaagattctggaccccaggggcccctaatatcccagtttaatattccaataccctagaagaaaacccgagggacagcagattccacaggacacgaaggctgcccctgtaaggtttcaatgcatacaataaaagagctttatccctaa

SEQ ID NO: 130247 - DNA, 1257 bp, Artificial Sequence
  derived and/or modified sequence
atgcaggccctggtgctgctgctgtgcatcggcgccctgctgggccacagcagctgccagaaccccgccagcccccccgaggagggcagccccgaccccgacagcaccggcgccctggtggaggaggaggaccccttcttcaaggtgcccgtgaacaagctggccgccgccgtgagcaacttcggctacgacctgtacagagtgagaagcagcaccagccccaccaccaacgtgctgctgagccccctgagcgtggccaccgccctgagcgccctgagcctgggcgccgagcagagaaccgagagcatcatccacagagccctgtactacgacctgatcagcagccccgacatccacggcacctacaaggagctgctggacaccgtgaccgccccccagaagaacctgaagagcgccagcagaatcgtgttcgagaagaagctgagaatcaagagcagcttcgtggcccccctggagaagagctacggcaccagacccagagtgctgaccggcaaccccagactggacctgcaggagatcaacaactgggtgcaggcccagatgaagggcaagctggccagaagcaccaaggagatccccgacgagatcagcatcctgctgctgggcgtggcccacttcaagggccagtgggtgaccaagttcgacagcagaaagaccagcctggaggacttctacctggacgaggagagaaccgtgagagtgcccatgatgagcgaccccaaggccgtgctgagatacggcctggacagcgacctgagctgcaagatcgcccagctgcccctgaccggcagcatgagcatcatcttcttcctgcccctgaaggtgacccagaacctgaccctgatcgaggagagcctgaccagcgagttcatccacgacatcgacagagagctgaagaccgtgcaggccgtgctgaccgtgcccaagctgaagctgagctacgagggcgaggtgaccaagagcctgcaggagatgaagctgcagagcctgttcgacagccccgacttcagcaagatcaccggcaagcccatcaagctgacccaggtggagcacagagccggcttcgagtggaacgaggacggcgccggcaccacccccagccccggcctgcagcccgcccacctgaccttccccctggactaccacctgaaccagcccttcatcttcgtgctgagagacaccgacaccggcgccctgctgttcatcggcaagatcctggaccccagaggcccctag

SEQ ID NO: 130248 - protein, 1290 aa, Artificial Sequence
  derived and/or modified sequence
MSGPLEGADGGGDPRPGESFCPGGVPSPGPPQHRPCPGPSLADDTDANSNGSSGNESNGHESRGASQRSSHSSSSGNGKDSALLETTESSKSTNSQSPSPPSSSIAYSLLSASSEQDNPSTSGCSSEQSARARTQKELMTALRELKLRLPPERRGKGRSGTLATLQYALACVKQVQANQEYYQQWSLEEGEPCSMDMSTYTLEELEHITSEYTLQNQDTFSVAVSFLTGRIVYISEQAAVLLRCKRDVFRGTRFSELLAPQDVGVFYGSTAPSRLPTWGTGASAGSGLRDFTQEKSVFCRIRGGPDRDPGPRYQPFRLTPYVTKIRVSDGAPAQPCCLLIAERIHSGYEAPRIPPDKRIFTTRHTPSCLFQDVDERAAPLLGYLPQDLLGAPVLLFLHPEDRPLMLAIHKKILQLAGQPFDHSPIRFCARNGEYVTMDTSWAGFVHPWSRKVAFVLGRHKVRTAPLNEDVFTPPAPSPAPSLDTDIQELSEQIHRLLLQPVHSPSPTGLCGVGAVTSPGPLHSPGSSSDSNGGDAEGPGPPAPVTFQQICKDVHLVKHQGQQLFIESRARPQSRPRLPATGTFKAKALPCQSPDPELEAGSAPVQAPLALVPEEAERKEASSCSYQQINCLDSILRYLESCNLPSTTKRKCASSSSYTTSSASDDDRQRTGPVSVGTKKDPPSAALSGEGATPRKEPVVGGTLSPLALANKAESVVSVTSQCSFSSTIVHVGDKKPPESDIIMMEDLPGLAPGPAPSPAPSPTVAPDPAPDAYRPVGLTKAVLSLHTQKEEQAFLSRFRDLGRLRGLDSSSTAPSALGERGCHHGPAPPSRRHHCRSKAKRSRHHQNPRAEAPCYVSHPSPVPPSTPWPTPPATTPFPAVVQPYPLPVFSPRGGPQPLPPAPTSVPPAAFPAPLVTPMVALVLPNYLFPTPSSYPYGALQTPAEGPPTPASHSPSPSLPALAPSPPHRPDSPLFNSRCSSPLQLNLLQLEELPRAEGAAVAGGPGSSAGPPPPSAEAAEPEARLAEVTESSNQDALSGSSDLLELLLQEDSRSGTGSAASGSLGSGLGSGSGSGSHEGGSTSASITRSSQSSHTSKYFGSIDSSEAEAGAARGGAEPGDQVIKYVLQDPIWLLMANADQRVMMTYQVPSRDMTSVLKQDRERLRAMQKQQPRFSEDQRRELGAVHSWVRKGQLPRALDVMACVDCGSSTQDPGHPDDPLFSELDGLGLEPMEEGGGEQGSSGGGSGEGEGCEEAQGGAKASSSQDLAMEEEEEGRSSSSPALPTAGNCTS

SEQ ID NO: 130249 - protein, 859 aa, Artificial Sequence
  derived and/or modified sequence
MLEVLEEIWSVRARRAHRPCPGPSLADDTDANSNGSSGNESNGHESRGASQRSSHSSSSGNGKDSALLETTESSKSTNSQSPSPPSSSIAYSLLSASSEQDNPSTSGCSSEQSARARTQKELMTALRELKLRLPPERRGKGRSGTLATLQYALACVKQVQANQEYYQQWSLEEGEPCSMDMSTYTLEELEHITSEYTLQNQDTFSVAVSFLTGRIVYISEQAAVLLRCKRDVFRGTRFSELLAPQDVGVFYGSTAPSRLPTWGTGASAGSGLRDFTQEKSVFCRIRGGPDRDPGPRYQPFRLTPYVTKIRVSDGAPAQPCCLLIAERIHSGYEAPRIPPDKRIFTTRHTPSCLFQDVDERAAPLLGYLPQDLLGAPVLLFLHPEDRPLMLAIHKKILQLAGQPFDHSPIRFCARNGEYVTMDTSWAGFVHPWSRKVAFVLGRHKVRTAPLNEDVFTPPAPSPAPSLDTDIQELSEQIHRLLLQPVHSPSPTGLCGVGAVTSPGPLHSPGSSSDSNGGDAEGPGPPAPVTFQQICKDVHLVKHQGQQLFIESRARPQSRPRLPATGTFKAKALPCQSPDPELEAGSAPVQAPLALVPEEAERKEASSCSYQQINCLDSILRYLESCNLPSTTKRKCASSSSYTTSSASDDDRQRTGPVSVGTKKDPPSAALSGEGATPRKEPVVGGTLSPLALANKAESVVSVTSQCSFSSTIVHVGDKKPPESDIIMMEDLPGLAPGPAPSPAPSPTVAPDPAPDAYRPVGLTKAVLSLHTQKEEQAFLSRFRDLGRLRGLDSSSTAPSALGERGSHLGPPGACPLPSLGLDCWGVGLKGGVSAPGTQAGVASTTRPCLGTGPSLASPH

SEQ ID NO: 130250 - DNA, 4717 bp, Artificial Sequence
  derived and/or modified sequence
attatgcaacccgcctccccgcccgcccggtggagcttccactcggctgcgggctggagcggcggcgggcaggcgtgcggaggacactcctgcgaccaggtactggctgtgatcgaacttctcaaccctcagagacttagatcttccacctcactccctcagccaagcctccaggccccctcgtgcatccgtggtggcctctctgccttctctgttctgttctccccatggcccagacatgagtggccccctagaaggggctgatgggggaggggaccccaggcctggggaatcattttgtcctgggggcgtcccatcccctgggcccccacagcaccggccttgcccaggccccagcctggccgatgacaccgatgccaacagcaatggttcaagtggcaatgagtccaacgggcatgagtctagaggcgcatctcagcggagctcacacagctcctcctcaggcaacggcaaggactcagccctgctggagaccactgagagcagcaagagcacaaactctcagagcccatccccacccagcagttccattgcctacagcctcctgagtgccagctcagagcaggacaacccgtccaccagtggctgcagcagtgaacagtcagcccgggcaaggactcagaaggaactcatgacagcacttcgagagctcaagcttcgactgccgccagagcgccggggcaagggccgctctgggaccctggccacgctgcagtacgcactggcctgtgtcaagcaggtgcaggccaaccaggaatactaccagcagtggagcctggaggagggcgagccttgctccatggacatgtccacctataccctggaggagctggagcacatcacgtctgagtacacacttcagaaccaggataccttctcagtggctgtctccttcctgacgggccgaatcgtctacatttcggagcaggcagccgtcctgctgcgttgcaagcgggacgtgttccggggtacccgcttctctgagctcctggctccccaggatgtgggagtcttctatggttccactgctccatctcgcctgcccacctggggcacaggggcctcagcaggttcaggcctcagggactttacccaggagaagtccgtcttctgccgtatcagaggaggtcctgaccgggatccagggcctcggtaccagccattccgcctaaccccgtatgtgaccaagatccgggtctcagatggggcccctgcacagccgtgctgcctgctgattgcagagcgcatccattcgggttacgaagctccccggataccccctgacaagaggattttcactacgcggcacacacccagctgcctcttccaggatgtggatgaaagggctgcccccctgctgggctacctgccccaggacctcctgggggccccagtgctcctgttcctgcatcctgaggaccgacccctcatgctggctatccacaagaagattctgcagttggcgggccagccctttgaccactcccctatccgcttctgtgcccgcaacggggagtatgtcaccatggacaccagctgggctggctttgtgcacccctggagccgcaaggtagccttcgtgttgggccgccacaaagtacgcacggcccccctgaatgaggacgtgttcactcccccggcccccagcccagctccctccctggacactgatatccaggagctgtcagagcagatccaccggctgctgctgcagcccgtccacagccccagccccacgggactctgtggagtcggcgccgtgacatccccaggccctctccacagccctgggtcctccagtgatagcaacgggggtgatgcagaggggcctgggcctcctgcgccagtgactttccagcagatctgtaaggatgtgcatctggtgaagcaccagggccagcagctttttattgagtctcgggcccggcctcagtcccggccccgcctccctgctacaggcacgttcaaggccaaggcccttccctgccaatccccagacccagagctggaggcgggttctgctcccgtccaggccccactagccttggtccctgaggaggccgagaggaaagaagcctccagctgctcctaccagcagatcaactgcctggacagcatcctcaggtacctggagagctgcaacctccccagcaccactaagcgtaaatgtgcctcctcctcctcctataccacctcctcagcctctgacgacgacaggcagaggacaggtccagtctctgtggggaccaagaaagatccgccgtcagcagcgctgtctggggagggggccaccccacggaaggagccagtggtgggaggcaccctgagcccgctcgccctggccaataaggcggagagtgtggtgtccgtcaccagtcagtgtagcttcagctccaccatcgtccatgtgggagacaagaagcccccggagtcggacatcatcatgatggaggacctgcctggcctagccccaggcccagcccccagcccagcccccagccccacagtagcccctgacccagccccagacgcctaccgtccagtggggctgaccaaggccgtgctgtccctgcacacacagaaggaagagcaagccttcctcagccgcttccgagacctgggcaggctgcgtggactcgacagctcttccacagctccctcagcccttggcgagcgaggctgccaccacggccccgcacccccaagccgccgacaccactgccgatccaaagccaagcgctcacgccaccaccagaaccctcgggctgaagcgccctgctatgtctcacacccctcacccgtgccaccctccaccccctggcccaccccaccagccactacccccttcccagcggttgtccagccctaccctctcccagtgttctctcctcgaggaggcccccagcctcttccccctgctcccacatctgtgcccccagctgctttccccgcccctttggtgaccccaatggtggccttggtgctccctaactatctgttcccaaccccatccagctatccttatggggcactccagacccctgctgaagggcctcccactcctgcctcgcactccccttctccatccttgcccgccctcgccccgagtcctcctcaccgcccggactctccactgttcaactcgagatgcagctctccactccagctcaatctgctgcagctggaggagctcccccgtgctgagggggctgctgttgcaggaggccctgggagcagtgccgggcccccacctcccagtgcggaggctgctgagccagaggccagactggcggaggtcactgagtcctccaatcaggacgcactttccggctccagtgacctgctcgaacttctgctgcaagaggactcgcgctccggcacaggctccgcagcctcgggctccttgggctctggcttgggctctgggtctggttcaggctcccatgaagggggcagcacctcagccagcatcactcgcagcagccagagcagccacacaagcaaatactttggcagcatcgactcttccgaggctgaggctggggctgctcggggcggggctgagcctggggaccaggtgattaagtacgtgctccaggatcccatttggctgctcatggccaatgctgaccagcgcgtcatgatgacctaccaggtgccctccagggacatgacctctgtgctgaagcaggatcgggagcggctccgagccatgcagaagcagcagcctcggttttctgaggaccagcggcgggaactgggtgctgtgcactcctgggtccggaagggccaactgcctcgggctcttgatgtgatggcctgtgtggactgtgggagcagcacccaagatcctggtcaccctgatgacccactcttctcagagctggatggactggggctggagcccatggaagagggtggaggcgagcagggcagcagcggtggcggcagtggtgagggagagggctgcgaggaggcccaaggcggggccaaggcttcaagctctcaggacttggctatggaggaggaggaagaaggcaggagctcatccagtccagccttacctacagcaggaaactgcaccagctagactccattctgggaccatctccaggagtccatgagaggctttcttctcctatgtcccaattctcagaactcagatgtggctagaccaaccagtgggaaactgccccagcttctcccaccatagggggccggacccccatcaccagcctaggatccaggggctgcctctggcctcttagggagcagagagcagaactccgcagcccagcccagaggagtgtcacctcccacctttggagaggaatccttccctcccctggacaaagttgctgacaagctgctgaagtggcctctccatattccagctgagcctgaatctgactcttgagggttggggctgcacttatttattgcggggagacagctctctctcccacctcctccccagatgggaggagagcctgaggcccaagcaggacccgggggttccagcccctagctgctctggagtgggggaggttggtggaccatggagtccctggtgctgcccctcaggtgggacccaggcgttctcagctgtaccctctgccgatggcatttgtgtttttgatatttgtgtctgttactacttttttaatacaaaaagataaaaacgcccaaaaaaaaa

SEQ ID NO: 130251 - DNA, 2580 bp, Artificial Sequence
  derived and/or modified sequence
atgctggaggtgctggaggagatctggagcgtgagagccagaagagcccacagaccctgccccggccccagcctggccgacgacaccgacgccaacagcaacggcagcagcggcaacgagagcaacggccacgagagcagaggcgccagccagagaagcagccacagcagcagcagcggcaacggcaaggacagcgccctgctggagaccaccgagagcagcaagagcaccaacagccagagccccagcccccccagcagcagcatcgcctacagcctgctgagcgccagcagcgagcaggacaaccccagcaccagcggctgcagcagcgagcagagcgccagagccagaacccagaaggagctgatgaccgccctgagagagctgaagctgagactgccccccgagagaagaggcaagggcagaagcggcaccctggccaccctgcagtacgccctggcctgcgtgaagcaggtgcaggccaaccaggagtactaccagcagtggagcctggaggagggcgagccctgcagcatggacatgagcacctacaccctggaggagctggagcacatcaccagcgagtacaccctgcagaaccaggacaccttcagcgtggccgtgagcttcctgaccggcagaatcgtgtacatcagcgagcaggccgccgtgctgctgagatgcaagagagacgtgttcagaggcaccagattcagcgagctgctggccccccaggacgtgggcgtgttctacggcagcaccgcccccagcagactgcccacctggggcaccggcgccagcgccggcagcggcctgagagacttcacccaggagaagagcgtgttctgcagaatcagaggcggccccgacagagaccccggccccagataccagcccttcagactgaccccctacgtgaccaagatcagagtgagcgacggcgcccccgcccagccctgctgcctgctgatcgccgagagaatccacagcggctacgaggcccccagaatcccccccgacaagagaatcttcaccaccagacacacccccagctgcctgttccaggacgtggacgagagagccgcccccctgctgggctacctgccccaggacctgctgggcgcccccgtgctgctgttcctgcaccccgaggacagacccctgatgctggccatccacaagaagatcctgcagctggccggccagcccttcgaccacagccccatcagattctgcgccagaaacggcgagtacgtgaccatggacaccagctgggccggcttcgtgcacccctggagcagaaaggtggccttcgtgctgggcagacacaaggtgagaaccgcccccctgaacgaggacgtgttcaccccccccgcccccagccccgcccccagcctggacaccgacatccaggagctgagcgagcagatccacagactgctgctgcagcccgtgcacagccccagccccaccggcctgtgcggcgtgggcgccgtgaccagccccggccccctgcacagccccggcagcagcagcgacagcaacggcggcgacgccgagggccccggcccccccgcccccgtgaccttccagcagatctgcaaggacgtgcacctggtgaagcaccagggccagcagctgttcatcgagagcagagccagaccccagagcagacccagactgcccgccaccggcaccttcaaggccaaggccctgccctgccagagccccgaccccgagctggaggccggcagcgcccccgtgcaggcccccctggccctggtgcccgaggaggccgagagaaaggaggccagcagctgcagctaccagcagatcaactgcctggacagcatcctgagatacctggagagctgcaacctgcccagcaccaccaagagaaagtgcgccagcagcagcagctacaccaccagcagcgccagcgacgacgacagacagagaaccggccccgtgagcgtgggcaccaagaaggacccccccagcgccgccctgagcggcgagggcgccacccccagaaaggagcccgtggtgggcggcaccctgagccccctggccctggccaacaaggccgagagcgtggtgagcgtgaccagccagtgcagcttcagcagcaccatcgtgcacgtgggcgacaagaagccccccgagagcgacatcatcatgatggaggacctgcccggcctggcccccggccccgcccccagccccgcccccagccccaccgtggcccccgaccccgcccccgacgcctacagacccgtgggcctgaccaaggccgtgctgagcctgcacacccagaaggaggagcaggccttcctgagcagattcagagacctgggcagactgagaggcctggacagcagcagcaccgcccccagcgccctgggcgagagaggcagccacctgggcccccccggcgcctgccccctgcccagcctgggcctggactgctggggcgtgggcctgaagggcggcgtgagcgcccccggcacccaggccggcgtggccagcaccaccagaccctgcctgggcaccggccccagcctggccagcccccactag

SEQ ID NO: 130252 - DNA, 2981 bp, Artificial Sequence
  derived and/or modified sequence
agtgtaatgctagaagtcctagaagaaatttggagtgtgcgtgcgcgccgagcgcaccggccttgcccaggccccagcctggccgatgacaccgatgccaacagcaatggttcaagtggcaatgagtccaacgggcatgagtctagaggcgcatctcagcggagctcacacagctcctcctcaggcaacggcaaggactcagccctgctggagaccactgagagcagcaagagcacaaactctcagagcccatccccacccagcagttccattgcctacagcctcctgagtgccagctcagagcaggacaacccgtccaccagtggctgcagcagtgaacagtcagcccgggcaaggactcagaaggaactcatgacagcacttcgagagctcaagcttcgactgccgccagagcgccggggcaagggccgctctgggaccctggccacgctgcagtacgcactggcctgtgtcaagcaggtgcaggccaaccaggaatactaccagcagtggagcctggaggagggcgagccttgctccatggacatgtccacctataccctggaggagctggagcacatcacgtctgagtacacacttcagaaccaggataccttctcagtggctgtctccttcctgacgggccgaatcgtctacatttcggagcaggcagccgtcctgctgcgttgcaagcgggacgtgttccggggtacccgcttctctgagctcctggctccccaggatgtgggagtcttctatggttccactgctccatctcgcctgcccacctggggcacaggggcctcagcaggttcaggcctcagggactttacccaggagaagtccgtcttctgccgtatcagaggaggtcctgaccgggatccagggcctcggtaccagccattccgcctaaccccgtatgtgaccaagatccgggtctcagatggggcccctgcacagccgtgctgcctgctgattgcagagcgcatccattcgggttacgaagctccccggataccccctgacaagaggattttcactacgcggcacacacccagctgcctcttccaggatgtggatgaaagggctgcccccctgctgggctacctgccccaggacctcctgggggccccagtgctcctgttcctgcatcctgaggaccgacccctcatgctggctatccacaagaagattctgcagttggcgggccagccctttgaccactcccctatccgcttctgtgcccgcaacggggagtatgtcaccatggacaccagctgggctggctttgtgcacccctggagccgcaaggtagccttcgtgttgggccgccacaaagtacgcacggcccccctgaatgaggacgtgttcactcccccggcccccagcccagctccctccctggacactgatatccaggagctgtcagagcagatccaccggctgctgctgcagcccgtccacagccccagccccacgggactctgtggagtcggcgccgtgacatccccaggccctctccacagccctgggtcctccagtgatagcaacgggggtgatgcagaggggcctgggcctcctgcgccagtgactttccagcagatctgtaaggatgtgcatctggtgaagcaccagggccagcagctttttattgagtctcgggcccggcctcagtcccggccccgcctccctgctacaggcacgttcaaggccaaggcccttccctgccaatccccagacccagagctggaggcgggttctgctcccgtccaggccccactagccttggtccctgaggaggccgagaggaaagaagcctccagctgctcctaccagcagatcaactgcctggacagcatcctcaggtacctggagagctgcaacctccccagcaccactaagcgtaaatgtgcctcctcctcctcctataccacctcctcagcctctgacgacgacaggcagaggacaggtccagtctctgtggggaccaagaaagatccgccgtcagcagcgctgtctggggagggggccaccccacggaaggagccagtggtgggaggcaccctgagcccgctcgccctggccaataaggcggagagtgtggtgtccgtcaccagtcagtgtagcttcagctccaccatcgtccatgtgggagacaagaagcccccggagtcggacatcatcatgatggaggacctgcctggcctagccccaggcccagcccccagcccagcccccagccccacagtagcccctgacccagccccagacgcctaccgtccagtggggctgaccaaggccgtgctgtccctgcacacacagaaggaagagcaagccttcctcagccgcttccgagacctgggcaggctgcgtggactcgacagctcttccacagctccctcagcccttggcgagcgaggtagccacctggggcctcctggagcctgccctctgcccagtctaggactggattgttggggggtgggtcttaagggaggtgtttctgctccagggacccaggctggtgttgcttccaccactaggccctgcctagggacaggcccctcgctagcttctccccactaggatggggttccgggctgcagccagaggagggcagcctggggggatggcactgggatgggcaggcagaggtgctgtctccaggtaagcgacttcaggcctagcctgggggcaggggcaggaagtatgcccacttaggagtcagttgtcactgatgaagagacatgcatagattctgggccaactctgggtggggtctgggcttcaagggcaggtggaaggcagcccctccaggtgcctgagggagatcccctgcaggcagacgcaggactcaggactgggctttccagccccactcttcactccattgcaagctaggcagaatacggcctcgatgggcaggaggaatgcctaggctggcagtgcccacaggagtttggcggaccagagccatctgt

SEQ ID NO: 130253 - DNA, 3873 bp, Artificial Sequence
  derived and/or modified sequence
atgtccggtcctctggagggggcagacggaggcggggatccacgcccaggagagagcttctgccccgggggggtgccgtcccccggacctccccagcatcgcccctgccccgggcctagcctggcagacgacacggacgctaattccaatgggtcctctggcaacgagtcaaacggacacgaatccaggggggcttctcaacgatctagccactcctctagctcagggaacggtaaggattcagccctgctcgaaactaccgagagttctaagtccacaaattcccaatcgcccagcccaccctcgagctcgattgcctactctctgctgagtgcaagcagcgagcaggacaatcccagcactagtgggtgctctagtgagcagtccgcccgggcgcggacccagaaagagctgatgactgctcttagagagcttaagttacgcttgccacctgaacgcagaggtaaagggagaagcggaactctcgctacactacagtacgccctggcatgcgtgaagcaagtccaggccaaccaggaatattaccagcagtggagtctggaggaaggcgagccctgttccatggacatgtctacctacactctggaagagctggagcacataacatccgagtatacacttcagaaccaggacacttttagtgtggccgtgtcgttcttgaccggcagaatcgtctacattagcgagcaagccgccgtgttgctgaggtgtaagagggatgtcttccggggaactaggttctccgaactcctggcccctcaggacgttggggtgttctatgggagtactgccccgtccaggcttccgacatgggggacaggggcatccgccggatcaggtctgagggacttcactcaggagaagtcagtgttctgtcgaattcgcggtggacccgatagggacccaggtccccggtaccaacctttccgattaacgccctacgttacgaagatccgagtgtcagatggggcacccgcgcagccctgctgcctgctgatcgctgagagaatccatagcggctacgaggcgcctcgcatacctccagacaagagaatcttcacaaccaggcataccccttcctgcctgtttcaggatgtcgacgagcgagccgctcccctgttgggttaccttccccaagacttattaggggccccggttcttttgttcttgcaccccgaggaccggcctctcatgcttgcaattcataagaagatcctgcagttagctggacagccttttgaccattcaccaatccgcttttgcgcaaggaatggcgaatacgtcacaatggatacctcctgggctggcttcgtccacccctggtctagaaaagtcgcctttgtgttgggcagacacaaggttagaacagctcccctcaacgaggatgtgtttacaccaccagccccttcccccgcaccatcgctcgacaccgatattcaggagctgagtgagcagatccacaggctgcttctgcaaccagtgcattcaccatccccaacgggcctttgcggcgtgggagcagttacatcccctggtcccctgcactccccagggagcagcagcgattctaacgggggcgacgctgaggggcctggaccacccgccccagtgacatttcaacaaatttgcaaggacgtacacctcgtaaagcaccaaggtcagcagctctttatcgagtcgcgcgctcgtccacagagtcgcccgcgactgcccgcaacaggcacctttaaggcaaaagccctgccgtgccagagtccagacccagaacttgaagcggggagcgctccagtgcaggcccccctggcacttgttccagaggaggcggaacggaaggaggcctcaagctgcagctaccagcagatcaactgtctggattcaatactacggtacctcgagagttgcaacttgccctctacaacaaaacggaaatgtgctagctccagttcttacaccacatctagcgcctcagatgacgatagacagaggacaggtcctgtgtctgtggggacaaaaaaagaccccccctctgccgccctgtccggagaaggggcaacacctcggaaggaacccgtggtcggagggacattgtcccctctagctctggctaacaaggccgaatcagttgtttctgtaacttcccagtgtagtttctcgtccacaatcgtgcatgttggcgacaagaagccccctgagtcggacatcatcatgatggaagatcttccgggtttggcccctgggccagctccatctcctgccccttcgccaacagtagcaccggaccctgcaccagacgcctatagacccgttggcttgaccaaagccgtgctgtcgctgcacacacagaaggaagagcaggcttttctctctcgctttagggatctagggaggttgcggggcttggactctagctcaacagccccttccgctttgggagaaaggggatgccatcacggtccagcccctccctcccgacgccatcattgtaggtctaaggctaagaggagtcgacaccaccaaaacccccgggccgaagcgccttgctacgtgtctcacccgtcccctgtaccgccctccactccttggccgacgccaccggcaacaaccccttttcccgccgtggtccaaccttatcccctgcccgtgtttagccctcgcggtggacctcagccgctacctcctgccccaacctcggtcccacctgccgcgttccccgcaccgcttgtgacacctatggtggccctggtgctacctaattatctatttcccacaccgtccagctatccatatggcgcattacagacgccagcagaagggcccccgaccccagcctctcattctccaagcccttctctcccagcgctggcgccctcaccccctcataggccagatagccctctattcaattcaaggtgctcctccccgttgcagcttaacctgctgcagcttgaggaactcccaagggcagagggcgccgctgtggccggcggtccaggatccagtgccggcccacctccaccttcagctgaggcagcagagcctgaggccaggctagctgaggtcacagagagttccaatcaggatgccctgtccggttccagtgaccttctcgagctgctgctccaggaagacagccgaagcgggaccggttcagccgcgagtgggtcactcggatcgggcctgggtagcggcagtggcagtggatcacatgagggcggaagcacctctgcctcaatcaccaggagctctcagagcagtcacactagcaaatatttcggaagcatagatagtagcgaagccgaagcaggagcggccagagggggggccgagcccggcgatcaagtgatcaagtatgttctccaggacccaatctggttactcatggcgaacgctgaccaacgcgttatgatgacttatcaagttccgagcagagacatgacaagcgtcctgaaacaggatcgggagcgcctgagagccatgcagaagcagcaacccaggttctcagaagatcagcggcgcgagctcggcgctgtgcattcatgggtccggaaagggcaactcccacgagctctcgacgtgatggcctgcgttgactgcggtagttccacacaagaccccggccacccagatgacccgctgttctccgagctggatggactgggtctagagcctatggaagaaggcggcggcgagcaaggatcatcgggcggtggttccggggagggtgagggctgtgaagaggcacaaggcggggcaaaggccagcagtagtcaggacctggccatggaggaggaagaggagggtaggtcaagttcctcacctgccttacccactgctggcaattgcacatcctag

SEQ ID NO: 130254 - DNA, 2580 bp, Artificial Sequence
  derived and/or modified sequence
atgctagaagtcctggaagagatctggagtgtgcgagccaggagggcccatcgtccctgtccggggccgtccctggctgacgacaccgatgctaattccaacgggagttccggcaacgagagcaacgggcatgaatcccgtggagccagtcagcggagtagccatagttcttcatcaggtaacggcaaggactcagccctcctcgaaacgactgagtcaagcaagagcactaatagccagtccccctcaccgcctagctcctcaatcgcgtattctctcctgtcggctagttcagagcaggacaacccaagcactagtggatgtagttcggaacaatccgctcgagctaggacccagaaggagctgatgactgcactgagagaactgaagcttcgattacccccggagcgtcgtggtaagggtcggtcaggaacgctcgcgacactgcaatatgcacttgcctgtgtgaaacaggtgcaagccaaccaggaatattatcagcagtggtctcttgaggagggagagccatgttccatggatatgagtacttataccctggaggagctggaacacattaccagtgagtacacattacagaatcaggatactttctcagtcgccgtgtcctttctcaccgggcgtattgtctacatcagtgaacaggccgcagtccttctgcgatgtaagcgagacgtcttcagaggcacacgattttctgaactgttagccccacaggacgtcggagtgttttacgggtctactgccccctctcgcctgccaacctggggtacgggggcaagcgccggaagcggcctgcgagactttactcaagagaaatccgtgttttgtcggatccgaggtgggcctgatagagacccaggaccaaggtaccagccatttcggctgactccatatgtgacaaagatcagagtatcagatggagctcccgcccagccgtgctgtctcctgattgccgagaggattcacagtggttacgaggcccctcggataccccctgacaaacgaatatttaccacgcgacatacacctagctgtctcttccaagacgtcgacgagagagccgctccacttttgggttacctgcctcaagatcttttgggtgcaccagtgttactgttcctgcacccagaggatcgcccactcatgctggctatccacaagaaaattttacaactagcaggccagcccttcgaccatagcccgataagattttgtgcacggaacggagaatatgtgaccatggatacctcatgggcaggttttgtccacccttggtcgcgcaaggtagcgttcgttctcggccgccataaagttcgaacagccccactgaatgaggacgtgtttacacctccagcgccaagccccgccccatcactcgatactgatattcaggagctgagcgagcaaattcaccgactgctgttgcagccggtacactctccaagccctaccgggctgtgcggagtaggggccgtcacctcacccggacctctacacagccccggcagttctagtgacagcaatggcggcgacgcagaaggacctggtcctccagcccccgtcacattccagcagatctgtaaagatgtgcacctggtgaaacatcagggccagcagctgtttattgagtctagggcgcgaccccagtcacgcccccgacttcccgctactgggaccttcaaggcaaaagcacttccgtgccagtcacctgaccccgaactcgaagctggtagcgcccctgtgcaggcacctctcgccttagtaccagaggaggccgaacggaaggaagcttcgtcttgttcttaccaacagataaactgcctggatagcatccttcggtatcttgaatcgtgtaacctcccgtctaccaccaaacggaaatgtgcaagcagctcatcttacactaccagcagtgccagtgacgatgacaggcaacgtactggtcccgtgagtgtgggcactaaaaaagaccctcctagcgccgccctgagtggggaaggcgccaccccaagaaaggagcctgtagttggcgggactctatcccctctggccctggccaacaaagccgagagtgtggttagcgtgacttcacagtgttcattttcaagcactatcgtgcacgtcggcgataagaagcctccggaatcggacataatcatgatggaggatttacccggtctcgcccccggaccggccccttcacccgcacctagcccaaccgtggcaccagatcctgcacctgatgcctacaggccagtcggactcaccaaggccgtgttgagtctgcacacacagaaggaagaacaggcctttctctcacgattccgggacctgggacggctgagagggttagatagtagttcaactgcaccgagcgcactgggcgagcggggctcccaccttggacctccaggcgcctgcccacttccctctttaggtttagactgctggggcgtgggcctgaagggtggcgtgtcggcgcccggtactcaagcaggcgttgccagcaccacacgtccgtgcctcggcacaggcccttctttagcctccccgcactag

SEQ ID NO: 130255 - DNA, 3873 bp, Artificial Sequence
  derived and/or modified sequence
atgagcggccccctggagggcgcagatggcggcggggaccccaggcctggagagagcttctgccctgggggcgtgcccagccctggccccccccagcaccggccctgccccggccccagcctggctgatgacacagatgccaacagcaatggcagcagtggaaatgaaagcaatggccacgagagcagaggagccagccagaggagcagccacagcagcagcagtggaaatggcaaggacagcgccctgctggagaccacagagagcagcaagagcaccaacagccagagccccagcccccccagcagcagcatcgcctacagcctgctgagcgccagcagcgagcaggacaaccccagcaccagcggctgcagcagcgagcagagcgcccgggcccggacccagaaggagctgatgacagccctgcgggagctgaagctgcggctgcccccagagcggcggggcaagggccgcagcggcaccctggccaccctgcagtatgccctggcctgtgtgaagcaggtgcaggccaaccaggagtactaccagcagtggagcctggaggagggggagccctgcagcatggacatgagcacctacaccctggaggagctggagcacatcaccagcgagtacaccctgcagaaccaggacaccttctctgtggccgtgtccttcctgaccggcagaattgtgtacatcagcgagcaggccgctgtgctgctgcgctgcaagagagatgtgttccggggcacccgcttcagcgagctgctggccccccaggatgtgggcgtcttctacggcagcacagcccccagccggctgcccacctggggcaccggggccagcgctggcagcggcctgcgggacttcacccaggagaagagcgtcttctgccgcatccggggcggccctgaccgggaccccggcccccgctaccagcccttccggctgaccccctacgtgaccaagatccgggtgtctgatggagccccagcccagccctgctgcctgctgattgctgagcgcatccacagcggctatgaggccccccgcatccccccagacaagaggatcttcaccaccaggcacacccccagctgcctcttccaggatgtggatgaaagagctgcccccctgctgggctacctgccccaggacctgctgggcgcccctgtgctgctcttcctgcaccctgaggaccggcccctgatgctggccatccacaagaagatcctgcagctggccggccagccctttgaccacagccccatccgcttctgtgccagaaatggagaatatgtgaccatggacacctcctgggccggctttgtgcacccctggagcaggaaggtggcctttgtgctgggccgccacaaggtgaggacagcccccctgaatgaagatgtgttcaccccaccagcccccagccctgcccccagcctggacacagacatccaggagctgtctgagcagatccaccggctgctgctgcagcctgtgcacagccccagccccaccggcctgtgtggggtgggcgctgtgaccagccctggccccctgcacagccctggcagcagcagtgacagcaatggaggagatgctgagggccctggccccccagcccctgtgaccttccagcagatctgcaaggatgtgcacctggtgaagcaccagggccagcagctgttcatcgagagccgggcccggccccagagccggccccggctgcctgccaccggcaccttcaaggccaaggccctgccctgccagagcccagaccctgagctggaggccggcagcgcccctgtgcaggcccccctggccctggtgcctgaggaggccgagaggaaggaggccagcagctgcagctaccagcagatcaactgcctggacagcatcctgcgctacctggagagctgcaacctgcccagcaccaccaagaggaaatgtgccagcagcagcagctacaccaccagcagcgccagtgatgatgaccggcagaggacaggccctgtgtctgtgggcaccaagaaggaccccccatctgctgccctgtctggagagggcgccacccccaggaaggagcctgtggtgggcggcaccctgagccccctggccctggccaacaaggccgagagcgtggtgtctgtgaccagccagtgcagcttcagcagcaccatcgtgcacgtgggggacaagaagcccccagagagtgacatcatcatgatggaggacctgcccggcctggcccctggccctgcccccagccctgcccccagccccaccgtggccccagaccctgccccagatgcctacagacctgtgggcctgaccaaggctgtgctgagcctgcacacccagaaggaggagcaggccttcctgagccgcttccgggacctgggccgcctgcggggcctggacagcagcagcacagcccccagcgccctgggggagcggggctgccaccacggccctgccccacccagcagaagacaccactgccgcagcaaggccaagaggagccgccaccaccagaaccccagggctgaggccccctgctacgtgagccaccccagccctgtgccccccagcaccccctggcccaccccaccagccaccacccccttccctgctgtggtgcagccctaccccctgcctgtgttcagcccccggggcggcccccagcccctgcccccagcccccacctctgtgcccccagctgccttccctgcccccctggtgacccccatggtggccctggtgctgcccaactacctgttccccacccccagcagctacccctacggggccctgcagaccccagctgagggcccccccaccccagccagccacagccccagccccagcctgcctgccctggcccccagccccccccacaggccagacagccccctcttcaacagccgctgcagcagccccctgcagctgaacctgctgcagctggaggagctgcccagggctgagggcgctgctgtggccggcggccctggcagcagcgctggccccccaccacccagcgctgaggccgctgagcctgaggcccggctggccgaggtgacagagagcagcaaccaggatgccctgagcggcagcagtgacctgctggagctgctgctgcaggaggacagccgctctggaactggatctgctgccagcggcagcctgggcagcggcctgggcagcggcagcggcagcggcagccatgagggcggcagcaccagcgccagcatcaccaggagcagccagagcagccacaccagcaagtacttcggcagcattgacagcagcgaggccgaggccggggccgcccggggcggcgctgagcccggggaccaggtgatcaagtatgtgctgcaggaccccatctggctgctgatggccaatgctgaccagagggtgatgatgacctaccaggtgcccagccgggacatgacctctgtgctgaagcaggaccgggagcggctgcgggccatgcagaagcagcagccccgcttcagcgaggaccagaggcgggagctgggcgctgtgcacagctgggtgaggaagggccagctgccccgggccctggatgtgatggcctgtgtggactgtggcagcagcacccaggaccccggccacccagatgaccccctcttcagcgagctggatggcctgggcctggagcccatggaggagggcggcggggagcagggcagcagcggcggcggcagcggggagggggagggctgtgaggaggcccagggcggggccaaggccagcagcagccaggacctggccatggaggaggaggaggagggccgcagcagcagcagccctgccctgcccacagctggcaactgcaccagctag

SEQ ID NO: 130256 - DNA, 2580 bp, Artificial Sequence
  derived and/or modified sequence
atgctggaggtgctggaggagatctggagcgtgcgggcccggcgggcccaccggccctgccccggccccagcctggctgatgacacagatgccaacagcaatggcagcagtggaaatgaaagcaatggccacgagagcagaggagccagccagaggagcagccacagcagcagcagtggaaatggcaaggacagcgccctgctggagaccacagagagcagcaagagcaccaacagccagagccccagcccccccagcagcagcatcgcctacagcctgctgagcgccagcagcgagcaggacaaccccagcaccagcggctgcagcagcgagcagagcgcccgggcccggacccagaaggagctgatgacagccctgcgggagctgaagctgcggctgcccccagagcggcggggcaagggccgcagcggcaccctggccaccctgcagtatgccctggcctgtgtgaagcaggtgcaggccaaccaggagtactaccagcagtggagcctggaggagggggagccctgcagcatggacatgagcacctacaccctggaggagctggagcacatcaccagcgagtacaccctgcagaaccaggacaccttctctgtggccgtgtccttcctgaccggcagaattgtgtacatcagcgagcaggccgctgtgctgctgcgctgcaagagagatgtgttccggggcacccgcttcagcgagctgctggccccccaggatgtgggcgtcttctacggcagcacagcccccagccggctgcccacctggggcaccggggccagcgctggcagcggcctgcgggacttcacccaggagaagagcgtcttctgccgcatccggggcggccctgaccgggaccccggcccccgctaccagcccttccggctgaccccctacgtgaccaagatccgggtgtctgatggagccccagcccagccctgctgcctgctgattgctgagcgcatccacagcggctatgaggccccccgcatccccccagacaagaggatcttcaccaccaggcacacccccagctgcctcttccaggatgtggatgaaagagctgcccccctgctgggctacctgccccaggacctgctgggcgcccctgtgctgctcttcctgcaccctgaggaccggcccctgatgctggccatccacaagaagatcctgcagctggccggccagccctttgaccacagccccatccgcttctgtgccagaaatggagaatatgtgaccatggacacctcctgggccggctttgtgcacccctggagcaggaaggtggcctttgtgctgggccgccacaaggtgaggacagcccccctgaatgaagatgtgttcaccccaccagcccccagccctgcccccagcctggacacagacatccaggagctgtctgagcagatccaccggctgctgctgcagcctgtgcacagccccagccccaccggcctgtgtggggtgggcgctgtgaccagccctggccccctgcacagccctggcagcagcagtgacagcaatggaggagatgctgagggccctggccccccagcccctgtgaccttccagcagatctgcaaggatgtgcacctggtgaagcaccagggccagcagctgttcatcgagagccgggcccggccccagagccggccccggctgcctgccaccggcaccttcaaggccaaggccctgccctgccagagcccagaccctgagctggaggccggcagcgcccctgtgcaggcccccctggccctggtgcctgaggaggccgagaggaaggaggccagcagctgcagctaccagcagatcaactgcctggacagcatcctgcgctacctggagagctgcaacctgcccagcaccaccaagaggaaatgtgccagcagcagcagctacaccaccagcagcgccagtgatgatgaccggcagaggacaggccctgtgtctgtgggcaccaagaaggaccccccatctgctgccctgtctggagagggcgccacccccaggaaggagcctgtggtgggcggcaccctgagccccctggccctggccaacaaggccgagagcgtggtgtctgtgaccagccagtgcagcttcagcagcaccatcgtgcacgtgggggacaagaagcccccagagagtgacatcatcatgatggaggacctgcccggcctggcccctggccctgcccccagccctgcccccagccccaccgtggccccagaccctgccccagatgcctacagacctgtgggcctgaccaaggctgtgctgagcctgcacacccagaaggaggagcaggccttcctgagccgcttccgggacctgggccgcctgcggggcctggacagcagcagcacagcccccagcgccctgggggagcggggcagccacctgggccccccaggggcctgccccctgcccagcctgggcctggactgctggggcgtgggcctgaagggcggcgtgtctgcccctggcacccaggccggcgtggccagcaccacccggccctgcctgggcaccggccccagcctggccagcccccactag

SEQ ID NO: 130257 - DNA, 3873 bp, Artificial Sequence
  derived and/or modified sequence
atgagcggccccctggagggcgccgacggcggcggcgacccccggccaggggagtcattttgccctgggggtgtcccctcccctggacctccccagcatcgaccctgccccggccccagccttgccgatgacacggatgccaacagtaatggcagtagcggaaacgagagcaacggacacgaaagtcggggggcctctcagcgatcatctcacagctcatcatctggcaacgggaaggatagtgctcttttagagacaacagaatcaagcaagtccaccaattctcagtctccctctcccccgtctagctcaatcgcctattcccttctcagcgcttccagcgagcaggataacccatcaactagcggatgtagttccgagcagtcagccagggcaagaacacaaaaagaactgatgacagcgctcagagagctcaaactgagactgcctcctgagcgccgggggaaagggcgcagcggaactctagcaacgcttcagtacgctttggcctgcgtaaaacaggtgcaggcgaatcaagagtattatcagcaatggagcctcgaggaaggtgaaccttgctccatggacatgagcacctataccttagaggaacttgagcatatcactagcgaatataccctgcagaatcaggacaccttctctgtggctgtgtctttcctgacggggagaattgtctacatcagtgagcaagcagcggtcttgctgagatgcaaaagggacgtcttccggggcaccagattctccgaactgctcgctccccaagacgtgggtgtattttatggcagcaccgccccctcacgcttgcccacttggggcaccggcgcaagcgctgggtctggtttgagggacttcacccaggagaaaagtgtattctgtaggattcggggaggtcccgacagagaccctgggccccggtaccagccctttaggttgactccctatgttacaaaaatcagagttagcgacggcgctcctgcacagccctgctgcctactgattgcggaacggatacattctgggtatgaggcccccaggatcccaccagataaaagaatatttaccacacgtcatacaccttcctgcctcttccaagatgttgacgagcgcgccgccccgttgcttggatacttgccccaggatttgctgggagcccctgttttgctctttctccacccagaagatagacctctcatgcttgccatccataaaaaaatcctgcagctcgcgggccagcccttcgatcactcccctatcaggttctgcgccaggaatggagagtacgttactatggatactagctgggccggcttcgtgcacccctggagccgcaaggtggcattcgtgctgggccgccacaaagtgcgaactgcgcccctcaacgaggatgtcttcactccacccgccccttcgccagccccaagtctggacacagatatccaggaattaagtgagcagatccaccgtctgctgctgcagcctgtgcactcccccagccccaccggcttatgtggggtgggagccgtaacctcccccggtccacttcacagtccgggcagcagctccgactcaaacggcggagatgcagagggtccggggccacctgcccccgtgacctttcaacaaatttgtaaagacgtgcatctagtgaagcaccaggggcagcaactattcattgaaagtcgcgcccgcccacaatccaggccaagactacctgcaacaggcacctttaaggcaaaagctctcccatgccaatcacctgatcctgagctggaagcaggctctgcccctgtccaggcccccctggccctcgtcccagaggaagctgagagaaaagaagcctccagctgctcataccagcagattaactgtctggattccatactgcgctatctggagtcatgtaatctgccgtccacaacaaagcggaagtgcgcctcctcctcctcatatacaacatcttctgcttccgacgatgacaggcagcgaacagggcctgtgagtgtcggcaccaagaaggatcccccatccgccgctctgagtggggagggtgccacacctcgcaaagagccagtggtaggcggcacactgtcccccttggctctcgccaataaggctgaaagcgtagtaagtgtaacctctcagtgcagtttcagcagtacaatcgtccacgtaggcgataagaagccgcccgaaagcgacattattatgatggaggacctgccagggctggcccctggcccagctccctctcccgctccatctccaacagttgctcccgatcccgcccctgatgcctaccggccggtgggtttaacaaaagccgtcctttccctgcacactcagaaagaggagcaggccttcttgagcagatttcgagacctcggcaggcttcgtggcctagattcctcgtctaccgctccatcagctctaggagagaggggctgtcaccacggcccggctccaccatctcggcggcatcactgtcgttctaaagctaagagaagcagacaccaccagaacccacgcgcagaagctccatgctacgtgtcacacccttccccagtgcccccctctaccccgtggccaactcctcctgctaccacaccctttccggccgtagtgcagccttatcccctgccagtattctctcctaggggtggcccacaacccctaccccctgctcccacaagcgtaccccctgctgctttccccgctcctctggtcacaccgatggtggctctggtgctgcccaactacctttttcctactccttctagttatccgtatggtgccttgcaaactccggccgaggggcctcccacacccgcttcccatagtccctctcctagtctgcccgcactggctccaagcccaccccaccggccagactccccgctttttaacagtaggtgttcttctccgctgcaattaaacctgctgcagctggaagaactgccacgggctgaaggcgccgccgtcgcaggtggaccaggctcaagcgcggggccgcctccacccagtgctgaggccgcagaacccgaagcaaggctggccgaagtcacagaatcctctaaccaggatgccctgtctggcagttcagacttgctggagctgctgctgcaggaggactcccgctccggcaccggtagtgcagcgtccgggtcactcggatccgggctcggcagcggtagtgggtctggctcccacgagggtggctccacgtcagcgtcaatcacccgctcttcacagagcagccatacttccaaatatttcggctccatcgactcttctgaggcagaggccggggccgctagagggggagcagaaccgggggaccaggtcatcaagtacgttctgcaagaccctatttggcttctgatggccaacgccgaccagcgagtgatgatgacatatcaggtgccatctagagacatgacctcagtcctgaagcaagatcgcgaacgtctgcgggccatgcagaagcagcagccccgttttagcgaggatcagcgccgcgagctgggggcagtccactcatgggtcaggaaggggcagctccctagggccctggacgtgatggcctgcgtcgactgtggtagctcaactcaggaccctggccatcctgacgaccccctcttctcagagttagacggcctgggtctcgagcccatggaggaagggggcggcgagcagggctcgagtggcgggggctcaggcgagggagaagggtgcgaagaggcccagggcggcgcgaaggcatcctcgtcccaggatctggctatggaagaagaagaggaagggcggtcttcttctagccccgcactgcccacagccggtaactgcacctcttag

SEQ ID NO: 130258 - DNA, 2580 bp, Artificial Sequence
  derived and/or modified sequence
atgctggaggtgctggaggagatctggagcgtgcgggcccggcgggctcatcgaccatgccccggaccaagtctcgcagatgacacagacgccaatagcaacggatcctcagggaacgagtctaacggtcatgagtcgcggggcgccagtcagaggtcttcccattcttcaagttctggcaacgggaaagactctgccttattagaaactaccgagtcctccaaatcaacaaacagccagtcgccctctcccccgtcctcatctatcgcctacagcctgctttccgcctcttcagaacaggacaatccctctacaagcgggtgctccagcgagcagtctgctagagcgcggacacagaaagagctgatgaccgcccttagagaactgaagctgcgtctgcccccagaaagacgtggcaaaggcagatccggcacactggccaccctacaatacgctctggcctgcgtaaagcaagtccaagctaatcaagagtattatcagcagtggtctcttgaagaaggggagccatgttcaatggacatgtccacctatactctcgaagaactggagcatataacatccgagtacacactccagaaccaggacacatttagtgttgctgtctcattcttgactgggcggattgtgtacattagtgagcaggccgccgtcttgctcagatgcaaacgggatgtgttcagaggcactagatttagcgaactactcgcacctcaagatgtcggagtgttctatggtagtaccgctccctctcgtctgcctacttgggggactggagcctccgcaggcagtgggttgcgcgatttcactcaggaaaagagcgtgttttgtcgaattcgggggggccctgacagagatccagggccacgttatcagccattccgcctgacaccctacgtcactaagattagggtttccgatggagcgccagcacagccctgttgcctgcttattgccgaacgcatacactccggctacgaggcaccccgcattcccccagataagagaattttcactacgaggcatactcctagctgtctcttccaggacgtggacgaaagagctgctccacttctcggttacctgccacaggacttacttggtgctcctgtccttttatttctgcatcctgaagacaggcccctgatgttagcaatacataagaaaatcctgcagcttgcaggccaaccattcgaccactctcctatcagattctgcgcgagaaatggagagtacgtcacaatggataccagctgggccggatttgtccatccatggagcaggaaagtggcttttgtgctagggaggcataaggtacgaactgcccccctcaatgaggatgtgttcacaccccctgctccctctccagcaccaagccttgacactgacatccaggaactctccgaacagatacaccgccttttgctgcaacccgtgcactccccatcccccacaggtttgtgcggagtgggcgcggtaacaagcccaggtccactgcattcccctggttcatcctccgactctaacggaggagatgcggaggggcccgggcccccggcccccgtgactttccagcaaatttgcaaggacgtccatttggtcaagcaccaaggacagcaactgttcatcgagtccagagctcgcccacagagtagacctcgcctcccagctaccggcactttcaaagctaaagcgctgccgtgtcagtcccctgaccctgaactcgaagcgggcagcgcaccggtgcaggccccactggccctggtgccagaagaagctgaaagaaaggaagcctcttcctgttcatatcagcagatcaactgcctcgactccatcctcaggtaccttgagagttgtaaccttccaagcactactaaacgaaagtgcgcctcctcctctagttacactacttcttcagcctcggacgatgatcgccagcgcacaggccctgtaagcgtaggtaccaagaaggatccaccaagcgccgccctttcaggggagggagctaccccccgcaaggagcctgtggtcggcgggaccctgagtcccctcgccttggcaaataaagcagagagcgtggtgagtgtgacctctcaatgttcattcagctcaacgattgttcatgttggagacaagaagccccccgaaagcgacattataatgatggaggatctgcccggcttggccccggggcccgcaccatcaccagcccccagccccaccgtggcccccgacccagcaccagacgcctataggccagtgggcctcaccaaagcagtgctttcgctccacactcagaaagaggagcaggcgttcctgagccggtttcgtgacctgggtcgccttagagggctggatagctccagcaccgccccaagcgccctgggagaaaggggctcacatctgggaccgcctggcgcctgcccactcccctccttaggcctcgactgctggggagttggtcttaaaggcggggtttccgctccaggcacgcaggccggagtggcttccaccacaaggccctgtcttggtaccggtcccagtttagcctccccacattag

SEQ ID NO: 130259 - DNA, 3873 bp, Artificial Sequence
  derived and/or modified sequence
atgagcggtcccctcgaaggggctgacggcggaggggatcccagacctggcgaaagcttttgtccgggaggggttccaagtcctgggcctccgcagcatcggccatgccctggtccgagcctggccgacgacacagatgcaaactcgaatgggtccagcggaaatgagtccaatggacacgaatcgcggggagcaagccagcgatcttcacatagcagttcctcaggcaacgggaaggacagtgcgctcttagagaccactgaatcctctaaaagtaccaattcccagtcaccatcgccacctagttccagcatcgcgtatagcttgctgtctgcatcttcagagcaggataacccatcaaccagtggctgctctagtgaacagtcggcacgagctagaacccagaaggaactcatgactgccctccgggagctcaaactgcggcttccccctgaacggagggggaagggccgttctggaactctggctacactgcagtacgcgctcgcgtgtgttaaacaggttcaagccaatcaggagtattaccagcaatggtcactggaagagggtgaaccctgctcaatggacatgtctacctacaccttagaagaactagagcacatcacaagcgaatataccttacagaaccaggacaccttctctgtagccgtgagctttctaaccggccgtatcgtctacatctccgaacaggccgcagtgttactcagatgcaagagagatgtgttccgagggacacgtttctcagaactgctcgcgccacaagacgtgggcgtgttttacggatcaacggctccaagtcgactgcctacctggggaaccggcgctagcgctggctcaggacttcgcgacttcacacaggagaaatccgtcttttgccggattagagggggacctgaccgggaccctgggccacgctatcagcctttcagattgaccccatacgtgaccaagattagagtatccgacggtgcccctgcacagccgtgctgcctgctgattgccgagcgcattcattccggctatgaagctccaagaattcccccagacaagcgcatttttaccactcggcacacccccagctgtctctttcaagatgtggacgagagggctgctccgctcctgggttacctgcctcaggatctccttggagcccctgtcttgttgttcctgcatccagaggatcgtccacttatgctcgccatccacaaaaagattctgcagttggccggacagccatttgatcacagccccattcggttctgcgccagaaatggagagtatgtcactatggatacgagctgggcgggatttgttcacccctggtctcgcaaagtggcctttgtgcttggacggcataaagtgcgcactgctcctctgaatgaagacgtgttcaccccacccgctccctccccggcacctagcttggacacggacattcaggaactaagtgagcaaattcaccggctgcttttgcagcctgttcactccccaagcccaacagggctttgtggagtgggcgctgttacctccccaggacccctgcactcacccggttctagcagcgactctaacgggggagatgctgaggggcctggtccccctgcacctgtaacattccagcagatatgtaaggatgtccacctggtcaaacaccaaggacagcagttgttcatcgagtcccgagctcggcctcagtctcggcctcggttgcctgctactgggacctttaaggccaaggccttgccatgccagagccccgaccctgagctggaggccggaagtgctccggttcaagccccactcgccctcgttccagaggaggcggagcggaaggaggcctcaagttgtagctaccagcagattaattgcctggactcgatcttgaggtacctagagtcatgcaacctgccatcaaccacgaagcggaagtgcgcaagttccagttcctacaccacaagctcagcctcggacgacgacaggcagcggaccggccctgtgtctgttggtaccaaaaaggacccacctagcgccgcactttccggcgagggagctacccctcgcaaagagcctgtggtgggtggcacactaagtcctttggctctggccaacaaggccgaatctgtagtcagtgtgacatctcagtgctcattctctagcacaatcgtccatgtcggcgataaaaagccacctgagagcgacatcatcatgatggaggacttacccggacttgctcccggacctgctccctcacctgcccctagccctaccgtggctcctgaccctgccccagatgcttatcgtcctgttggcttaacgaaagctgtgctctcgcttcacacccagaaagaagagcaggcctttctttcacgcttcagagatctgggcagactccgtggtctggattccagttcaacggccccttccgccttaggggaaaggggatgtcatcacgggcctgcacctccgtcaagacggcaccactgcaggtctaaagcgaaaaggtccaggcatcaccagaacccacgagctgaggcaccatgctatgtgagccacccgagtccagtccccccatcgacaccctggccaactcctcccgctaccactccattcccagccgttgtgcaaccatacccgctgccagtgttctccccaagggggggacctcagcctcttcccccagcaccaacctccgtgccccctgcagccttcccagcgccactcgtgactccaatggttgcccttgtgctcccgaactaccttttccctacaccttccagctacccctatggtgccctccagaccccagccgagggcccacctacgcccgcttcgcattctccgtcccctagtctgcctgccctggccccttcacctccccacaggcctgacagtccgctcttcaacagtcgctgttcatctccgctgcaactgaacctgctccagctggaagaattgccccgagcggagggcgctgccgtggctggaggacccggtagctccgcgggacctcccccaccaagcgccgaagcggcagaaccagaggctcgtctcgccgaagtgaccgaaagctccaaccaggacgctctgtctggatcttccgacttgctagagcttctgctgcaggaagacagcagatctggcaccggaagcgccgctagtggttccctggggagcgggctgggttccgggtcagggtctggctctcatgagggcggatccactagtgcatcgatcacacggtcaagccaatctagccacacctcgaaatattttggttcaattgattcctctgaggctgaggcaggtgccgcaagaggcggagccgagcctggagaccaggtcatcaagtacgtgcttcaagaccccatatggttgctcatggccaacgcagatcagcgggtaatgatgacctatcaggttccgtctcgcgacatgacttcagtgctcaaacaagatagggagcgcctgcgagctatgcaaaaacagcagccaaggttcagcgaggaccagcggagagagctgggagccgttcactcttgggtgagaaagggacagcttcctcgcgcactggatgtgatggcctgcgtggactgcgggagctccacacaggatccagggcaccccgacgaccctcttttctctgagctagatggccttggactggagccaatggaagaaggcggaggcgagcaaggcagtagtggcggtggctcaggcgaaggagaagggtgcgaggaggcccaagggggtgcaaaggcatcctccagtcaagacctcgctatggaggaggaggaggaaggacgaagctctagctccccagccctgcctactgctgggaactgcacctcatag

SEQ ID NO: 130260 - DNA, 2580 bp, Artificial Sequence
  derived and/or modified sequence
atgctggaggtgctggaagagatctggagtgtgcgggctcggagggcccaccggccatgccctgggccatccctcgcagatgacacggatgctaactctaatggatcatcagggaacgagtcaaacggtcatgagtctagaggcgcttcacagcgatcctctcattcttcttcctccgggaacggtaaagatagtgcccttcttgaaaccactgagtctagtaaatcaaccaactcccagtcaccctccccgccttccagcagcattgcttacagtctgctgagcgcctccagcgagcaagacaacccgagtaccagcggatgcagttctgagcaatccgccagggctaggacccaaaaggagcttatgaccgcactcagagaactgaagcttcgtttgccccctgagcggagaggcaaaggacggtccgggaccctggcaacactacaatatgccctggcttgtgtgaaacaggtgcaggctaaccaggagtattatcagcagtggagcctggaagagggtgagccttgcagtatggacatgtcaacctataccctcgaggagctcgagcacatcacttccgagtacacgttgcagaatcaggacacgttctccgttgcggtaagctttcttacaggtcgaatagtttacatttcggagcaagcggcagtgctactccgctgcaaaagagacgtgttccggggtactcgttttagcgagctgctggcaccccaagacgttggagtattttacggcagcacggcgccttcccggctgcctacatggggcacaggtgcttcagccggaagtggtttgcgggattttactcaagaaaagtccgtattttgccgaatccggggtggtcccgaccgcgatcccggacctcgttatcaacccttcaggctgacgccttacgtgacgaagattagggtcagcgacggagcgccagcccaaccctgctgcttgctcatagcagagcgcatccattctgggtacgaggccccaagaattccacctgacaagagaattttcacgactcgacatacccccagctgtttatttcaagatgttgatgagcgtgccgctcctttattgggctatctgcctcaagacttattaggcgctccagtccttttgttcctccatcctgaagatcggcctctcatgttagccattcacaaaaaaatccttcagctcgccggacagccatttgaccacagccccatcaggttctgcgcaagaaatggcgagtacgtcacaatggatacgagttgggctggcttcgtgcatccgtggtcgaggaaagttgctttcgtgctcggtcggcataaagtgaggacggcaccattaaacgaggatgtattcaccccgcctgcacctagtcccgcaccctctctggataccgatatccaagagctatctgagcagatacatcggcttctactgcagcccgtgcatagtccttccccaaccggactctgtggcgtgggggcagtgacaagccccggacccctgcatagcccgggatcctcaagcgatagtaacggcggagatgccgagggacccggtccacccgcaccggtgaccttccagcaaatttgcaaggacgttcacctggtgaagcatcaagggcaacagctgtttatagagagccgagctaggccacagtccagacccaggctgcccgcaaccggaaccttcaaggccaaggccctgccatgccaaagccccgatcccgagcttgaggccggatcagctcctgtacaggctccactggcactcgtccccgaggaagcagaaaggaaagaggcaagttcatgcagctaccaacagatcaactgcttggactctatactacggtatttggagtcttgcaatctgccaagcaccacaaaacggaaatgtgccagctcgtcttcttataccaccagcagcgcctccgacgatgatcgccaacgtaccggtcccgtgagcgtgggcacaaagaaagacccgccaagcgctgcactgagcggtgagggagccacccccagaaaggagcctgtagtcgggggaacactatctccgctggctcttgcaaacaaggcagagtccgtggtctccgtgacctctcaatgcagtttttcaagtactattgtgcacgtaggagataagaaacccccagagagcgacattatcatgatggaggatctgcctggactggccccaggccctgcgccatcccccgcacccagtccaacagtggctcctgatcccgctcctgacgcctatcgccctgtcggcctgactaaggctgttctctccctccacacacagaaagaggagcaggcgttcttatctcgatttagggacctcggccgattgagaggccttgatagctcctcgaccgcccctagcgcccttggcgagcgtgggtcacacctcgggccacccggagcctgcccccttcctagtctgggcctagactgctggggggttggcctgaagggaggcgtgtcagctccgggaactcaggccggtgtggcaagcaccactcgtccttgcttggggaccggaccaagtcttgccagcccacattag

SEQ ID NO: 130261 - DNA, 4688 bp, Artificial Sequence
  derived and/or modified sequence
attatgcaacccgcctccccgcccgcccggtggagcttccactcggctgcgggctggagcggcggcgggcaggcgtgcggaggacactcctgcgaccaggtactggctgtgatcgaacttctcaaccctcagagacttagatcttccacctcactccctcagccaagcctccaggccccctcgtgcatccgtggtggcctctctgccttctctgttctgttctccccatggcccagacatgagtggccccctagaaggggctgatgggggaggggaccccaggcctggggaatcattttgtcctgggggcgtcccatcccctgggcccccacagcaccggccttgcccaggccccagcctggccgatgacaccgatgccaacagcaatggttcaagtggcaatgagtccaacgggcatgagtctagaggcgcatctcagcggagctcacacagctcctcctcaggcaacggcaaggactcagccctgctggagaccactgagagcagcaagagcacaaactctcagagcccatccccacccagcagttccattgcctacagcctcctgagtgccagctcagagcaggacaacccgtccaccagtggctgcagcagtgaacagtcagcccgggcaaggactcagaaggaactcatgacagcacttcgagagctcaagcttcgactgccgccagagcgccggggcaagggccgctctgggaccctggccacgctgcagtacgcactggcctgtgtcaagcaggtgcaggccaaccaggaatactaccagcagtggagcctggaggagggcgagccttgctccatggacatgtccacctataccctggaggagctggagcacatcacgtctgagtacacacttcagaaccaggataccttctcagtggctgtctccttcctgacgggccgaatcgtctacatttcggagcaggcagccgtcctgctgcgttgcaagcgggacgtgttccggggtacccgcttctctgagctcctggctccccaggatgtgggagtcttctatggttccactgctccatctcgcctgcccacctggggcacaggggcctcagcaggttcaggcctcagggactttacccaggagaagtccgtcttctgccgtatcagaggaggtcctgaccgggatccagggcctcggtaccagccattccgcctaaccccgtatgtgaccaagatccgggtctcagatggggcccctgcacagccgtgctgcctgctgattgcagagcgcatccattcgggttacgaagctccccggataccccctgacaagaggattttcactacgcggcacacacccagctgcctcttccaggatgtggatgaaagggctgcccccctgctgggctacctgccccaggacctcctgggggccccagtgctcctgttcctgcatcctgaggaccgacccctcatgctggctatccacaagaagattctgcagttggcgggccagccctttgaccactcccctatccgcttctgtgcccgcaacggggagtatgtcaccatggacaccagctgggctggctttgtgcacccctggagccgcaaggtagccttcgtgttgggccgccacaaagtacgcacggcccccctgaatgaggacgtgttcactcccccggcccccagcccagctccctccctggacactgatatccaggagctgtcagagcagatccaccggctgctgctgcagcccgtccacagccccagccccacgggactctgtggagtcggcgccgtgacatccccaggccctctccacagccctgggtcctccagtgatagcaacgggggtgatgcagaggggcctgggcctcctgcgccagtgactttccagcagatctgtaaggatgtgcatctggtgaagcaccagggccagcagctttttattgagtctcgggcccggcctcagtcccggccccgcctccctgctacaggcacgttcaaggccaaggcccttccctgccaatccccagacccagagctggaggcgggttctgctcccgtccaggccccactagccttggtccctgaggaggccgagaggaaagaagcctccagctgctcctaccagcagatcaactgcctggacagcatcctcaggtacctggagagctgcaacctccccagcaccactaagcgtaaatgtgcctcctcctcctcctataccacctcctcagcctctgacgacgacaggcagaggacaggtccagtctctgtggggaccaagaaagatccgccgtcagcagcgctgtctggggagggggccaccccacggaaggagccagtggtgggaggcaccctgagcccgctcgccctggccaataaggcggagagtgtggtgtccgtcaccagtcagtgtagcttcagctccaccatcgtccatgtgggagacaagaagcccccggagtcggacatcatcatgatggaggacctgcctggcctagccccaggcccagcccccagcccagcccccagccccacagtagcccctgacccagccccagacgcctaccgtccagtggggctgaccaaggccgtgctgtccctgcacacacagaaggaagagcaagccttcctcagccgcttccgagacctgggcaggctgcgtggactcgacagctcttccacagctccctcagcccttggcgagcgaggctgccaccacggccccgcacccccaagccgccgacaccactgccgatccaaagccaagcgctcacgccaccaccagaaccctcgggctgaagcgccctgctatgtctcacacccctcacccgtgccaccctccaccccctggcccaccccaccagccactacccccttcccagcggttgtccagccctaccctctcccagtgttctctcctcgaggaggcccccagcctcttccccctgctcccacatctgtgcccccagctgctttccccgcccctttggtgaccccaatggtggccttggtgctccctaactatctgttcccaaccccatccagctatccttatggggcactccagacccctgctgaagggcctcccactcctgcctcgcactccccttctccatccttgcccgccctcgccccgagtcctcctcaccgcccggactctccactgttcaactcgagatgcagctctccactccagctcaatctgctgcagctggaggagctcccccgtgctgagggggctgctgttgcaggaggccctgggagcagtgccgggcccccacctcccagtgcggaggctgctgagccagaggccagactggcggaggtcactgagtcctccaatcaggacgcactttccggctccagtgacctgctcgaacttctgctgcaagaggactcgcgctccggcacaggctccgcagcctcgggctccttgggctctggcttgggctctgggtctggttcaggctcccatgaagggggcagcacctcagccagcatcactcgcagcagccagagcagccacacaagcaaatactttggcagcatcgactcttccgaggctgaggctggggctgctcggggcggggctgagcctggggaccaggtgattaagtacgtgctccaggatcccatttggctgctcatggccaatgctgaccagcgcgtcatgatgacctaccaggtgccctccagggacatgacctctgtgctgaagcaggatcgggagcggctccgagccatgcagaagcagcagcctcggttttctgaggaccagcggcgggaactgggtgctgtgcactcctgggtccggaagggccaactgcctcgggctcttgatgtgatggcctgtgtggactgtgggagcagcacccaagatcctggtcaccctgatgacccactcttctcagagctggatggactggggctggagcccatggaagagggtggaggcgagcagggcagcagcggtggcggcagtggtgagggagagggctgcgaggaggcccaaggcggggccaaggcttcaagctctcaggacttggctatggaggaggaggaagaaggcaggagctcatccagtccagccttacctacagcaggaaactgcaccagctagactccattctgggaccatctccaggagtccatgagaggctttcttctcctatgtcccaattctcagaactcagatgtggctagaccaaccagtgggaaactgccccagcttctcccaccatagggggccggacccccatcaccagcctaggatccaggggctgcctctggcctcttagggagcagagagcagaactccgcagcccagcccagaggagtgtcacctcccacctttggagaggaatccttccctcccctggacaaagttgctgacaagctgctgaagtggcctctccatattccagctgagcctgaatctgactcttgagggttggggctgcacttatttattgcggggagacagctctctctcccacctcctccccagatgggaggagagcctgaggcccaagcaggacccgggggttccagcccctagctgctctggagtgggggaggttggtggaccatggagtccctggtgctgcccctcaggtgggacccaggcgttctcagctgtaccctctgccgatggcatttgtgtttttgatatttgtgtctgttactacttttttaat

SEQ ID NO: 130262 - DNA, 3873 bp, Artificial Sequence
  derived and/or modified sequence
atgagcggccccctggagggcgccgacggcggcggcgaccccagacccggcgagagcttctgccccggcggcgtgcccagccccggccccccccagcacagaccctgccccggccccagcctggccgacgacaccgacgccaacagcaacggcagcagcggcaacgagagcaacggccacgagagcagaggcgccagccagagaagcagccacagcagcagcagcggcaacggcaaggacagcgccctgctggagaccaccgagagcagcaagagcaccaacagccagagccccagcccccccagcagcagcatcgcctacagcctgctgagcgccagcagcgagcaggacaaccccagcaccagcggctgcagcagcgagcagagcgccagagccagaacccagaaggagctgatgaccgccctgagagagctgaagctgagactgccccccgagagaagaggcaagggcagaagcggcaccctggccaccctgcagtacgccctggcctgcgtgaagcaggtgcaggccaaccaggagtactaccagcagtggagcctggaggagggcgagccctgcagcatggacatgagcacctacaccctggaggagctggagcacatcaccagcgagtacaccctgcagaaccaggacaccttcagcgtggccgtgagcttcctgaccggcagaatcgtgtacatcagcgagcaggccgccgtgctgctgagatgcaagagagacgtgttcagaggcaccagattcagcgagctgctggccccccaggacgtgggcgtgttctacggcagcaccgcccccagcagactgcccacctggggcaccggcgccagcgccggcagcggcctgagagacttcacccaggagaagagcgtgttctgcagaatcagaggcggccccgacagagaccccggccccagataccagcccttcagactgaccccctacgtgaccaagatcagagtgagcgacggcgcccccgcccagccctgctgcctgctgatcgccgagagaatccacagcggctacgaggcccccagaatcccccccgacaagagaatcttcaccaccagacacacccccagctgcctgttccaggacgtggacgagagagccgcccccctgctgggctacctgccccaggacctgctgggcgcccccgtgctgctgttcctgcaccccgaggacagacccctgatgctggccatccacaagaagatcctgcagctggccggccagcccttcgaccacagccccatcagattctgcgccagaaacggcgagtacgtgaccatggacaccagctgggccggcttcgtgcacccctggagcagaaaggtggccttcgtgctgggcagacacaaggtgagaaccgcccccctgaacgaggacgtgttcaccccccccgcccccagccccgcccccagcctggacaccgacatccaggagctgagcgagcagatccacagactgctgctgcagcccgtgcacagccccagccccaccggcctgtgcggcgtgggcgccgtgaccagccccggccccctgcacagccccggcagcagcagcgacagcaacggcggcgacgccgagggccccggcccccccgcccccgtgaccttccagcagatctgcaaggacgtgcacctggtgaagcaccagggccagcagctgttcatcgagagcagagccagaccccagagcagacccagactgcccgccaccggcaccttcaaggccaaggccctgccctgccagagccccgaccccgagctggaggccggcagcgcccccgtgcaggcccccctggccctggtgcccgaggaggccgagagaaaggaggccagcagctgcagctaccagcagatcaactgcctggacagcatcctgagatacctggagagctgcaacctgcccagcaccaccaagagaaagtgcgccagcagcagcagctacaccaccagcagcgccagcgacgacgacagacagagaaccggccccgtgagcgtgggcaccaagaaggacccccccagcgccgccctgagcggcgagggcgccacccccagaaaggagcccgtggtgggcggcaccctgagccccctggccctggccaacaaggccgagagcgtggtgagcgtgaccagccagtgcagcttcagcagcaccatcgtgcacgtgggcgacaagaagccccccgagagcgacatcatcatgatggaggacctgcccggcctggcccccggccccgcccccagccccgcccccagccccaccgtggcccccgaccccgcccccgacgcctacagacccgtgggcctgaccaaggccgtgctgagcctgcacacccagaaggaggagcaggccttcctgagcagattcagagacctgggcagactgagaggcctggacagcagcagcaccgcccccagcgccctgggcgagagaggctgccaccacggccccgccccccccagcagaagacaccactgcagaagcaaggccaagagaagcagacaccaccagaaccccagagccgaggccccctgctacgtgagccaccccagccccgtgccccccagcaccccctggcccaccccccccgccaccacccccttccccgccgtggtgcagccctaccccctgcccgtgttcagccccagaggcggcccccagcccctgccccccgcccccaccagcgtgccccccgccgccttccccgcccccctggtgacccccatggtggccctggtgctgcccaactacctgttccccacccccagcagctacccctacggcgccctgcagacccccgccgagggcccccccacccccgccagccacagccccagccccagcctgcccgccctggcccccagccccccccacagacccgacagccccctgttcaacagcagatgcagcagccccctgcagctgaacctgctgcagctggaggagctgcccagagccgagggcgccgccgtggccggcggccccggcagcagcgccggcccccccccccccagcgccgaggccgccgagcccgaggccagactggccgaggtgaccgagagcagcaaccaggacgccctgagcggcagcagcgacctgctggagctgctgctgcaggaggacagcagaagcggcaccggcagcgccgccagcggcagcctgggcagcggcctgggcagcggcagcggcagcggcagccacgagggcggcagcaccagcgccagcatcaccagaagcagccagagcagccacaccagcaagtacttcggcagcatcgacagcagcgaggccgaggccggcgccgccagaggcggcgccgagcccggcgaccaggtgatcaagtacgtgctgcaggaccccatctggctgctgatggccaacgccgaccagagagtgatgatgacctaccaggtgcccagcagagacatgaccagcgtgctgaagcaggacagagagagactgagagccatgcagaagcagcagcccagattcagcgaggaccagagaagagagctgggcgccgtgcacagctgggtgagaaagggccagctgcccagagccctggacgtgatggcctgcgtggactgcggcagcagcacccaggaccccggccaccccgacgaccccctgttcagcgagctggacggcctgggcctggagcccatggaggagggcggcggcgagcagggcagcagcggcggcggcagcggcgagggcgagggctgcgaggaggcccagggcggcgccaaggccagcagcagccaggacctggccatggaggaggaggaggagggcagaagcagcagcagccccgccctgcccaccgccggcaactgcaccagctag

SEQ ID NO: 130263 - protein, 403 aa, Artificial Sequence
  derived and/or modified sequence
MASQPPPPPKPWETRRIPGAGPGPGPGPTFQSADLGPTLMTRPGQPALTRVPPPILPRPSQQTGSSSVNTFRPAYSSFSSGYGAYGNSFYGGYSPYSYGYNGLGYNRLRVDDLPPSRFVQQAEESSRGAFQSIESIVHAFASVSMMMDATFSAVYNSFRAVLDVANHFSRLKIHFTKVFSAFALVRTIRYLYRRLQRMLGLRRGSENEDLWAESEGTVACLGAEDRAATSAKSWPIFLFFAVILGGPYLIWKLLSTHSDEVTDSINWASGEDDHVVARAEYDFAAVSEEEISFRAGDMLNLALKEQQPKVRGWLLASLDGQTTGLIPANYVKILGKRKGRKTVESSKVSKQQQSFTNPTLTKGATVADSLDEQEAAFESVFVETNKVPVAPDSIGKDGEKQDL

SEQ ID NO: 130264 - DNA, 1212 bp, Artificial Sequence
  derived and/or modified sequence
atggcctctcagcctccccccccgccaaagccgtgggagacgaggcggatcccaggggccggacctggacccggcccaggccctacgtttcagtcggcagacctcggacccacactgatgaccagacccggccagcccgctctgactagagttccaccacctatacttccgaggccaagccagcagaccgggtcttcttccgttaacacattccgccccgcttactcaagtttcagttccggctatggcgcatacggcaactccttctacggaggttactcaccatacagttacggctacaatggcctcgggtataaccgcctgcgagtggatgacctgccccccagtcgcttcgttcaacaggccgaggagtcttccaggggagcgtttcagagcattgaaagcattgttcacgcattcgcgagcgtgtcaatgatgatggatgctactttctctgcagtttacaactcgtttagagctgttcttgatgtggcaaaccatttcagcaggctgaaaatccactttactaaagtgttctccgccttcgcgctggttagaaccattcgctacctctatcgtcgccttcaacgaatgctcggtttgaggaggggcagcgagaatgaggacttgtgggctgaatccgaaggtacagtggcatgcctgggagccgaggatagagcagccacctccgcaaagtcttggccgattttcttatttttcgccgttatccttggaggaccctacctgatctggaaattactatcaacgcactccgacgaggttacagacagtattaattgggcatccggtgaggacgatcacgtggtggcccgcgccgaatacgacttcgctgcagtttccgaggaggaaatctcctttagggcaggagacatgctgaaccttgctctgaaagaacagcagccaaaggttcggggctggctgctagcgagcctggatggccagacaacaggcctgattcccgcaaattacgttaagatcctgggaaagcgaaagggccgaaagacggtggagagctcaaaggtgagtaaacagcaacagagctttacaaaccctacacttacaaaaggcgccaccgtggccgattcactcgatgagcaagaggcagctttcgagtcggtgttcgtggagaccaataaggttcccgtggctcctgattcaattgggaaggatggagagaaacaggatctttag

SEQ ID NO: 130265 - DNA, 1212 bp, Artificial Sequence
  derived and/or modified sequence
atggccagccagcccccacctccacccaagccctgggagacccggcgcatccctggggccggccctggccctggccctggccccaccttccagagcgctgacctgggccccaccctgatgaccaggcctggccagcctgccctgaccagggtgcccccacccatcctgccccggcccagccagcagacaggcagcagctctgtgaacaccttccggcctgcctacagcagcttcagcagcggctacggggcctacggcaacagcttctacggcggctacagcccctacagctatggctacaacggcctgggctacaaccggctgcgggtggatgacctgccccccagcagatttgtgcagcaggccgaggagagcagcagaggagccttccagagcattgagagcatcgtgcacgcctttgcctctgtgtccatgatgatggatgccaccttctctgctgtgtacaacagcttccgggctgtgctggatgtggccaaccacttcagccggctgaagatccacttcaccaaggtgttcagcgcctttgccctggtgaggaccatccgctacctgtacagaaggctgcagaggatgctgggcctgcggcggggctctgaaaatgaagacctgtgggccgagagcgagggcaccgtggcctgcctgggcgctgaggacagagctgccaccagcgccaagtcctggcccatcttcctgttctttgctgtgatcctgggcggcccctacctgatctggaagctgctgagcacccacagtgatgaggtgacagacagcatcaactgggccagcggagaagatgaccacgtggtggcccgggcagaatatgactttgctgctgtgtctgaggaggagatctccttccgggccggggacatgctgaacctggccctgaaggagcagcagcccaaggtgcggggctggctgctggccagcctggatggccagaccaccggcctcatcccagccaactacgtgaagatcctgggcaagaggaagggcaggaagacagtggagagcagcaaggtgtccaagcagcagcagagcttcaccaaccccaccctgaccaagggggccaccgtggccgacagcctggatgagcaggaggccgcctttgaatctgtgtttgtggagaccaacaaggtgcctgtggccccagacagcatcggcaaggatggagagaagcaggacctgtag

SEQ ID NO: 130266 - DNA, 1212 bp, Artificial Sequence
  derived and/or modified sequence
atggccagccagcccccccccccccccaagccctgggagacccggcggatcccaggagccggacctggccctggcccaggccccacgttccagagtgccgacctaggtcccacactgatgactcggcccggccagcccgccctgactcgggttccccctccaatcctgcctcgcccctctcagcagaccggcagcagctcagtgaatacatttagacccgcctattccagcttcagctcagggtacggcgcctacggaaattcgttctacggcggatatagcccttactcttacggctataacggtctggggtacaaccggctcagagttgacgacctgcccccctcaaggtttgttcaacaagcagaagagagctccagaggcgcttttcaatctattgaatctatcgtgcacgctttcgcttccgtctctatgatgatggatgccacgtttagcgcggtttacaactccttccgggccgttctggacgttgccaatcattttagtcggctgaaaatccacttcaccaaggtcttctcagcttttgcgctcgtcagaacgatccgttatctttacagaaggctgcagaggatgttgggcctccgaagaggatccgagaatgaagatctgtgggccgagtctgagggcacagtcgcctgcctgggcgccgaagatagagctgccacatctgcaaaatcatggccaatattcttattcttcgccgtgattctgggtggaccgtaccttatctggaaattattgtctacgcattctgacgaggtgactgacagcatcaactgggctagcggcgaggatgaccacgtggtagcccgcgcagaatacgactttgccgcggtgtcagaagaggagatctctttccgcgccggcgatatgttgaatttagcactgaaggaacaacagcctaaggtaagaggttggctcctggcaagcttggatggacaaaccaccggactcattcccgccaactatgtgaagatccttggaaagagaaagggtcggaagactgtggagtcctccaaagtatcaaagcagcaacaaagctttacaaaccccactctgacaaagggcgccacagttgctgattcactggatgagcaagaggccgcattcgaatccgtcttcgtggagaccaataaggtgcccgtagctcccgacagtatcggaaaggatggtgaaaaacaggacttgtag

SEQ ID NO: 130267 - DNA, 1739 bp, Artificial Sequence
  derived and/or modified sequence
tcaggggtaggagcgggagccgagaggaggcggaggagatggcgtcccagccgccacctccccccaaaccctgggagacccgccgaattccgggagccggaccgggaccaggaccgggccccactttccaatctgctgatttgggtcctactttaatgacaagacctggacaaccagcacttaccagagtgcccccacctattcttccaaggccatcacagcagacaggaagtagcagtgtgaacacttttagacctgcttacagttcattttcttctggatatggtgcctatggaaattcattttatggaggctatagtccttatagttatggatataatgggctgggctacaaccgcctccgtgtagatgatcttccacccagtagatttgttcagcaagctgaagaaagcagcaggggtgcatttcagtccattgaaagtattgtgcatgcatttgcctctgtcagtatgatgatggatgctaccttttcagctgtctataacagtttcagggctgtattggatgtagcaaatcacttttcccgattgaaaatacactttacaaaagtgttttcagcttttgcattggttaggactatacggtatctttacagacggctacagcggatgttaggtttaagaagaggctctgagaatgaagacctctgggcagagagtgaaggaactgtggcatgccttggtgctgaggaccgagcagctacctcagcaaaatcttggccaatattcttgttctttgctgttatccttggtggtccttacctcatttggaaactattgtctactcacagtgatgaagtaacagacagcatcaactgggcaagtggtgaggatgaccatgtagttgccagagcagaatatgattttgctgccgtatctgaagaagaaatttctttccgggctggtgatatgctgaacttagctctcaaagaacaacaacccaaagtgcgtggttggcttctggctagccttgatggccaaacaacaggacttatacctgcgaattatgtcaaaattcttggcaaaagaaaaggtaggaaaacggtggaatcaagtaaagtttccaagcagcaacaatcttttaccaacccaacactaactaaaggagccacggttgctgattctttggatgaacaggaagctgcctttgaatctgtttttgttgaaactaataaggttccagttgcacctgattccattgggaaagatggagaaaagcaagatctttgatatctttcatgtttgcctgcagttgaacaatactttagagtactttttaaaattatttctcacaaagaaatgaatgtacaatccaatgaaaacatttgttattggctatttcaggtgttttgctgctagaaattattaaagttacacactagtatgttggtctggtgacctggttacattttattatacacattattggaccataaggacatttgtttcacctagattttaagattatggagactgctgtcatttttatcttatttaaatctctaggtttattggaagagtaagattgatgaactatagcatgcacagtttggtacagtagagatcattaatacttttaaaagttctgcattaattgacttggaatccttagaaatggagtggtgacatgtcagtatgagaacaggcaaaaggtaaatttttttttttttttacaaccttaagtaatctcaataataaaattttctgatctgtattata

SEQ ID NO: 130268 - DNA, 1212 bp, Artificial Sequence
  derived and/or modified sequence
atggctagccagcctcctcccccaccgaagccctgggaaacacggaggattcctggtgccggtcctggcccagggccaggcccaacattccaatccgctgacctcggacccacgcttatgacgcggccaggacagccggctttgactcgggtcccccctccgatcctgcctaggccgagccagcaaactggctcctcttctgttaacactttcaggccggcttactccagcttcagttcaggctacggtgcgtacgggaactcattttatggcggatatagtccctattcttacggctataacggactcgggtacaacagactgcgcgtggacgatctgcccccatcgcgattcgtccagcaggccgaggagtcctcccgcggagccttccagtcaattgaatcaattgtacatgcattcgctagcgtgtccatgatgatggacgctactttctccgccgtgtataactccttccgcgctgtactggatgtggcaaaccactttagccgactgaaaattcacttcaccaaggtgttctctgcattcgccttggtccggactatcaggtacctttatcgacgcttacagcgaatgctcggcctgcgcaggggctctgaaaatgaagacctgtgggctgagtcggagggcacagtcgcttgccttggcgctgaggatcgcgcagccacctcagcaaagtcctggcctatcttccttttcttcgccgttattctggggggaccctacctgatctggaaactgctgagcacacacagtgacgaggtgaccgattcaataaactgggcctccggagaggacgaccatgtggtcgcacgagcagaatacgatttcgctgccgtctcagaggaggaaatctcattccgcgctggtgatatgctgaatttggctttgaaagagcagcagccaaaagtgaggggttggctgttggcctctctggacggacaaaccaccggactaattccggcaaattatgtgaaaatcttaggaaagcgtaagggaagaaaaaccgttgagtctagtaaagtgagtaaacagcagcagtcgtttaccaacccaactctgacaaagggggctacggtggctgacagcctcgacgaacaggaggccgcttttgagtccgtctttgttgagaccaataaggtccccgtcgcacccgattctatcggcaaagacggggaaaaacaggatctatag

SEQ ID NO: 130269 - DNA, 1212 bp, Artificial Sequence
  derived and/or modified sequence
atggccagccagcccccccccccccccaagccctgggagaccagaagaatccccggcgccggccccggccccggccccggccccaccttccagagcgccgacctgggccccaccctgatgaccagacccggccagcccgccctgaccagagtgcccccccccatcctgcccagacccagccagcagaccggcagcagcagcgtgaacaccttcagacccgcctacagcagcttcagcagcggctacggcgcctacggcaacagcttctacggcggctacagcccctacagctacggctacaacggcctgggctacaacagactgagagtggacgacctgccccccagcagattcgtgcagcaggccgaggagagcagcagaggcgccttccagagcatcgagagcatcgtgcacgccttcgccagcgtgagcatgatgatggacgccaccttcagcgccgtgtacaacagcttcagagccgtgctggacgtggccaaccacttcagcagactgaagatccacttcaccaaggtgttcagcgccttcgccctggtgagaaccatcagatacctgtacagaagactgcagagaatgctgggcctgagaagaggcagcgagaacgaggacctgtgggccgagagcgagggcaccgtggcctgcctgggcgccgaggacagagccgccaccagcgccaagagctggcccatcttcctgttcttcgccgtgatcctgggcggcccctacctgatctggaagctgctgagcacccacagcgacgaggtgaccgacagcatcaactgggccagcggcgaggacgaccacgtggtggccagagccgagtacgacttcgccgccgtgagcgaggaggagatcagcttcagagccggcgacatgctgaacctggccctgaaggagcagcagcccaaggtgagaggctggctgctggccagcctggacggccagaccaccggcctgatccccgccaactacgtgaagatcctgggcaagagaaagggcagaaagaccgtggagagcagcaaggtgagcaagcagcagcagagcttcaccaaccccaccctgaccaagggcgccaccgtggccgacagcctggacgagcaggaggccgccttcgagagcgtgttcgtggagaccaacaaggtgcccgtggcccccgacagcatcggcaaggacggcgagaagcaggacctgtag

SEQ ID NO: 130270 - protein, 74 aa, Artificial Sequence
  derived and/or modified sequence
SDDPKESEGDLHCVCVKTTSLVRPRHITNLELIKAGGHCPTANLIATKKNGRKLCLDLQAALYKKKIIKKLLES

SEQ ID NO: 130271 - protein, 74 aa, Artificial Sequence
  derived and/or modified sequence
SDDPKESEGDLHCVCVKTTSLVRPGHITNLELIKAGGHCPTANLIATKKNGRKLCLDLQAALYKKKIIKKLLES

SEQ ID NO: 130272 - protein, 101 aa, Artificial Sequence
  derived and/or modified sequence
MSSAAGFCASRPGLLFLGLLLLPLVVAFASAEAEEDGDLQCLCVKTTSQVRPRHITSLEVIKAGPHCPTAQLIATLKNGRKICLDLQAPLYKKIIKKLLES

SEQ ID NO: 130273 - DNA, 306 bp, Artificial Sequence
  derived and/or modified sequence
atgagctctgccgcagggttctgtgcttcccgcccaggcctcctttttctgggcttacttctgctgcctttagtggtcgcctttgcttccgctgaggccgaagaagatggtgacttgcaatgcttgtgcgtcaaaactacatcccaggtgcggccaaggcatatcacgtctctcgaggttattaaagctgggccacactgtcctacagcacagcttatcgctacgctaaaaaacggtcgcaaaatttgcctggacctgcaggctcccctgtacaaaaagattataaaaaaacttctagagtcttag

SEQ ID NO: 130274 - DNA, 306 bp, Artificial Sequence
  derived and/or modified sequence
atgagcagcgctgctggcttctgtgccagccggcccggcctgctcttcctgggcctgctgctgctgcccctggtggtggcctttgccagcgctgaggccgaggaggatggagacctgcagtgcctgtgtgtgaagaccaccagccaggtgcggcccaggcacatcaccagcctggaggtgatcaaggccggcccccactgccccacagcccagctgattgccaccctgaagaatggaaggaagatctgcctggacctgcaggcccccctgtacaagaagatcatcaagaagctgctggagagctag

SEQ ID NO: 130275 - DNA, 306 bp, Artificial Sequence
  derived and/or modified sequence
atgagcagcgccgccggcttctgcgccagccggcccggcctgctgtttttgggcctcctgctgctgccgttagtagttgcgtttgccagtgctgaagctgaagaagacggagatctgcagtgtctgtgcgtgaagacaacttcccaagtgcgcccgcgacacatcacttccctcgaggtgattaaggccggaccccactgtccgacggctcagcttatcgcgacgctgaaaaacggaaggaagatctgtttagacttacaggcccctttgtacaagaagattatcaagaagctccttgaaagttag

SEQ ID NO: 130276 - DNA, 604 bp, Artificial Sequence
  derived and/or modified sequence
atcttagtttccgcaccgcagttcctcggtgtccacttcaggcttccggactggaaggacagccgggaataaaacgtgccggcgaggctcaggagtcattggccacagagacccagcccgagtttcccatcgcactgagcactgagatcctgctggaagctctgccgcagcatgagctccgcagccgggttctgcgcctcacgccccgggctgctgttcctggggttgctgctcctgccacttgtggtcgccttcgccagcgctgaagctgaagaagatggggacctgcagtgcctgtgtgtgaagaccacctcccaggtccgtcccaggcacatcaccagcctggaggtgatcaaggccggaccccactgccccactgcccaactgatagccacgctgaagaatggaaggaaaatttgcttggacctgcaagccccgctgtacaagaaaataattaagaaacttttggagagttagctactagctgcctacgtgtgtgcatttgctatatagcatacttcttttttccagtttcaatctaactgtgaaagaacttctgatatttgtgttatccttatgattttaaataaacaaaataaatcaa

SEQ ID NO: 130277 - DNA, 306 bp, Artificial Sequence
  derived and/or modified sequence
atgtcttccgctgccggtttttgtgcctctcgaccgggactgctatttctagggcttcttctactgcctctggtggtcgccttcgcgtccgcggaagcagaagaggacggcgacttgcagtgtctgtgtgttaagacaacgtcccaggtgcggccacggcacataactagtctggaagtaataaaagccggaccgcactgtccaaccgcacagctgattgcgaccttgaagaatggtcggaaaatctgtctggacttacaagcgccactttacaaaaaaataatcaaaaaactgctcgaatcttag

SEQ ID NO: 130278 - DNA, 306 bp, Artificial Sequence
  derived and/or modified sequence
atgagcagcgccgccggcttctgcgccagcagacccggcctgctgttcctgggcctgctgctgctgcccctggtggtggccttcgccagcgccgaggccgaggaggacggcgacctgcagtgcctgtgcgtgaagaccaccagccaggtgagacccagacacatcaccagcctggaggtgatcaaggccggcccccactgccccaccgcccagctgatcgccaccctgaagaacggcagaaagatctgcctggacctgcaggcccccctgtacaagaagatcatcaagaagctgctggagagctag

SEQ ID NO: 130279 - protein, 104 aa, Artificial Sequence
  derived and/or modified sequence
MSSAARSRLTRATRQEMLFLALLLLPVVVAFARAEAEEDGDLQCLCVKTTSQVRPRHITSLEVIKAGPHCPTAQLIATLKNGRKICLDLQALLYKKIIKEHLES

SEQ ID NO: 130280 - DNA, 315 bp, Artificial Sequence
  derived and/or modified sequence
atgagcagcgccgccagaagcagactgaccagagccaccagacaggagatgctgttcctggccctgctgctgctgcccgtggtggtggccttcgccagagccgaggccgaggaggacggcgacctgcagtgcctgtgcgtgaagaccaccagccaggtgagacccagacacatcaccagcctggaggtgatcaaggccggcccccactgccccaccgcccagctgatcgccaccctgaagaacggcagaaagatctgcctggacctgcaggccctgctgtacaagaagatcatcaaggagcacctggagagctag

SEQ ID NO: 130281 - DNA, 315 bp, Artificial Sequence
  derived and/or modified sequence
atgtcttctgctgcaagaagcagactgactagggctacccggcaggagatgctcttcctggccctgttgctgctgcctgtcgtggtggcattcgcgcgggccgaggctgaggaagatggggacctccagtgcctgtgcgtgaaaactacttctcaggtgaggccaaggcacataacttctttggaagtcattaaggctggaccccattgccccacagctcagcttattgccacgctgaaaaacgggcggaaaatctgcctggatctacaggcccttctatacaagaagattattaaagagcatttagagagctag

SEQ ID NO: 130282 - DNA, 315 bp, Artificial Sequence
  derived and/or modified sequence
atgagcagcgctgcccggagccggctgacccgggccacccggcaggagatgctgttcctggccctgctgctgctgcctgtggtggtggcctttgcccgggcagaggccgaggaggatggagacctgcagtgcctgtgtgtgaagaccaccagccaggtgcggcccaggcacatcaccagcctggaggtgatcaaggccggcccccactgccccacagcccagctgattgccaccctgaagaatggaaggaagatctgcctggacctgcaggccctgctgtacaagaagatcatcaaggagcacctggagagctag

SEQ ID NO: 130283 - DNA, 315 bp, Artificial Sequence
  derived and/or modified sequence
atgagcagcgccgcccggagccggctgacccgggccacccggcaggaaatgctgttcctggccttgctgctgttgcctgtcgtagtggcatttgcgcgtgctgaagcagaggaagacggcgacctacagtgtctgtgtgtgaagacaacatctcaggtccgacctaggcatattaccagcctggaagttatcaaagcggggcctcactgtcctacggcccagctcatagccaccctaaaaaacggacgtaaaatctgtttagatctgcaggctcttctgtataagaagattattaaagagcatctggaatcatag

SEQ ID NO: 130284 - DNA, 315 bp, Artificial Sequence
  derived and/or modified sequence
atgtcctcagctgccaggtcacgtttgactagggcaacccgccaagaaatgctgttcttagcactcctactcttgcctgtcgtagtcgcttttgccagagccgaagctgaagaagatggtgatctgcaatgcctgtgcgtgaagacaacatctcaggtgagaccacggcatatcactagcctggaagtgatcaaggccggaccccactgccctactgcccagctcattgcaacactcaaaaacggtcggaagatctgcttggatctccaggcactgctgtacaagaagattatcaaggaacacctggaaagttag

SEQ ID NO: 130285 - DNA, 522 bp, Artificial Sequence
  derived and/or modified sequence
tcttagctcctgcaccacagttcctcgctgtccaccccaggcttccggactggaaggacagtgggacagtgacgggggataaaagaagcctggtgaggccaggagtcactgcctgcagaaccccagcccgactttccctgcgcactgggatcctgctggaacctcagctgcaacatgagctccgcagccaggtcccgcctcacccgcgccacccgccaggagatgctgttcttggcgttgctgctcctgccagttgtggtcgccttcgccagagctgaagctgaagaagatggggacctgcagtgcctgtgtgtgaagaccacctcccaggtccgtcccaggcacatcaccagcctggaggtgatcaaggccggaccccactgccccactgcccaactcatagccacgctgaagaatgggaggaaaatttgcttggatctgcaagccctgctgtacaagaaaatcattaaggaacatttggagagttagctactagctgcctaagtgtgcactttcaatcta

SEQ ID NO: 130286 - protein, 469 aa, Artificial Sequence
  derived and/or modified sequence
MITEGAQAPRLLLPPLLLLLTLPATGSDPVLCFTQYEESSGKCKGLLGGGVSVEDCCLNTAFAYQKRSGGLCQPCRSPRWSLWSTWAPCSVTCSEGSQLRYRRCVGWNGQCSGKVAPGTLEWQLQACEDQQCCPEMGGWSGWGPWEPCSVTCSKGTRTRRRACNHPAPKCGGHCPGQAQESEACDTQQVCPTHGAWATWGPWTPCSASCHGGPHEPKETRSRKCSAPEPSQKPPGKPCPGLAYEQRRCTGLPPCPVAGGWGPWGPVSPCPVTCGLGQTMEQRTCNHPVPQHGGPFCAGDATRTHICNTAVPCPVDGEWDSWGEWSPCIRRNMKSISCQEIPGQQSRGRTCRGRKFDGHRCAGQQQDIRHCYSIQHCPLKGSWSEWSTWGLCMPPCGPNPTRARQRLCTPLLPKYPPTVSMVEGQGEKNVTFWGRPLPRCEELQGQKLVVEEKRPCLHVPACKDPEEEEL

SEQ ID NO: 130287 - DNA, 1592 bp, Artificial Sequence
  derived and/or modified sequence
aggatgccctcccagttcctcctgcctctaggttcctctttccctgctgattccaggagcctatcaacccagataaagcgggacctcctctctggtagaggtgcagggggcagtactcaacatgatcacagagggagcgcaggcccctcgattgttgctgccgccgctgctcctgctgctcaccctgccagccacaggctcagaccccgtgctctgcttcacccagtatgaagaatcctccggcaagtgcaagggcctcctggggggtggtgtcagcgtggaagactgctgtctcaacactgcctttgcctaccagaaacgtagtggtgggctctgtcagccttgcaggtccccacgatggtccctgtggtccacatgggccccctgttcggtgacgtgctctgagggctcccagctgcggtaccggcgctgtgtgggctggaatgggcagtgctctggaaaggtggcacctgggaccctggagtggcagctccaggcctgtgaggaccagcagtgctgtcctgagatgggcggctggtctggctgggggccctgggagccttgctctgtcacctgctccaaagggacccggacccgcaggcgagcctgtaatcaccctgctcccaagtgtgggggccactgcccaggacaggcacaggaatcagaggcctgtgacacccagcaggtctgccccacacacggggcctgggccacctggggcccctggaccccctgctcagcctcctgccacggtggaccccacgaacctaaggagacacgaagccgcaagtgttctgcacctgagccctcccagaaacctcctgggaagccctgcccggggctagcctacgagcagcggaggtgcaccggcctgccaccctgcccagtggctgggggctgggggccttggggccctgtgagcccctgccctgtgacctgtggcctgggccagaccatggaacaacggacgtgcaatcaccctgtgccccagcatgggggccccttctgtgctggcgatgccacccggacccacatctgcaacacagctgtgccctgccctgtggatggggagtgggactcgtggggggagtggagcccctgtatccgacggaacatgaagtccatcagctgtcaagaaatcccgggccagcagtcacgcgggaggacctgcaggggccgcaagtttgacggacatcgatgtgccgggcaacagcaggatatccggcactgctacagcatccagcactgccccttgaaaggatcatggtcagagtggagtacctgggggctgtgcatgcccccctgtggacctaatcctacccgtgcccgccagcgcctctgcacacccttgctccccaagtacccgcccaccgtttccatggtcgaaggtcagggcgagaagaacgtgaccttctgggggagaccgctgccacggtgtgaggagctacaagggcagaagctggtggtggaggagaaacgaccatgtctacacgtgcctgcttgcaaagaccctgaggaagaggaactctaacacttctctcctccactctgagccccctgaccttccaaacctcaataaactagcctcttcg

SEQ ID NO: 130288 - DNA, 1410 bp, Artificial Sequence
  derived and/or modified sequence
atgattacagaaggcgctcaggctccacgactcctattacctcctttgctgttgctgttaaccttacccgcaaccggctcagacccggtcctgtgcttcacacagtacgaagaatcttccggaaagtgtaagggcttattgggcggaggagtgagtgttgaagactgttgtctaaatactgctttcgcataccagaagcgatctggcggactgtgccagccatgtcggagcccacggtggagcttatggtcaacttgggccccatgctccgttacgtgttctgagggtagccagctgcgatataggaggtgtgtgggctggaatggccaatgttcagggaaagtcgccccagggaccctcgaatggcagctccaggcttgtgaggatcaacaatgttgccctgagatggggggttggagcggttggggcccatgggagccctgcagcgtcacttgttccaagggcacgaggactagaagacgtgcatgcaatcacccagctcccaagtgtggagggcactgtccagggcaagcccaagagtcagaagcatgcgatacccaacaggtctgccccacacatggagcatgggctacctggggtccttggactccatgtagtgcttcttgccacggaggcccacatgaacctaaagagaccagatcccggaagtgctcagctccagaaccatcccagaagccacccggtaaaccatgtcccggacttgcgtacgagcagagacggtgtacgggactgcccccttgtccagtggcaggagggtggggaccatggggtcctgtaagtccatgcccagtgacgtgtggccttggtcaaacaatggagcagcggacatgcaaccacccagtgccccagcatgggggtccgttttgcgccggagacgcaaccagaactcatatttgcaatacagccgtgccctgcccggtagacggggagtgggatagctggggcgagtggagcccttgtatacgcagaaacatgaagagtatctcttgccaagagatccctgggcaacaatcccggggaagaacatgccgcggacggaagtttgatggacataggtgtgcaggccaacagcaggacattcgccattgttatagcatccagcattgtccactcaagggctcttggagtgagtggtcaacatggggactgtgcatgcccccatgcggccctaacccaacacgcgctaggcaaaggttgtgtacccccctgctccccaaataccccccaaccgtgtcaatggtggagggccaaggagagaaaaacgtaactttctggggcagacccttgcccagatgtgaggagctgcagggccaaaagcttgttgtcgaggagaagcgtccctgtctccacgtaccagcatgtaaggatccagaggaggaagagctgtag

SEQ ID NO: 130289 - DNA, 1410 bp, Artificial Sequence
  derived and/or modified sequence
atgattacagaaggggcacaagcaccacgcctcttactgccccctttgctgctcttactgactctaccagcgacaggcagtgaccctgtcctttgctttactcaatacgaggaatcaagtggaaagtgtaaggggctcctgggcggtggcgtgagtgtggaggactgctgtctgaatacagccttcgcataccagaaaaggagcgggggactttgtcagccatgcagaagcccaagatggtccctctggtccacttgggctccatgcagtgttacctgcagcgagggttcccagttgcggtatcggcgttgcgtgggatggaatggccagtgcagtggtaaagttgcgcctgggacactggagtggcagctgcaggcctgcgaggaccagcagtgctgtcccgaaatgggtggctggtcgggctgggggccttgggagccttgttcagtgacgtgttctaagggaacgagaactcgccgaagagcttgtaaccaccctgctcccaagtgcgggggtcactgccccggtcaggcacaggagtccgaggcctgtgacacccaacaagtctgtcctacgcacggggcatgggctacatggggaccttggaccccttgctccgcttcttgtcatggtggccctcatgaacctaaggagacccgaagcagaaagtgcagtgccccagaaccgagtcagaagccacctggaaaaccttgcccaggcctggcctatgaacaaagacgttgtactgggcttcccccttgcccggtggccggaggttggggtccatggggcccagtgtccccttgccccgtcacctgtggcttaggacagacaatggaacagaggacgtgtaatcaccctgtgccacaacacgggggaccattttgcgcaggtgatgccacgagaacgcacatttgcaatacggccgtcccatgtccggtcgatggagagtgggatagttggggggagtggagcccctgcatcagacgcaatatgaagagcatcagctgtcaggagattccaggtcaacagagtcggggacgcacgtgtagggggaggaaattcgatggacaccgttgcgctggccagcagcaggacattaggcactgctacagcatccaacactgcccccttaaaggcagttggtccgaatggagcacgtggggtttatgcatgcctccttgtggacctaaccctacgcgtgctaggcagcgtctgtgtacacccctcttgcccaagtacccccctacagtaagtatggtggagggccagggcgagaaaaatgtgacattttggggcagaccactccctcgctgtgaagaactgcaagggcaaaagctcgtcgtggaagagaaacggccatgcctgcacgtccccgcttgcaaggatcccgaggaggaggaattatag

SEQ ID NO: 130290 - DNA, 1410 bp, Artificial Sequence
  derived and/or modified sequence
atgattactgaaggcgctcaagcccccagactacttctcccaccacttctacttcttttaacactccctgctactggctccgatcctgtgctctgctttacccagtatgaagagtcaagcgggaaatgcaaaggtctgctgggcgggggcgtttctgtggaagattgttgtctcaacacagcatttgcctaccaaaaacggtccggcgggctgtgtcagccctgtagatcacccaggtggtctctctggtccacgtgggcgccttgctctgttacatgctccgaggggtcacagctgcgctatcgtcggtgcgttggatggaatgggcagtgtagtggtaaagtcgctcctggtactttggagtggcagctgcaagcatgcgaggaccagcagtgttgccctgagatgggcggttggagcggctggggcccttgggaaccatgtagtgtcacctgttcaaaaggcacacgcactcggagacgcgcctgcaatcacccagcccccaaatgtggaggccactgccccggtcaggcccaggagtccgaggcatgcgacacacagcaggtttgtccaacccacggcgcctgggcaacttggggcccctggaccccttgctcagcttcctgccacggcggccctcatgaaccaaaggaaaccaggtccagaaagtgttccgcccccgagccgtcccaaaaaccacctggcaagccctgcccaggtctggcttatgaacagcgccgatgcacaggcctgcctccatgtccagtggctggcggatgggggccctgggggccagtgtctccttgccctgtcacttgcggcctcggccagactatggagcaacggacctgtaaccacccagttccccaacacggtggccctttctgtgccggggacgctactcggacacatatatgtaacaccgctgttccttgtccagtggacggagaatgggacagctggggagagtggagcccttgcatccggcgtaacatgaaaagtatttcctgccaagaaataccaggacagcaaagtagggggcgaacttgtagaggccggaagtttgatgggcaccggtgtgccggccaacagcaagacatccgccattgttactcaattcagcattgtcccctaaaaggatcctggtctgagtggagcacctgggggctgtgcatgccaccgtgcgggcccaaccccacccgagcccgccagcgcctgtgtacccccttattaccgaaatacccacctaccgtttcgatggttgaagggcagggggaaaaaaacgtgacattttggggccggcccctgccccgatgcgaagagcttcaaggacaaaagctcgtggttgaggagaagaggccatgcttgcatgttccagcctgcaaagaccccgaggaagaagaactctag

SEQ ID NO: 130291 - DNA, 1410 bp, Artificial Sequence
  derived and/or modified sequence
atgatcaccgaaggagcacaagcacctagactgctgcttccaccgctgcttctcctacttacccttccggctacaggctcagaccccgtactgtgttttacccagtatgaagagagcagtgggaaatgtaaagggctattaggagggggagtgagtgttgaagactgttgcctgaacaccgcctttgcctaccagaagagatcaggaggactatgccagccatgcagaagtccgcgttggtcgttatggagcacctgggctccctgcagtgtcacttgttccgagggttcccagttgcgttaccggaggtgtgtcggatggaatggccagtgtagtggaaaggtagcccctgggactcttgagtggcagcttcaggcttgtgaagatcagcagtgttgtccagaaatgggagggtggtccggctggggaccctgggaaccttgcagcgtaacatgtagcaaaggtactcggacgcgaagacgggcatgcaaccatcccgcccccaaatgcggcggacattgcccgggtcaggcccaggagtccgaagcatgtgacacgcagcaagtgtgtccaacccacggagcctgggccacatggggcccatggactccctgcagtgcctcatgccatggcggtccacacgagcctaaggaaacgcggagtcggaagtgcagtgcaccggagccttcccagaagccgcccggaaagccctgccctggtttggcttatgagcagcgacggtgtactgggctccccccatgcccagttgccgggggatggggaccctgggggcccgtttccccgtgtccagttacctgtggtctcggtcagaccatggagcagcgtacttgtaatcatcccgtaccccagcacggtggtcccttctgtgccggcgatgcgacccgcacccacatctgcaacaccgccgtgccgtgcccagttgacggagagtgggatagttggggagagtggtccccctgcatccgccgtaacatgaagtcgattagttgccaggagatacccggacagcaaagcaggggccggacatgcagaggacgtaaattcgacggccacagatgcgctggccaacagcaggatattagacattgttatagcatccagcattgtcccctgaaaggctcttggtccgaatggtccacttggggtctttgtatgccaccatgcggcccgaaccccaccagagcacgtcagcgactttgcacccccctgcttcctaaatatccccctacagtatccatggtagagggtcaaggagagaagaatgtgacattctggggccgccctctacccaggtgcgaggaattacagggccaaaaactggttgtagaagagaaacgaccctgtctccacgtcccggcctgtaaggatccagaagaggaggagctctag

SEQ ID NO: 130292 - DNA, 1410 bp, Artificial Sequence
  derived and/or modified sequence
atgatcactgagggcgcacaggctccccgtcttttgttaccgcccctcttgctactgctgacactgcctgccactggctcagatcctgttctctgcttcacccagtacgaagagagcagcggaaaatgtaaagggctcctcggcgggggagttagtgtggaagattgctgcctcaatacggcatttgcttatcaaaagcgttcaggtggtctatgccagccctgccgctctcctcgctggtcgctgtggtctacctgggctccttgtagcgtgacgtgttcagaaggaagtcaacttcgctatagaagatgcgtcggatggaacggacagtgttcgggaaaggtcgcaccggggacactcgagtggcagctgcaggcttgcgaggaccaacagtgctgtcccgagatgggtggctggtcgggatggggaccatgggaaccatgcagtgttacctgttccaaagggacccggactcgacggagggcctgcaaccaccccgcccctaagtgtggagggcattgccccggtcaagcccaagagtcagaagcttgcgacacccagcaagtgtgccccacccatggcgcctgggctacttggggcccgtggacaccctgtagtgcgagctgccacggtggccctcacgaacctaaggaaaccaggagcaggaagtgcagcgcccctgagccatcccagaaaccgcctggcaaaccgtgtcccggcttagcttacgaacagcgaaggtgcaccggtctcccaccctgtcctgtggctggagggtggggtccctggggaccagtctcaccctgccctgtaacctgcggtctaggacaaaccatggaacaaaggacgtgcaatcacccggtaccccagcacggaggcccattctgcgccggcgatgctactaggacccatatctgcaacaccgcggtgccttgccccgtagatggcgagtgggactcttggggcgagtggtcaccttgcattcggcgaaatatgaaatctatttcctgtcaggagataccaggacagcagagcaggggaagaacatgcagaggaagaaaattcgatggccatagatgcgctggccagcagcaggatatcagacactgttattccatccagcactgtcctcttaaaggtagttggagcgaatggagcacgtggggactatgtatgcccccttgtggcccgaacccaacacgagcaagacagcggctatgtacccccctgctgcccaagtaccctccaacagtctccatggtcgaaggacagggcgagaaaaacgtgaccttttggggccggccactcccccggtgcgaggaattacaagggcagaagttggtcgtggaggaaaagagaccatgtctgcacgtgcccgcttgtaaggacccagaagaggaagaattatag

SEQ ID NO: 130293 - DNA, 1410 bp, Artificial Sequence
  derived and/or modified sequence
atgatcaccgagggggcccaagcacccagactcctcttgccaccacttttgctcttactcaccctgcctgcaaccggctccgacccagtcttgtgctttactcagtacgaagaatcctctggtaagtgtaaagggttactcggcggtggcgtgtcagttgaggattgctgtctcaatactgcatttgcgtaccagaaacgaagtggagggctctgtcagccctgccgctccccccgctggtcactttggtctacctgggcaccttgttccgtcacatgttctgaaggctctcagctccggtacaggagatgtgtaggttggaatggccaatgctctggaaaagtggcgcctgggacgttggaatggcagctgcaggcatgcgaggatcaacagtgctgtcctgaaatgggaggctggagtggttggggaccctgggagccctgcagcgtgacctgtagtaaggggacgcgcaccagacgacgcgcctgtaaccaccccgcaccaaaatgcggtggacattgccctggacaagctcaagagtcagaggcatgcgacacgcagcaggtttgccccacacatggagcttgggcaacatggggcccatggaccccttgttctgcatcctgtcacggagggccccatgaaccaaaggaaacacgctcaagaaaatgctctgcacctgagccgagccaaaaaccgcctggcaaaccctgccccggactggcctatgaacagcgccggtgtacaggtttacctccctgccccgtggctggcggatgggggccctgggggcctgtgtctccctgtccagtgacatgcggtctaggccagacaatggagcagagaacatgtaatcaccctgtcccgcaacatggtggcccgttttgcgccggagacgctacccgtacccatatttgcaacactgccgttccttgccccgtggacggcgaatgggactcttggggtgagtggtcaccctgcatccggagaaatatgaagagcatcagttgccaagaaattcccggccaacagagccgtggaaggacttgcagagggcggaaatttgatggacataggtgcgctggtcagcagcaagatataagacactgttactcaattcagcactgccccctgaagggttcctggagtgagtggagtacttgggggctttgtatgccaccatgtggtccaaacccaacccgagcccgccagagactgtgtacccctctccttccaaaatatcccccaactgtgtctatggttgaaggacagggggagaaaaacgtgacgttttggggacgccctctcccccgctgtgaagagctccagggccagaagttagttgtggaagaaaagcgcccttgtttacatgtccccgcctgcaaggatcccgaagaagaagagttgtag

SEQ ID NO: 130294 - DNA, 1713 bp, Artificial Sequence
  derived and/or modified sequence
gagcaccgcacactcacttcaccctggttcaacacccccacgaggttgaccccgtcattatgttagagattatgcattttccacatagggaaactgaggctcaggggtgttaagtgactcacccaaggtcacacggctaggaagttgctgcacgctcctatgctccatttcctctgggagcctatcaacccagataaagcgggacctcctctctggtagaggtgcagggggcagtactcaacatgatcacagagggagcgcaggcccctcgattgttgctgccgccgctgctcctgctgctcaccctgccagccacaggctcagaccccgtgctctgcttcacccagtatgaagaatcctccggcaagtgcaagggcctcctggggggtggtgtcagcgtggaagactgctgtctcaacactgcctttgcctaccagaaacgtagtggtgggctctgtcagccttgcaggtccccacgatggtccctgtggtccacatgggccccctgttcggtgacgtgctctgagggctcccagctgcggtaccggcgctgtgtgggctggaatgggcagtgctctggaaaggtggcacctgggaccctggagtggcagctccaggcctgtgaggaccagcagtgctgtcctgagatgggcggctggtctggctgggggccctgggagccttgctctgtcacctgctccaaagggacccggacccgcaggcgagcctgtaatcaccctgctcccaagtgtgggggccactgcccaggacaggcacaggaatcagaggcctgtgacacccagcaggtctgccccacacacggggcctgggccacctggggcccctggaccccctgctcagcctcctgccacggtggaccccacgaacctaaggagacacgaagccgcaagtgttctgcacctgagccctcccagaaacctcctgggaagccctgcccggggctagcctacgagcagcggaggtgcaccggcctgccaccctgcccagtggctgggggctgggggccttggggccctgtgagcccctgccctgtgacctgtggcctgggccagaccatggaacaacggacgtgcaatcaccctgtgccccagcatgggggccccttctgtgctggcgatgccacccggacccacatctgcaacacagctgtgccctgccctgtggatggggagtgggactcgtggggggagtggagcccctgtatccgacggaacatgaagtccatcagctgtcaagaaatcccgggccagcagtcacgcgggaggacctgcaggggccgcaagtttgacggacatcgatgtgccgggcaacagcaggatatccggcactgctacagcatccagcactgccccttgaaaggatcatggtcagagtggagtacctgggggctgtgcatgcccccctgtggacctaatcctacccgtgcccgccagcgcctctgcacacccttgctccccaagtacccgcccaccgtttccatggtcgaaggtcagggcgagaagaacgtgaccttctgggggagaccgctgccacggtgtgaggagctacaagggcagaagctggtggtggaggagaaacgaccatgtctacacgtgcctgcttgcaaagaccctgaggaagaggaactctaacacttctctcctccactctgagccccctgaccttccaaacctcaataaactagcctcttcg

SEQ ID NO: 130295 - DNA, 1410 bp, Artificial Sequence
  derived and/or modified sequence
atgatcaccgagggcgcccaggcccccagactgctgctgccccccctgctgctgctgctgaccctgcccgccaccggcagcgaccccgtgctgtgcttcacccagtacgaggagagcagcggcaagtgcaagggcctgctgggcggcggcgtgagcgtggaggactgctgcctgaacaccgccttcgcctaccagaagagaagcggcggcctgtgccagccctgcagaagccccagatggagcctgtggagcacctgggccccctgcagcgtgacctgcagcgagggcagccagctgagatacagaagatgcgtgggctggaacggccagtgcagcggcaaggtggcccccggcaccctggagtggcagctgcaggcctgcgaggaccagcagtgctgccccgagatgggcggctggagcggctggggcccctgggagccctgcagcgtgacctgcagcaagggcaccagaaccagaagaagagcctgcaaccaccccgcccccaagtgcggcggccactgccccggccaggcccaggagagcgaggcctgcgacacccagcaggtgtgccccacccacggcgcctgggccacctggggcccctggaccccctgcagcgccagctgccacggcggcccccacgagcccaaggagaccagaagcagaaagtgcagcgcccccgagcccagccagaagccccccggcaagccctgccccggcctggcctacgagcagagaagatgcaccggcctgcccccctgccccgtggccggcggctggggcccctggggccccgtgagcccctgccccgtgacctgcggcctgggccagaccatggagcagagaacctgcaaccaccccgtgccccagcacggcggccccttctgcgccggcgacgccaccagaacccacatctgcaacaccgccgtgccctgccccgtggacggcgagtgggacagctggggcgagtggagcccctgcatcagaagaaacatgaagagcatcagctgccaggagatccccggccagcagagcagaggcagaacctgcagaggcagaaagttcgacggccacagatgcgccggccagcagcaggacatcagacactgctacagcatccagcactgccccctgaagggcagctggagcgagtggagcacctggggcctgtgcatgcccccctgcggccccaaccccaccagagccagacagagactgtgcacccccctgctgcccaagtacccccccaccgtgagcatggtggagggccagggcgagaagaacgtgaccttctggggcagacccctgcccagatgcgaggagctgcagggccagaagctggtggtggaggagaagagaccctgcctgcacgtgcccgcctgcaaggaccccgaggaggaggagctgtag

SEQ ID NO: 130296 - DNA, 1410 bp, Artificial Sequence
  derived and/or modified sequence
atgatcaccgagggcgcacaagcacccaggctcctgctgccccctctgctcctgctgctcaccctgcccgccacaggctctgatcccgtattgtgtttcacacaatacgaggagagcagtggaaaatgtaaggggcttctggggggtggcgtcagcgtggaagattgttgtctcaacacggcctttgcataccagaaaagatccggcggtttgtgtcagccctgtcggtcccctcgatggtccttgtggtcaacatgggccccatgctcagtgacatgctcagagggatctcagttgaggtaccgcagatgcgtgggctggaacggccagtgttccggaaaggttgctccaggaaccttggaatggcagctccaggcttgcgaggaccagcagtgctgccctgaaatgggagggtggtctggctggggcccctgggaaccatgctcagtaacgtgttccaagggaacgaggactcgacggcgggcctgcaatcaccctgctcccaaatgcgggggtcattgtcctgggcaagcccaggagtcagaggcttgcgacacccagcaggtttgtcccacacatggggcttgggccacatgggggccctggaccccctgcagtgcatcatgtcacggggggcctcatgagcctaaggaaacccgatcacggaagtgctccgcaccagagccaagccagaagccgcccggaaagccttgtcccggtcttgcctatgaacaacggcggtgcacgggcctgcctccatgcccagtggccggaggttggggaccttggggaccggtatccccctgtcctgtcacgtgtggacttggacaaacaatggagcagcggacatgcaaccaccccgtgccacagcatgggggaccattctgtgcaggcgacgccacccgcacacatatctgtaacacagccgtcccctgcccagtcgatggggagtgggattcctggggagagtggtctccctgtatccgtaggaatatgaaaagcatatcgtgccaagagattcctggtcaacagtcccggggacgcacctgtaggggacggaagttcgatgggcacagatgtgcaggtcaacaacaggatatccggcattgttatagcatccagcattgccccctaaaaggctcatggtccgaatggagcacatggggactgtgtatgccgccctgtggccccaacccaacgagagcaagacagagactctgcacacctctcctgcctaagtatcctcctacagtcagcatggtagagggccagggcgagaaaaacgtaacattctgggggcgacctctcccccggtgtgaagagctgcagggacagaaactggtcgtggaggaaaagagaccatgcctccacgtaccggcttgcaaggaccctgaagaagaagagctgtag

SEQ ID NO: 130297 - DNA, 1410 bp, Artificial Sequence
  derived and/or modified sequence
atgatcaccgagggagcacaggcgcctagactgctgctccctcctttactcctactgcttactctgcctgctacggggtccgacccagttttatgttttacacagtatgaagaatcctctggcaaatgtaaaggtctactgggaggcggggtgtccgtggaggactgttgccttaacacagcttttgcctaccagaaaaggtcaggggggctctgccagccctgcaggtccccccgttggtctctgtggagtacttgggctccctgctccgtgacctgtagtgaaggatctcaactgagataccgtcgctgcgtcggttggaacgggcagtgcagcggaaaagtggcacctgggacattagagtggcaactacaggcatgcgaggatcagcaatgctgtccagaaatgggcggctggtccggctggggaccttgggagccgtgcagcgttacatgcagcaagggcaccaggaccagacggagagcctgcaatcacccggcccctaagtgtggcggacactgcccgggacaggcgcaggagtctgaggcatgtgacactcagcaggtttgccccactcatggcgcctgggcaacttggggaccgtggacaccatgctctgcatcatgtcatgggggcccacacgagcctaaagaaacccgctcacgtaagtgctctgcccctgaaccctcgcagaagccaccaggaaaaccctgtccaggcctggcatacgagcagaggcggtgcacagggctgcctccctgtccagtggctgggggatggggcccctggggccctgtttctccatgtcccgtgacatgtggattgggccagacaatggagcagcgtacatgcaaccaccctgttccacagcacggaggacccttttgtgccggtgatgcaacaaggacgcatatctgtaacaccgcagtcccctgtcccgtggacggggaatgggattcttggggagaatggagtccttgcattcggcgcaacatgaaatcgataagctgccaggaaattcccggccagcaatcccgaggcagaacatgcaggggccggaagttcgacggccaccgctgcgccggccagcaacaagatatacggcattgctattccatccaacactgccctctcaagggatcctggagcgagtggagcacctggggactgtgtatgcccccatgtggaccaaacccgacgagagcgcgtcaacggctgtgcaccccactgcttcccaaatatcctcccacagttagcatggttgagggccagggtgaaaagaatgttaccttttggggacgtcccctccccagatgtgaggagctacaggggcagaagctggtcgtggaggagaaacggccctgcttacacgtcccagcttgtaaggaccctgaggaggaagagctgtag

SEQ ID NO: 130298 - DNA, 1410 bp, Artificial Sequence
  derived and/or modified sequence
atgatcacagaaggagcccaggccccccggctgctgctgccccccctgctgctgctgctgaccctgcctgccactggaagtgaccctgtgctgtgcttcacccagtatgaggagagcagcggcaagtgcaagggcctgctgggcggcggcgtgtctgtggaggactgctgcctgaacacagcctttgcctaccagaagaggtctgggggcctgtgccagccctgccgcagcccccgctggagcctgtggagcacctgggccccctgcagcgtgacctgcagcgagggcagccagctgcgctaccgccgctgtgtgggctggaatggccagtgcagcggcaaggtggcccctggcaccctggagtggcagctgcaggcctgtgaggaccagcagtgctgcccagagatgggcggctggagcggctggggcccctgggagccctgcagcgtgacctgcagcaagggcaccaggacccggcggcgggcctgcaaccacccagcccccaagtgtggcggccactgccccggccaggcccaggagagcgaggcctgtgacacccagcaggtgtgccccacccatggagcctgggccacctggggcccctggaccccctgcagcgccagctgccacggcggcccccatgagcccaaggagaccaggagcaggaaatgttctgcccctgagcccagccagaagcccccaggcaagccctgccccggcctggcctatgagcagaggcgctgcaccggcctgcccccctgccctgtggccggcggctggggcccctggggccctgtgagcccctgccctgtgacctgtggcctgggccagaccatggagcagaggacctgcaaccaccctgtgccccagcacggcggccccttctgtgctggagatgccaccaggacccacatctgcaacacagctgtgccctgccctgtggatggagagtgggacagctggggcgagtggagcccctgcatcagaagaaacatgaagagcatcagctgccaggagatccctggccagcagagccggggccgcacctgccggggcaggaagtttgatggccaccgctgtgccggccagcagcaggacatccgccactgctacagcatccagcactgccccctgaagggctcctggagcgagtggagcacctggggcctgtgcatgccaccctgtggccccaaccccacccgggcccggcagaggctgtgcacccccctgctgcccaagtacccacccaccgtgtccatggtggagggccagggcgagaagaatgtgaccttctggggccggcccctgccccgctgtgaggagctgcagggccagaagctggtggtggaggagaagaggccctgcctgcacgtgcctgcctgcaaggaccctgaggaggaggagctgtag

SEQ ID NO: 130299 - DNA, 1410 bp, Artificial Sequence
  derived and/or modified sequence
atgatcaccgagggcgcccaggccccccggctgctgctgccccccttgctgctgctgttaactctccctgcaaccgggagcgatccagttctctgttttacccagtacgaggagtcttccgggaagtgtaagggacttttaggcggcggcgtttctgtcgaggattgttgtcttaatactgcgtttgcgtaccagaagaggagcgggggattgtgtcaaccgtgccggagccctagatggagtctctggagtacgtgggcaccctgtagcgtgacttgcagtgaggggagccagttgagatacagacggtgcgtaggctggaatggacaatgctcaggaaaagttgcccccgggaccttagaatggcagctgcaggcttgcgaagaccagcagtgctgccccgagatgggcggatggtccggctgggggccttgggagccatgttctgtgacttgtagtaagggaacgcgtactaggcggcgcgcctgcaatcaccccgccccaaagtgcggggggcattgccccggtcaggcccaggagagcgaggcttgcgacacccagcaggtgtgtccgactcacggggcctgggcaacctggggcccttggaccccttgttcggcttcctgccatggagggccccacgaacctaaggagacccggagtcggaagtgtagcgcccctgaaccgagccagaagccacctggcaaaccctgtcctggattagcttacgagcaacgccgatgcaccggtcttccaccttgccctgtagccggcggctggggtccctggggacctgtgtcgccttgccccgtgacctgtggcctaggacagactatggagcaaaggacttgcaaccaccccgtgcctcagcatggtggccctttttgtgctggtgacgccacccggacccatatttgtaatactgctgtgccctgtccggtggatggcgagtgggattcttggggcgagtggtccccttgcatccggcgcaacatgaagtctatcagttgtcaggagatcccgggccagcaaagcagagggaggacatgtcgcggcaggaagtttgatggccacagatgtgccggacagcaacaagatatccgacattgctacagcatccagcactgccccttaaaggggagttggtcagaatggtcgacttggggcctgtgcatgcccccctgcggcccaaatcctaccagagctaggcagaggctctgcacacccctcttacctaagtaccctccaacggtaagcatggtcgagggccagggagagaaaaatgttactttttgggggcgccccctaccacggtgtgaggagctgcaaggtcagaagctggtagtcgaagagaagaggccctgcttgcacgtgcctgcatgtaaggatcccgaggaggaagagttatag

SEQ ID NO: 130300 - DNA, 1410 bp, Artificial Sequence
  derived and/or modified sequence
atgatcaccgagggcgcccaggccccccggctgctgctgccccccctcctgttgctattaaccctgcccgccaccggctcagatcctgtgctttgtttcacacaatacgaagagtcctctggaaagtgtaagggactgctgggaggaggagtgagtgtggaagactgttgtctgaatacagcattcgcctaccagaagcggagtggaggattgtgtcagccatgccgttctccccggtggtccttgtggtctacctgggctccctgctcagttacgtgttccgagggcagccagcttagatatcgtcggtgcgtggggtggaatggtcaatgtagtggcaaggtggcgcccggaaccctcgagtggcaactgcaggcctgcgaagaccagcaatgttgtccagaaatgggaggttggagcggttggggtccttgggaaccctgttcggtgacctgctccaaaggcacacgcacacgccggagagcttgtaaccaccctgcccccaagtgcgggggacactgcccgggccaggcgcaggaatctgaggcctgtgacacccaacaggtctgccctacccacggtgcttgggccacatgggggccctggaccccatgttctgctagttgccacgggggcccacatgagccaaaggagacccgaagtcgaaaatgttccgcccctgaaccctctcagaaaccccctggaaagccatgtcccgggctcgcttatgagcagagaagatgtactggcctccctccatgtccggttgcaggaggctggggaccatggggaccagtcagtccctgtcccgtaacatgtggcttaggccaaactatggagcagaggacttgcaaccaccctgtacctcagcacgggggccccttctgcgccggcgatgccactcggacacatatttgtaatactgctgtcccgtgcccagtggacggggaatgggatagttggggggagtggagcccgtgcatacgacggaacatgaagagtatttcctgccaggaaattccaggccagcagtccaggggccggacatgcagaggacggaagttcgatggccatagatgtgcggggcaacaacaggacattaggcactgctattcgattcagcattgtccactgaagggcagctggagcgaatggagcacctggggactttgtatgccaccgtgcggtcccaatcctaccagggcaaggcagaggctgtgtactcctttgctgcccaaatatccgcccaccgtgagcatggtggagggacaaggagaaaagaatgtgacattctgggggagacctcttcctcggtgcgaggaactccagggccagaagttagttgtcgaggagaagcggccttgtctgcacgtgccggcctgcaaggatcccgaggaggaagagctatag

SEQ ID NO: 130301 - RNA, 1410 nt, Artificial Sequence
  derived and/or modified sequence
augauuacugaaggcgcucaagcccccagacuacuucucccaccacuucuacuucuuuuaacacucccugcuacuggcuccgauccugugcucugcuuuacccaguaugaagagucaagcgggaaaugcaaaggucugcugggcgggggcguuucuguggaagauuguugucucaacacagcauuugccuaccaaaaacgguccggcgggcugugucagcccuguagaucacccagguggucucucugguccacgugggcgccuugcucuguuacaugcuccgaggggucacagcugcgcuaucgucggugcguuggauggaaugggcaguguagugguaaagucgcuccugguacuuuggaguggcagcugcaagcaugcgaggaccagcaguguugcccugagaugggcgguuggagcggcuggggcccuugggaaccauguagugucaccuguucaaaaggcacacgcacucggagacgcgccugcaaucacccagcccccaaauguggaggccacugccccggucaggcccaggaguccgaggcaugcgacacacagcagguuuguccaacccacggcgccugggcaacuuggggccccuggaccccuugcucagcuuccugccacggcggcccucaugaaccaaaggaaaccagguccagaaaguguuccgcccccgagccgucccaaaaaccaccuggcaagcccugcccaggucuggcuuaugaacagcgccgaugcacaggccugccuccauguccaguggcuggcggaugggggcccugggggccagugucuccuugcccugucacuugcggccucggccagacuauggagcaacggaccuguaaccacccaguuccccaacacgguggcccuuucugugccggggacgcuacucggacacauauauguaacaccgcuguuccuuguccaguggacggagaaugggacagcuggggagaguggagcccuugcauccggcguaacaugaaaaguauuuccugccaagaaauaccaggacagcaaaguagggggcgaacuuguagaggccggaaguuugaugggcaccggugugccggccaacagcaagacauccgccauuguuacucaauucagcauuguccccuaaaaggauccuggucugaguggagcaccugggggcugugcaugccaccgugcgggcccaaccccacccgagcccgccagcgccuguguacccccuuauuaccgaaauacccaccuaccguuucgaugguugaagggcagggggaaaaaaacgugacauuuuggggccggccccugccccgaugcgaagagcuucaaggacaaaagcucgugguugaggagaagaggccaugcuugcauguuccagccugcaaagaccccgaggaagaagaacucuag

SEQ ID NO: 130302 - RNA, 1410 nt, Artificial Sequence
  derived and/or modified sequence
augaucaccgaaggagcacaagcaccuagacugcugcuuccaccgcugcuucuccuacuuacccuuccggcuacaggcucagaccccguacuguguuuuacccaguaugaagagagcagugggaaauguaaagggcuauuaggagggggagugaguguugaagacuguugccugaacaccgccuuugccuaccagaagagaucaggaggacuaugccagccaugcagaaguccgcguuggucguuauggagcaccugggcucccugcagugucacuuguuccgaggguucccaguugcguuaccggaggugugucggauggaauggccaguguaguggaaagguagccccugggacucuugaguggcagcuucaggcuugugaagaucagcaguguuguccagaaaugggagggugguccggcuggggacccugggaaccuugcagcguaacauguagcaaagguacucggacgcgaagacgggcaugcaaccaucccgcccccaaaugcggcggacauugcccgggucaggcccaggaguccgaagcaugugacacgcagcaaguguguccaacccacggagccugggccacauggggcccauggacucccugcagugccucaugccauggcgguccacacgagccuaaggaaacgcggagucggaagugcagugcaccggagccuucccagaagccgcccggaaagcccugcccugguuuggcuuaugagcagcgacgguguacugggcuccccccaugcccaguugccgggggauggggacccugggggcccguuuccccguguccaguuaccuguggucucggucagaccauggagcagcguacuuguaaucaucccguaccccagcacgguggucccuucugugccggcgaugcgacccgcacccacaucugcaacaccgccgugccgugcccaguugacggagagugggauaguuggggagaguggucccccugcauccgccguaacaugaagucgauuaguugccaggagauacccggacagcaaagcaggggccggacaugcagaggacguaaauucgacggccacagaugcgcuggccaacagcaggauauuagacauuguuauagcauccagcauuguccccugaaaggcucuugguccgaaugguccacuuggggucuuuguaugccaccaugcggcccgaaccccaccagagcacgucagcgacuuugcaccccccugcuuccuaaauaucccccuacaguauccaugguagagggucaaggagagaagaaugugacauucuggggccgcccucuacccaggugcgaggaauuacagggccaaaaacugguuguagaagagaaacgacccugucuccacgucccggccuguaaggauccagaagaggaggagcucuag

SEQ ID NO: 130303 - RNA, 1410 nt, Artificial Sequence
  derived and/or modified sequence
augaucacugagggcgcacaggcuccccgucuuuuguuaccgccccucuugcuacugcugacacugccugccacuggcucagauccuguucucugcuucacccaguacgaagagagcagcggaaaauguaaagggcuccucggcgggggaguuaguguggaagauugcugccucaauacggcauuugcuuaucaaaagcguucagguggucuaugccagcccugccgcucuccucgcuggucgcuguggucuaccugggcuccuuguagcgugacguguucagaaggaagucaacuucgcuauagaagaugcgucggauggaacggacaguguucgggaaaggucgcaccggggacacucgaguggcagcugcaggcuugcgaggaccaacagugcugucccgagauggguggcuggucgggauggggaccaugggaaccaugcaguguuaccuguuccaaagggacccggacucgacggagggccugcaaccaccccgccccuaaguguggagggcauugccccggucaagcccaagagucagaagcuugcgacacccagcaagugugccccacccauggcgccugggcuacuuggggcccguggacacccuguagugcgagcugccacgguggcccucacgaaccuaaggaaaccaggagcaggaagugcagcgccccugagccaucccagaaaccgccuggcaaaccgugucccggcuuagcuuacgaacagcgaaggugcaccggucucccacccuguccuguggcuggaggguggggucccuggggaccagucucacccugcccuguaaccugcggucuaggacaaaccauggaacaaaggacgugcaaucacccgguaccccagcacggaggcccauucugcgccggcgaugcuacuaggacccauaucugcaacaccgcggugccuugccccguagauggcgagugggacucuuggggcgaguggucaccuugcauucggcgaaauaugaaaucuauuuccugucaggagauaccaggacagcagagcaggggaagaacaugcagaggaagaaaauucgauggccauagaugcgcuggccagcagcaggauaucagacacuguuauuccauccagcacuguccucuuaaagguaguuggagcgaauggagcacguggggacuauguaugcccccuuguggcccgaacccaacacgagcaagacagcggcuauguaccccccugcugcccaaguacccuccaacagucuccauggucgaaggacagggcgagaaaaacgugaccuuuuggggccggccacucccccggugcgaggaauuacaagggcagaaguuggucguggaggaaaagagaccaugucugcacgugcccgcuuguaaggacccagaagaggaagaauuauag

SEQ ID NO: 130304 - RNA, 1410 nt, Artificial Sequence
  derived and/or modified sequence
augaucaccgagggggcccaagcacccagacuccucuugccaccacuuuugcucuuacucacccugccugcaaccggcuccgacccagucuugugcuuuacucaguacgaagaauccucugguaaguguaaaggguuacucggcgguggcgugucaguugaggauugcugucucaauacugcauuugcguaccagaaacgaaguggagggcucugucagcccugccgcuccccccgcuggucacuuuggucuaccugggcaccuuguuccgucacauguucugaaggcucucagcuccgguacaggagauguguagguuggaauggccaaugcucuggaaaaguggcgccugggacguuggaauggcagcugcaggcaugcgaggaucaacagugcuguccugaaaugggaggcuggagugguuggggacccugggagcccugcagcgugaccuguaguaaggggacgcgcaccagacgacgcgccuguaaccaccccgcaccaaaaugcgguggacauugcccuggacaagcucaagagucagaggcaugcgacacgcagcagguuugccccacacauggagcuugggcaacauggggcccauggaccccuuguucugcauccugucacggagggccccaugaaccaaaggaaacacgcucaagaaaaugcucugcaccugagccgagccaaaaaccgccuggcaaacccugccccggacuggccuaugaacagcgccgguguacagguuuaccucccugccccguggcuggcggaugggggcccugggggccugugucucccuguccagugacaugcggucuaggccagacaauggagcagagaacauguaaucacccugucccgcaacaugguggcccguuuugcgccggagacgcuacccguacccauauuugcaacacugccguuccuugccccguggacggcgaaugggacucuuggggugaguggucacccugcauccggagaaauaugaagagcaucaguugccaagaaauucccggccaacagagccguggaaggacuugcagagggcggaaauuugauggacauaggugcgcuggucagcagcaagauauaagacacuguuacucaauucagcacugcccccugaaggguuccuggagugaguggaguacuugggggcuuuguaugccaccaugugguccaaacccaacccgagcccgccagagacuguguaccccucuccuuccaaaauaucccccaacugugucuaugguugaaggacagggggagaaaaacgugacguuuuggggacgcccucucccccgcugugaagagcuccagggccagaaguuaguuguggaagaaaagcgcccuuguuuacauguccccgccugcaaggaucccgaagaagaagaguuguag

SEQ ID NO: 130305 - protein, 134 aa, Artificial Sequence
  derived and/or modified sequence
MAATMKKAAAEDVNVTFEDQQKINKFARNTSRITELKEEIEVKKKQLQNLEDACDDIMLADDDCLMIPYQIGDVFISHSQEETQEMLEEAKKNLQEEIDALESRVESIQRVLADLKVQLYAKFGSNINLEADES

SEQ ID NO: 130306 - DNA, 405 bp, Artificial Sequence
  derived and/or modified sequence
atggccgccacaatgaaaaaggcagctgcagaagatgtgaatgtcacattcgaagaccagcaaaagatcaataaattcgcgcgcaatacatcacggatcaccgaattaaaagaggaaatcgaggttaagaagaagcaattgcagaaccttgaagatgcatgcgacgatatcatgctggccgatgacgactgccttatgataccgtaccagattggcgatgtctttatcagccacagtcaggaggagacacaggagatgctggaggaggcaaaaaaaaacctccaggaagaaatcgacgcattagagagtcgggtggagtccattcagagggttctcgctgatttaaaagtgcaactgtacgctaagttcggtagtaacatcaatctggaggctgacgagagttag

SEQ ID NO: 130307 - DNA, 405 bp, Artificial Sequence
  derived and/or modified sequence
atggccgccaccatgaagaaggctgctgctgaagatgtgaatgtgacctttgaggaccagcagaagatcaacaagtttgccaggaacaccagccgcatcacagagctgaaggaggagattgaggtgaagaagaagcagctgcagaacctggaggatgcctgtgatgacatcatgctggctgatgatgactgcctgatgatcccctaccagattggagatgtgttcatcagccacagccaggaggagacccaggagatgctggaggaggccaagaagaacctgcaggaggagattgatgccctggagagccgggtggagagcatccagagggtgctggccgacctgaaggtgcagctgtatgccaagtttggcagcaacatcaacctggaggctgatgagagctag

SEQ ID NO: 130308 - DNA, 405 bp, Artificial Sequence
  derived and/or modified sequence
atggccgccaccatgaagaaggccgccgccgaggacgtgaacgtgacattcgaggaccagcagaagattaacaagttcgctaggaacacatctcgaattaccgagctcaaggaggaaatcgaggttaagaagaaacagctacaaaacctggaagacgcctgcgacgatattatgctggccgatgatgactgtctcatgatcccatatcagatcggcgatgttttcatcagtcatagccaggaagaaacacaagaaatgctggaagaagctaagaaaaacttacaggaggagatcgacgctctcgagagcagagtggagtccatacagcgggtgctggccgatttgaaagtacaactgtatgcaaagtttggctcaaatattaacctcgaggcagacgagtcttag

SEQ ID NO: 130309 - DNA, 1462 bp, Artificial Sequence
  derived and/or modified sequence
acacccccgtgtttatgtcggtccacgggggttgcctgtccctttaattggcatgtaccaagtccttccaggtcacatttcctccctacgtcccagccgtttggactcactggccaaaagtccaagaggacggaatgtggagacagtgttgtatttttgcggggagttctaggccgaccgggagcgagagaacgctcgggggcgaagcgcgccattgcggccctccccgccgcctgcggtagtccagtcccaagatggcggccaccatgaagaaggcggctgcagaagatgtcaatgttactttcgaagatcaacaaaagataaacaaatttgcacggaatacaagtagaatcacagagctgaaggaagaaatagaagtaaaaaagaaacaactccaaaacctagaagatgcttgtgatgacatcatgcttgcagatgatgattgcttaatgataccttatcaaattggtgatgtcttcattagccattctcaagaagaaacgcaagaaatgttagaagaagcaaagaaaaatttgcaagaagaaattgacgccttagaatccagagtggaatcaattcagcgagtgttagcagatttgaaagttcagttgtatgcaaaattcgggagcaacataaaccttgaagctgatgaaagttaaacattttataatactttttttatttgtttaataaacttgaatattgtttaaaatgataattttccttcttcaaatgacatggaaagcaaaactttcttttttaaaaattttcatttatttaatggaaacttgcccattttcacatgtctgcttatttattttatatttttaaaagaagacagtattcacctatgtattttgcataacgattatatcaagtctaggggcttcatgtcatgttattaaaatcagttaagcaatcttttatgtttctatattatttagaatatttgttgttgcaattttcacataagaaaatttaacagttgtgtcatgttgtttctgtctgattttaattgctgtctaatgacggggaaagcacgatgaaaagatgtacaatcctgcatccttgcttatttcacaactaaagctttgtcatagacttcaaaatatatatgtatatattttatttaaatatatgttacatattatatttaaacatacatatttaacattttttacatatctatcaatatcagagatttgggtaaaagaatgggtaatgtttaaacatgtggaggcatgtggagctttatacaaacagggcagaaccacagaagaacgttttagaaaccaagagatgtgcagaaagaaatgtttagtgttttttcgttttaaattttagattttattttagtgctttgtaattaattggggtttatattgataaagatgtggaagttaaacagctatgtatgtaaaagtaaggcttatttcttaaataaaggatgcatttcttccca

SEQ ID NO: 130310 - DNA, 405 bp, Artificial Sequence
  derived and/or modified sequence
atggccgctaccatgaagaaggccgctgctgaagatgtgaacgttacgttcgaagaccagcaaaagatcaacaagttcgcaagaaatacctcccgtatcaccgaactgaaggaagagatagaagtcaagaagaaacaactgcagaacctcgaggacgcatgcgacgacataatgctggccgacgacgactgtctgatgatcccctaccagataggagacgtgttcataagtcactctcaagaggagacacaagagatgctggaggaagccaagaaaaacctccaggaggaaatcgacgccttggagtcccgagttgaatcaattcaaagagtgttagctgatctgaaagttcagctttatgcaaagttcggctccaatattaacctagaagccgacgaaagctag

SEQ ID NO: 130311 - DNA, 405 bp, Artificial Sequence
  derived and/or modified sequence
atggccgccaccatgaagaaggccgccgccgaggacgtgaacgtgaccttcgaggaccagcagaagatcaacaagttcgccagaaacaccagcagaatcaccgagctgaaggaggagatcgaggtgaagaagaagcagctgcagaacctggaggacgcctgcgacgacatcatgctggccgacgacgactgcctgatgatcccctaccagatcggcgacgtgttcatcagccacagccaggaggagacccaggagatgctggaggaggccaagaagaacctgcaggaggagatcgacgccctggagagcagagtggagagcatccagagagtgctggccgacctgaaggtgcagctgtacgccaagttcggcagcaacatcaacctggaggccgacgagagctag

SEQ ID NO: 130312 - protein, 154 aa, Artificial Sequence
  derived and/or modified sequence
MAQSINITELNLPQLEMLKNQLDQEVEFLSTSIAQLKVVQTKYVEAKDCLNVLNKSNEGKELLVPLTSSMYVPGKLHDVEHVLIDVGTGYYVEKTAEDAKDFFKRKIDFLTKQMEKIQPALQEKHAMKQAVMEMMSQKIQQLTALGAAQATAKA

SEQ ID NO: 130313 - DNA, 743 bp, Artificial Sequence
  derived and/or modified sequence
gaggatcatagagctgtctggcgcagcgaggcctcccggcgccaccgagacgcgcagaggacggctagagcgttgctcgccgagagacttcctcttcgttaagtcggccttcccaacatggcgcagtctattaacatcacggagctgaatctgccgcagctagaaatgctcaagaaccagctggaccaggaagtggagttcttgtccacgtccattgctcagctcaaagtggtacagaccaagtatgtggaagccaaggactgtctgaacgtgctgaacaagagcaacgaggggaaagaattactcgtcccactgacgagttctatgtatgtccctgggaagctgcatgatgtggaacacgtgctcatcgatgtgggaactgggtactatgtagagaagacagctgaggatgccaaggacttcttcaagaggaagatagattttctaaccaagcagatggagaaaatccaaccagctcttcaggagaagcacgccatgaaacaggccgtcatggaaatgatgagtcagaagattcagcagctcacagccctgggggcagctcaggctactgctaaggcctgagagtttttgcagaaatggggcagagggacaccctttgggcgtggcttcctggtgatgggaagggtcttgtgttttaatgccaataaatgtgccagctgggcagaaaaaaaaaaaaaaaaaaaaaaaaaaaaaaaaaaaaaaaaaaaaaaaaaaaaaaaaaa

SEQ ID NO: 130314 - DNA, 465 bp, Artificial Sequence
  derived and/or modified sequence
atggcacagagtatcaatataactgagttgaatctacctcagctggaaatgttgaagaaccagttggatcaggaagtggagtttcttagcacttccattgcccagctcaaagtcgtgcagacaaaatacgttgaggccaaagattgcctgaacgttctcaacaagtccaacgagggaaaggagctcttggtgcctttgacatcttcaatgtacgttcccgggaaactgcacgacgtggaacacgtactcatcgacgtgggaaccggttactatgtcgagaagacggcggaggatgcgaaggatttttttaagcgaaaaattgacttcctgaccaagcaaatggaaaagatacagcccgcacttcaggagaaacacgctatgaagcaggccgtcatggaaatgatgtcccagaagattcagcagctgacagcgctgggcgctgcccaggctaccgctaaagcgtag

SEQ ID NO: 130315 - DNA, 465 bp, Artificial Sequence
  derived and/or modified sequence
atggcccagagcattaacatcaccgagcttaacctcccgcagctggagatgttgaagaaccagctggatcaggaggtcgagttcctctccacgagcattgcacaactgaaggtcgtgcagacgaaatacgttgaggccaaggactgtctcaatgtcctgaacaagagcaacgaaggaaaagaactgttggtgcctctgactagctccatgtacgtgcctgggaagctccacgacgtggagcacgtgctcattgacgttggtacaggctattatgtggagaaaacagctgaggatgcaaaggactttttcaagcgaaagatagatttcctaacgaagcagatggaaaagatccagcccgctctccaggagaagcacgccatgaagcaggccgtcatggagatgatgtcgcaaaaaatccagcaactcactgcactgggagcggcgcaagctactgcgaaggcctag

SEQ ID NO: 130316 - DNA, 465 bp, Artificial Sequence
  derived and/or modified sequence
atggcccagagcatcaacatcacagagctgaacctgccccagctggagatgctgaagaaccagctggaccaggaggtggagttcctgagcaccagcatcgcccagctgaaggtggtgcagaccaagtatgtggaggccaaggactgcctgaatgtgctgaacaagagcaatgaaggcaaggagctgctggtgcccctgaccagctccatgtatgtgcctgggaagctgcatgatgtggagcacgtgctgattgatgtgggcaccggctactacgtggagaagacagcagaagatgccaaggacttcttcaagaggaagattgacttcctgaccaagcagatggagaagatccagcctgccctgcaggagaagcacgccatgaagcaggccgtgatggagatgatgagccagaagatccagcagctgacagccctgggcgccgcccaggccacagccaaggcctag

SEQ ID NO: 130317 - DNA, 465 bp, Artificial Sequence
  derived and/or modified sequence
atggcccagagcatcaacatcaccgagctgaacctgccccagctggaaatgcttaagaatcagttagatcaggaagtggagttcctttctacctccatagcccaactgaaggttgtgcaaactaaatatgttgaagctaaggactgtttgaatgtcctcaacaagtctaatgaaggaaaggagctgctggttcccctgacttccagtatgtatgtgcctgggaagctgcacgacgtggagcacgtgctcatagacgtgggtaccggttactacgtcgagaaaacagccgaagacgccaaagattttttcaagagaaagatcgactttctgacaaagcagatggaaaaaatccagcccgcgttacaagagaaacatgcaatgaaacaagctgtgatggaaatgatgtctcagaagatccaacaacttactgccctcggcgctgcgcaggcaacagctaaggcctag

SEQ ID NO: 130318 - DNA, 465 bp, Artificial Sequence
  derived and/or modified sequence
atggcccagagcatcaacatcaccgagctgaacctgccccagctggagatgcttaaaaatcaattggaccaggaagtcgaattcctttccacctccatcgctcaactgaaggtggtgcaaacaaaatacgtcgaagctaaggactgcttgaacgtccttaataagtcaaatgagggtaaagagcttcttgtgcctttgacctcatccatgtacgtccctgggaagctccacgatgtcgagcatgtactgatcgacgtgggaactggttattacgtcgagaaaaccgcagaggacgcaaaggattttttcaaacgcaaaatcgactttctgaccaaacaaatggaaaagattcaacccgccctgcaggaaaagcacgcaatgaagcaagctgtaatggaaatgatgagtcagaaaattcagcagctgacagctcttggggccgcacaggccactgcaaaagcatag

SEQ ID NO: 130319 - DNA, 586 bp, Artificial Sequence
  derived and/or modified sequence
agtcggccttcccaacatggcgcagtctattaacatcacggagctgaatctgccgcagctagaaatgctcaagaaccagctggaccaggaagtggagttcttgtccacgtccattgctcagctcaaagtggtacagaccaagtatgtggaagccaaggactgtctgaacgtgctgaacaagagcaacgaggggaaagaattactcgtcccactgacgagttctatgtatgtccctgggaagctgcatgatgtggaacacgtgctcatcgatgtgggaactgggtactatgtagagaagacagctgaggatgccaaggacttcttcaagaggaagatagattttctaaccaagcagatggagaaaatccaaccagctcttcaggagaagcacgccatgaaacaggccgtcatggaaatgatgagtcagaagattcagcagctcacagccctgggggcagctcaggctactgctaaggcctgagagtttttgcagaaatggggcagagggacaccctttgggcgtggcttcctggtgatgggaagggtcttgtgttttaatgccaataaatgtgccagctgggcagaa

SEQ ID NO: 130320 - DNA, 847 bp, Artificial Sequence
  derived and/or modified sequence
atatcgtggttgtgtcgtgagaactttaagattttgcagttccttgtaggcaggagtcctgtttgctgctactttacaatactaggcttaagacattttatgaaatgaactcacacaacagtctctgagaggctcaagcccctccttcccttccgggacggaggatcatagagctgtctggcgcagcgaggcctcccggcgccaccgagacgcgcagaggacggctagagcgttgctcgccgagagacttcctcttcgttaagtcggccttcccaacatggcgcagtctattaacatcacggagctgaatctgccgcagctagaaatgctcaagaaccagctggaccaggaagtggagttcttgtccacgtccattgctcagctcaaagtggtacagaccaagtatgtggaagccaaggactgtctgaacgtgctgaacaagagcaacgaggggaaagaattactcgtcccactgacgagttctatgtatgtccctgggaagctgcatgatgtggaacacgtgctcatcgatgtgggaactgggtactatgtagagaagacagctgaggatgccaaggacttcttcaagaggaagatagattttctaaccaagcagatggagaaaatccaaccagctcttcaggagaagcacgccatgaaacaggccgtcatggaaatgatgagtcagaagattcagcagctcacagccctgggggcagctcaggctactgctaaggcctgagagtttttgcagaaatggggcagagggacaccctttgggcgtggcttcctggtgatgggaagggtcttgtgttttaatgccaataaatgtgccagctgggcagaa

SEQ ID NO: 130321 - DNA, 465 bp, Artificial Sequence
  derived and/or modified sequence
atggcacaaagcatcaatattacggagctgaacctgcctcagcttgaaatgctgaagaaccagcttgatcaggaggtggagttcctcagtacatctatcgcgcagctaaaagtcgtccagacgaagtacgttgaggcgaaggactgtctcaacgtcttgaataagtctaacgaaggaaaagagctgctggtgccacttacctcttcaatgtatgttcccggaaagctccacgatgtggagcacgttctgatcgatgtaggcaccggttattacgtggagaagacagccgaagatgcaaaggacttctttaaacgcaagatcgattttctcaccaagcagatggaaaagatccagcccgctttacaggagaagcacgccatgaagcaggcggttatggaaatgatgagccagaaaattcagcagttaacggccttgggtgcagcccaagccacagccaaggcctag

SEQ ID NO: 130322 - DNA, 465 bp, Artificial Sequence
  derived and/or modified sequence
atggcccagagcatcaatatcaccgagcttaatctaccacagttggaaatgctgaagaaccagttagatcaggaggtcgagtttctctccaccagtatcgcccagctgaaagtagtacaaacgaaatatgttgaggctaaagactgtctgaatgtgctgaacaagagcaatgagggcaaagagctgctggtgccgttgacttcgtccatgtacgttcccggaaagctgcacgatgtcgaacacgttctaattgatgtgggaactgggtattacgtggaaaaaaccgctgaggacgccaaggatttttttaaaagaaaaattgactttctgactaagcagatggagaaaatccaacccgctcttcaggagaagcacgccatgaaacaggcagtgatggaaatgatgtctcaaaaaattcaacagctcactgctctgggtgccgcacaggctacagccaaggcgtag

SEQ ID NO: 130323 - DNA, 465 bp, Artificial Sequence
  derived and/or modified sequence
atggcccagagcatcaacatcaccgagctgaacctgccccagctggagatgctgaagaaccagctggaccaggaggtggagttcctgagcaccagcatcgcccagctgaaggtggtgcagaccaagtacgtggaggccaaggactgcctgaacgtgctgaacaagagcaacgagggcaaggagctgctggtgcccctgaccagcagcatgtacgtgcccggcaagctgcacgacgtggagcacgtgctgatcgacgtgggcaccggctactacgtggagaagaccgccgaggacgccaaggacttcttcaagagaaagatcgacttcctgaccaagcagatggagaagatccagcccgccctgcaggagaagcacgccatgaagcaggccgtgatggagatgatgagccagaagatccagcagctgaccgccctgggcgccgcccaggccaccgccaaggcctag

SEQ ID NO: 130324 - protein, 471 aa, Artificial Sequence
  derived and/or modified sequence
MSPEMGELTQTRLQKIWIPHSSGSSRLQRRRGSSIPQFTNSPTMVIMVGLPARGKTYISTKLTRYLNWIGTPTKVFNLGQYRREAVSYKNYEFFLPDNMEALQIRKQCALAALKDVHNYLSHEEGHVAVFDATNTTRERRSLILQFAKEHGYKVFFIESICNDPGIIAENIRQVKLGSPDYIDCDREKVLEDFLKRIECYEVNYQPLDEELDSHLSYIKIFDVGTRYMVNRVQDHIQSRTVYYLMNIHVTPRSIYLCRHGESELNIRGRIGGDSGLSVRGKQYAYALANFIQSQGISSLKVWTSHMKRTIQTAEALGVPYEQWKALNEIDAGVCEEMTYEEIQEHYPEEFALRDQDKYRYRYPKGESYEDLVQRLEPVIMELERQENVLVICHQAVMRCLLAYFLDKSSDELPYLKCPLHTVLKLTPVAYGCKVESIYLNVEAVNTHREKPENVDITREPEEALDTVPAHY

SEQ ID NO: 130325 - DNA, 1416 bp, Artificial Sequence
  derived and/or modified sequence
atgtcacctgaaatgggagagctcacacagacacggctccagaagatatggattcctcatagctctggaagctcccggttacaacgcagaagaggctctagtattcctcaattcaccaacagccctaccatggttattatggtggggttgccagccaggggcaaaacctacatctccactaagctgaccagatacctcaactggattggtacacccaccaaggttttcaatttagggcagtatagacgcgaggccgtgagctacaagaactatgagttctttctaccggataacatggaagccttgcaaattagaaagcagtgtgctctggccgctttaaaggacgtacataattacctctctcacgaagaagggcatgtggctgtgtttgatgcaactaatactacgcgcgagagacgctccttgattcttcaattcgccaaggagcatggctataaggtcttcttcattgagtctatctgtaacgaccccggcatcatcgcagaaaacattagacaggtcaagttgggctcaccagactacatcgactgcgaccgcgagaaagttcttgaagattttctgaagcggatagagtgttacgaggtcaactaccagccactcgatgaggaacttgacagccacttatcatacattaaaattttcgacgtggggacacggtatatggttaatagagtgcaggatcatattcagagcaggacagtttactacttgatgaacatccacgttacccctagaagcatctatttatgcagacacggtgagagcgagctgaatatccgtgggcgaatcgggggtgatagcgggctgtcggtgagaggcaagcagtacgcctacgcccttgctaattttatccagtctcagggcatctcctctctgaaagtttggacaagccatatgaaacggactatccaaaccgcagaggctctcggcgtgccctacgagcagtggaaagcattaaatgagatagatgcaggagtgtgtgaggagatgacctacgaggagatacaggagcattatcctgaagaatttgccctacgtgaccaggataaatatcggtacagataccccaagggggaaagctatgaggatctggtgcagcggctggagcccgtgatcatggaattggagcgacaggagaatgttctcgtgatttgtcaccaagcggtgatgaggtgtctgttagcttacttcttagataagtcctccgacgaactgccatacctcaaatgtcctctgcatacagtattgaagctcaccccggtggcatacggttgtaaagtggaatctatctacctgaacgtcgaagccgtgaatactcaccgagagaagccagaaaacgtggacattacgcgggagcctgaagaagcactggataccgtgcccgcacattattag

SEQ ID NO: 130326 - DNA, 1416 bp, Artificial Sequence
  derived and/or modified sequence
atgagccctgagatgggagagctgacccagacccggctgcagaagatctggatcccccacagcagcggcagcagccggctgcagaggcggcggggcagcagcatcccccagttcaccaacagccccaccatggtgatcatggtgggcctgcctgcccggggcaagacctacatcagcaccaagctgacccgctacctgaactggattggcacccccaccaaggtgttcaacctgggccagtaccgccgggaggccgtgtcctacaagaactatgagttcttcctgcctgacaacatggaggccctgcagatcaggaagcagtgtgccctggccgccctgaaggatgtgcacaactacctgagccatgaggagggccacgtggccgtgtttgatgccaccaacaccacccgggagaggaggagcctcatcctgcagtttgccaaggagcacggctacaaggtgttcttcatcgagagcatctgcaatgaccccggcatcatcgccgagaacatccggcaggtgaagctgggcagcccagactacatcgactgtgaccgggagaaggtgctggaggacttcctgaagagaattgagtgctatgaggtgaactaccagcccctggatgaggagctggacagccacctgagctacatcaagatctttgatgtgggcacccgctacatggtgaacagagtgcaggaccacatccagagcaggacagtgtactacctgatgaacatccacgtgacccccaggagcatctacctgtgcagacatggagagagcgagctgaacatccggggccgcatcggcggggacagcggcctgtctgtgcggggcaagcagtatgcctatgccctggccaacttcatccagagccagggcatcagcagcctgaaggtgtggaccagccacatgaagaggaccatccagacagctgaggccctgggcgtgccctatgagcagtggaaggccctgaatgaaattgatgctggggtgtgtgaggagatgacctatgaggagatccaggagcactacccagaggagtttgccctgcgggaccaggacaagtaccgctaccgctaccccaagggggagagctatgaggacctggtgcagaggctggagcctgtgatcatggagctggagcggcaggagaatgtgctggtgatctgccaccaggccgtgatgcgctgcctgctggcctacttcctggacaagagcagtgatgagctgccctacctgaagtgccccctgcacacagtgctgaagctgacccctgtggcctacggctgcaaggtggagagcatctacctgaatgtggaggccgtgaacacccaccgggagaagccagaaaatgtggacatcacccgggagcctgaggaggccctggacacagtgcctgcccactactag

SEQ ID NO: 130327 - DNA, 1416 bp, Artificial Sequence
  derived and/or modified sequence
atgagccccgagatgggcgagctgacccagacccggctgcagaagatctggatcccccactcaagcggctctagccggctccagagaaggcgcggcagtagcattccacagtttactaacagccccaccatggttatcatggtcggtcttccggcgcgcgggaagacctacatatctaccaagctcacgagatatctcaattggatcggcactcccacaaaggtgtttaaccttggccagtatcggagggaggccgtatcctacaaaaactacgagttttttctccccgataacatggaggctctgcagattagaaagcaatgtgcattggctgctcttaaggatgtgcataactacctgtctcacgaagaaggccacgtagcagtcttcgatgctacaaatacgaccagagagaggaggtccctaatactgcaattcgctaaggagcacggatataaagtgttctttatcgagtctatatgtaatgatccaggtatcattgctgagaacattagacaagtcaaattgggcagtcctgactacatcgactgtgaccgggaaaaagtcttagaggacttcttgaagcgcattgagtgctacgaggtgaactaccagccactagatgaggagctggactcacatctttcttatatcaagatcttcgatgtgggtacccggtatatggtcaaccgggtgcaggatcatattcagagccgaaccgtttattacctgatgaatattcacgttacgccccgctccatctacttatgcagacatggagagtcagagctcaatatccgtgggaggataggtggcgactccggcttaagcgttaggggcaagcaatacgcttacgcactcgctaattttattcagagccagggcatcagcagtctgaaagtctggacgtcccacatgaagcgtacgatacagaccgcagaggcactgggcgtgccctacgagcagtggaaggctttaaacgagatagacgcgggggtgtgcgaggagatgacatatgaggagattcaggagcactaccctgaggagttcgctctccgagatcaggataagtaccgctataggtaccccaaaggggagtcatatgaggatctcgttcagaggttggagcctgttattatggagcttgagagacaggaaaatgtgctggtcatttgccaccaggctgtgatgcgttgtcttctcgcatatttcctggacaagtcaagcgacgaactcccgtatctgaagtgtccacttcatacggttttgaaacttacgccagttgcttatggctgcaaagttgagagtatttacttgaatgtggaagctgtgaatactcatcgagagaagcctgagaacgtcgacatcaccagagagcccgaggaggccctggacaccgtccccgcccactattag

SEQ ID NO: 130328 - DNA, 1416 bp, Artificial Sequence
  derived and/or modified sequence
atgtctccggagatgggagaactgactcagacccgtctacagaaaatctggatcccccacagtagcggcagctcacgcttacaaaggaggcgcggttccagtatcccgcagtttacaaactctccaactatggtaattatggtgggtctcccagccagaggtaaaacttatatttccacaaaacttactcggtatttgaactggattggaacacctacaaaagtttttaacctgggtcaatacaggagggaggccgtcagctacaagaattatgaattctttttgccagacaatatggaagccctgcaaataagaaagcagtgcgcgctggccgcattgaaggacgtgcacaattatttgagccatgaggaggggcatgtcgccgtattcgacgcaacaaacacgacgcgtgaaaggcgcagcttgattctgcaatttgccaaggaacatggctataaagtctttttcatcgagagcatttgcaatgaccctggcatcatcgctgagaatatccggcaggtgaaactgggatccccagattatattgactgtgaccgagaaaaagttctggaggatttcctgaaaagaattgaatgttacgaggtgaattaccagccactggacgaggagctcgatagtcacctctcctatatcaagatcttcgacgtaggtaccaggtacatggttaatcgcgtgcaagatcatatccagtccagaaccgtgtattaccttatgaacattcacgtgaccccccgttccatctacttgtgtaggcatggtgagtcagaactgaatatccgaggtagaatcggcggagatagcggtctgtcggtacgcggaaagcagtacgcctatgccctggcaaatttcattcagagtcaggggatatcgtcgctgaaagtatggacgtcccacatgaaaaggactatccagaccgcagaagcattaggcgttccctatgaacagtggaaggccctgaatgagattgacgccggagtttgtgaggagatgacatacgaggagattcaagaacattatcccgaagagttcgctctgcgcgaccaggataagtaccgctaccgttatccgaagggcgaatcctatgaagacctggtgcagcgtctggagccagtcatcatggagcttgaacgccaagagaatgtcctggtaatctgccatcaggctgtgatgaggtgcctgctcgcatactttctggataagtctagcgatgaactgccctatctgaagtgtcctttgcacacggtactcaagctgactcctgtcgcatatggctgcaaagtagaatcaatttatctgaatgtggaggcagtgaatactcacagagagaagcctgagaatgtagacatcacaagagaaccggaagaagctttagataccgtgcccgcacattactag

SEQ ID NO: 130329 - DNA, 1929 bp, Artificial Sequence
  derived and/or modified sequence
gacagctagtaagataggaagtgaggccaggtaccttgtgggcagtgatgtcattcggtgcgactcctaagatgtctccagagatgggagagctcacccaaaccaggttgcagaagatctggattccacacagcagcggcagcagcaggctgcaacggagaaggggctcatccataccccagtttaccaattcccccacaatggtgatcatggtgggtttaccagctcgaggcaagacctatatctccacaaagctcacacgatatctcaactggataggaacaccaactaaagtgtttaatttaggccagtatcgacgagaggcagtgagctacaagaactatgaattctttcttccagacaacatggaagccctgcaaatcaggaagcagtgcgccctggcagccctgaaggatgttcacaactatctcagccatgaggaaggtcatgttgcggtttttgatgccaccaacactaccagagaacgacggtcactgatcctgcagtttgcaaaagaacatggttacaaggtgtttttcattgagtccatttgtaatgaccctggcataattgcagaaaacatcaggcaagtgaaacttggcagccctgattatatagactgtgaccgggaaaaggttctggaagactttctaaagagaattgagtgctatgaggtcaactaccaacccttggatgaggaactggacagccacctgtcctacatcaagatcttcgacgtgggcacacgctacatggtgaaccgagtgcaggatcacatccagagccgcacagtctactacctcatgaatatccatgtcacacctcgctccatctacctttgccgacatggcgagagtgaactcaacatcagaggccgcatcggaggtgactctggcctctcagttcgcggcaagcagtatgcctatgccctggccaacttcattcagtcccagggcatcagctccctgaaggtgtggaccagtcacatgaagaggaccatccagacagctgaggccctgggtgtcccctatgagcagtggaaggccctgaatgagattgatgcgggtgtctgtgaggagatgacctatgaagaaatccaggaacattaccctgaagaatttgcactgcgagaccaagataaatatcgctaccgctatcccaagggagagtcctatgaggatctggttcagcgtctggagccagtgataatggagctagaacgacaggagaatgtactggtgatctgccaccaggctgtcatgcggtgcctcctggcctatttcctggataaaagttcagatgagcttccatatctcaagtgccctctgcacacagtgctcaaactcactcctgtggcttatggctgcaaagtggaatccatctacctgaatgtggaggccgtgaacacacaccgggagaagcctgagaatgtggacatcacccgggaacctgaggaagccctggatactgtcccagcccactactgagccctttccaagaagtcaaactgcctgtgtcctcatcgccttccacctttaggaaatgctatctttgctcttctcctactctgccttggcctcactgaggcaccccacttccagtgaagaagtcctccgcaactcccaaacaagcctcgcttgctggccgcaaccaaggagctatctagctctggaggaaactttctttcttaattcctattctctgacgaataaagacttactgcctacaagaggagaggaggaggtcatggcgaggcttttccagttgttctcaaggtactgaccctaatcctgacccagctctgctgctgtgagggcatggaatgggtgaggatttcctggagggaaaagttctacagtagcacctccaaagatgggggagaagataggtgcctgtgagttcctgtgggccttgttccagcaaggtggc

SEQ ID NO: 130330 - DNA, 1416 bp, Artificial Sequence
  derived and/or modified sequence
atgagccccgagatgggcgagctgacccagaccagactgcagaagatctggatcccccacagcagcggcagcagcagactgcagagaagaagaggcagcagcatcccccagttcaccaacagccccaccatggtgatcatggtgggcctgcccgccagaggcaagacctacatcagcaccaagctgaccagatacctgaactggatcggcacccccaccaaggtgttcaacctgggccagtacagaagagaggccgtgagctacaagaactacgagttcttcctgcccgacaacatggaggccctgcagatcagaaagcagtgcgccctggccgccctgaaggacgtgcacaactacctgagccacgaggagggccacgtggccgtgttcgacgccaccaacaccaccagagagagaagaagcctgatcctgcagttcgccaaggagcacggctacaaggtgttcttcatcgagagcatctgcaacgaccccggcatcatcgccgagaacatcagacaggtgaagctgggcagccccgactacatcgactgcgacagagagaaggtgctggaggacttcctgaagagaatcgagtgctacgaggtgaactaccagcccctggacgaggagctggacagccacctgagctacatcaagatcttcgacgtgggcaccagatacatggtgaacagagtgcaggaccacatccagagcagaaccgtgtactacctgatgaacatccacgtgacccccagaagcatctacctgtgcagacacggcgagagcgagctgaacatcagaggcagaatcggcggcgacagcggcctgagcgtgagaggcaagcagtacgcctacgccctggccaacttcatccagagccagggcatcagcagcctgaaggtgtggaccagccacatgaagagaaccatccagaccgccgaggccctgggcgtgccctacgagcagtggaaggccctgaacgagatcgacgccggcgtgtgcgaggagatgacctacgaggagatccaggagcactaccccgaggagttcgccctgagagaccaggacaagtacagatacagataccccaagggcgagagctacgaggacctggtgcagagactggagcccgtgatcatggagctggagagacaggagaacgtgctggtgatctgccaccaggccgtgatgagatgcctgctggcctacttcctggacaagagcagcgacgagctgccctacctgaagtgccccctgcacaccgtgctgaagctgacccccgtggcctacggctgcaaggtggagagcatctacctgaacgtggaggccgtgaacacccacagagagaagcccgagaacgtggacatcaccagagagcccgaggaggccctggacaccgtgcccgcccactactag

SEQ ID NO: 130331 - protein, 780 aa, Artificial Sequence
  derived and/or modified sequence
MAAVDLEKLRASGAGKAIGVLTSGGDAQGMNAAVRAVTRMGIYVGAKVFLIYEGYEGLVEGGENIKQANWLSVSNIIQLGGTIIGSARCKAFTTREGRRAAAYNLVQHGITNLCVIGGDGSLTGANIFRSEWGSLLEELVAEGKISETTARTYSHLNIAGLVGSIDNDFCGTDMTIGTDSALHRIMEVIDAITTTAQSHQRTFVLEVMGRHCGYLALVSALASGADWLFIPEAPPEDGWENFMCERLGETRSRGSRLNIIIIAEGAIDRNGKPISSSYVKDLVVQRLGFDTRVTVLGHVQRGGTPSAFDRILSSKMGMEAVMALLEATPDTPACVVTLSGNQSVRLPLMECVQMTKEVQKAMDDKRFDEATQLRGGSFENNWNIYKLLAHQKPPKEKSNFSLAILNVGAPAAGMNAAVRSAVRTGISHGHTVYVVHDGFEGLAKGQVQEVGWHDVAGWLGRGGSMLGTKRTLPKGQLESIVENIRIYGIHALLVVGGFEAYEGVLQLVEARGRYEELCIVMCVIPATISNNVPGTDFSLGSDTAVNAAMESCDRIKQSASGTKRRVFIVETMGGYCGYLATVTGIAVGADAAYVFEDPFNIHDLKVNVEHMTEKMKTDIQRGLVLRNEKCHDYYTTEFLYNLYSSEGKGVFDCRTNVLGHLQQGGAPTPFDRNYGTKLGVKAMLWLSEKLREVYRKGRVFANAPDSACVIGLKKKAVAFSPVTELKKDTDFEHRMPREQWWLSLRLMLKMLAQYRISMAAYVSGELEHVTRRTLSMDKGF

SEQ ID NO: 130332 - protein, 573 aa, Artificial Sequence
  derived and/or modified sequence
MGRHCGYLALVSALASGADWLFIPEAPPEDGWENFMCERLGETRSRGSRLNIIIIAEGAIDRNGKPISSSYVKDLVVQRLGFDTRVTVLGHVQRGGTPSAFDRILSSKMGMEAVMALLEATPDTPACVVTLSGNQSVRLPLMECVQMTKEVQKAMDDKRFDEATQLRGGSFENNWNIYKLLAHQKPPKEKSNFSLAILNVGAPAAGMNAAVRSAVRTGISHGHTVYVVHDGFEGLAKGQVQEVGWHDVAGWLGRGGSMLGTKRTLPKGQLESIVENIRIYGIHALLVVGGFEAYEGVLQLVEARGRYEELCIVMCVIPATISNNVPGTDFSLGSDTAVNAAMESCDRIKQSASGTKRRVFIVETMGGYCGYLATVTGIAVGADAAYVFEDPFNIHDLKVNVEHMTEKMKTDIQRGLVLRNEKCHDYYTTEFLYNLYSSEGKGVFDCRTNVLGHLQQGGAPTPFDRNYGTKLGVKAMLWLSEKLREVYRKGRVFANAPDSACVIGLKKKAVAFSPVTELKKDTDFEHRMPREQWWLSLRLMLKMLAQYRISMAAYVSGELEHVTRRTLSMDKGF

SEQ ID NO: 130333 - DNA, 2343 bp, Artificial Sequence
  derived and/or modified sequence
atggcagcagtggacctggagaaactgcgagccagcggggcaggaaaggcaattggagttctaacctccggaggagacgctcagggtatgaacgccgcggtgcgggctgtgacacgtatgggcatttatgttggcgcgaaggtgttcttgatctacgagggttatgagggactggtagaaggcggcgagaatataaaacaggccaactggctgtcggtgagcaacatcatacagctggggggaaccatcatcggttctgctaggtgtaaggcgttcaccacgagagagggacggagggctgcagcttacaatcttgttcagcacggcattacaaacctatgcgtaataggcggagatggatcactcaccggtgctaatatttttaggagcgaatggggtagcctgctggaggaattggttgctgaaggaaaaatttcagagacaaccgcccgtacctactcccacctgaacatcgctgggttggtgggctccattgacaatgacttttgcggtaccgacatgaccattggtaccgatagcgccttacaccggatcatggaagtgatagacgcaatcacaacgacagcccagagtcaccagcggacctttgtgctggaagtgatgggccgccactgtggatacctggccctggtgtctgcactggcaagcggcgctgattggcttttcatccccgaggcacctccagaagacggatgggagaacttcatgtgtgaacgattaggggaaactagaagcaggggcagcaggctgaatatcatcatcatagccgagggggccatcgatagaaacgggaagccgattagttcctcatacgtaaaggatcttgtggtgcagcgcctcggcttcgatactagagtgaccgtcctgggacatgttcaacggggtggcacaccctcagcatttgatcgcatcttatcaagcaaaatgggcatggaggccgtcatggcgctgctcgaggccacaccagataccccagcatgtgtagtgactctgagcggcaatcaatccgttcgcttgcctctcatggagtgcgtgcaaatgaccaaagaagtccagaaagccatggacgataaaagatttgatgaggccacccaactgcgaggtggttctttcgagaataactggaacatttataagctgctcgctcatcagaagcctcctaaagaaaaatcaaacttcagcctggccatcctgaatgtgggcgcccccgcagcaggaatgaatgctgcagttcgaagtgctgtccgcactggtataagccacggccatacggtctatgtcgtgcacgatggattcgaaggcctggccaagggccaggttcaagaagtcgggtggcacgatgtagctggttggctggggcgaggcgggtccatgctgggcactaagaggacattacctaaagggcagctggagagtattgtggaaaacattagaatttatggtatccacgcactacttgtggtgggaggattcgaggcctatgagggagtgctccagctcgtcgaggcccgtgggcggtatgaagaactgtgcatagtcatgtgtgtaatccccgccaccatatcaaataacgtgcctggcaccgatttctcactgggcagcgatactgctgtgaacgctgctatggagtcatgtgatagaattaaacaatccgccagtggcactaagagacgagtcttcatcgtggagacaatgggaggctactgtgggtaccttgctaccgtaacaggcatcgccgtgggcgcggacgcggcgtacgtttttgaggatccctttaatatacacgacttgaaggtgaatgttgaacacatgaccgaaaagatgaaaacagacattcagagggggctggtcctgaggaatgagaagtgccacgactactacactaccgagtttctctacaatctttactcctcagagggtaagggcgttttcgactgcaggacgaatgtgctgggacacttgcagcagggaggcgccccaacccccttcgatagaaactatggaacaaagctgggcgtgaaagcgatgctgtggctgtctgagaaactgcgagaagtgtatagaaagggccgagtttttgccaacgcacccgattctgcgtgtgtcatcgggctgaaaaaaaaggctgtggcattttcccctgttaccgaactaaagaaagacacagattttgaacaccgaatgccaagggaacaatggtggctgtcattacgcttaatgttaaaaatgcttgcgcaataccgtatttctatggccgcctacgtgtcaggggagctggaacacgttactaggcggacgctgagcatggacaagggcttctag

SEQ ID NO: 130334 - DNA, 2343 bp, Artificial Sequence
  derived and/or modified sequence
atggctgctgtggacctggagaagctgcgggccagcggggccggcaaggccatcggcgtgctgaccagcggaggagatgcccagggcatgaatgctgctgtgcgggctgtgaccaggatgggcatctacgtgggcgccaaggtgttcctgatctatgagggctatgagggcctggtggagggcggggagaacatcaagcaggccaactggctgtctgtgagcaacatcatccagctgggcggcaccatcatcggcagcgcccgctgcaaggccttcaccacccgggagggccggcgggctgctgcctacaacctggtgcagcacggcatcaccaacctgtgtgtgattggaggagatggcagcctgactggagccaacatcttccgctctgagtggggcagcctgctggaggagctggtggccgagggcaagatcagcgagaccacagcccggacctacagccacctgaacattgctggcctggtgggcagcattgacaatgacttctgtggcacagacatgaccatcggcacagacagcgccctgcaccgcatcatggaggtgattgatgccatcaccaccacagcccagagccaccagaggacctttgtgctggaggtgatgggccgccactgcggctacctggccctggtgtctgccctggccagcggggctgactggctgttcatccctgaggcccccccagaagatggctgggagaacttcatgtgtgagcggctgggggagaccaggagccggggcagccggctgaacatcatcatcatcgccgagggcgccatcgacagaaatggcaagcccatcagcagcagctatgtgaaggacctggtggtgcagaggctgggctttgacaccagggtgacagtgctgggccacgtgcagaggggcggcacccccagcgcctttgaccgcatcctgagcagcaagatgggcatggaggccgtgatggccctgctggaggccaccccagacaccccagcctgtgtggtgaccctgagcggcaaccagagcgtgcggctgcccctgatggagtgtgtgcagatgaccaaggaggtgcagaaggccatggatgacaagagatttgatgaggccacccagctgcggggcggcagctttgagaacaactggaacatctacaagctgctggcccaccagaagccacccaaggagaagagcaacttcagcctggccatcctgaatgtgggcgccccagctgctggcatgaatgctgctgtgcgctctgctgtgaggacaggcatcagccacggccacacagtgtatgtggtgcatgatggctttgagggcctggccaagggccaggtgcaggaggtgggctggcatgatgtggccggctggctgggccggggcggctccatgctgggcaccaagaggaccctgcccaagggccagctggagagcatcgtggagaacatccgcatctacggcatccacgccctgctggtggtgggcggctttgaggcctatgaaggagtgctgcagctggtggaggcccggggccgctatgaggagctgtgcatcgtgatgtgtgtgatcccagccaccatcagcaacaacgtgcctggaacagacttcagcctgggcagtgacacagctgtgaatgctgccatggagagctgtgaccgcatcaagcagagcgccagcggcaccaagagaagagtcttcatcgtggagaccatgggcggctactgcggctacctggccaccgtgactggaattgctgtgggcgcagatgctgcctacgtgtttgaggaccccttcaacatccatgacctgaaggtgaatgtggagcacatgacagagaagatgaagacagacatccagaggggcctggtgctgagaaatgaaaaatgtcatgactactacaccacagagttcctgtacaacctgtacagcagcgagggcaagggcgtgtttgactgcaggaccaacgtgctgggccacctgcagcagggcggggcccccaccccatttgacaggaactacggcaccaagctgggcgtgaaggccatgctgtggctgtctgagaagctgcgggaggtgtacaggaagggccgggtgtttgccaatgccccagacagcgcctgcgtcatcggcctgaagaagaaggctgtggccttcagccctgtgacagagctgaagaaggacacagactttgagcacaggatgccccgggagcagtggtggctgagcctgcggctgatgctgaagatgctggcccagtaccgcatctccatggccgcctacgtgtctggagagctggagcacgtgaccaggaggaccctgtccatggacaagggcttctag

SEQ ID NO: 130335 - DNA, 2343 bp, Artificial Sequence
  derived and/or modified sequence
atggccgccgtggacctggagaagctgcgggccagcggcgccggcaaagcaattggcgtgcttacaagtggcggcgacgcccagggcatgaacgctgccgtgagggccgtcacccgcatgggcatttatgttggagccaaggtgtttctgatctacgaaggatacgagggcctagtcgaaggcggggagaacattaagcaggccaattggttgtctgtctccaatattatccagttgggcggaactattatcggcagtgccagatgtaaggcttttaccacccgagagggcagaagggcagctgcctacaatctagtgcaacacggcatcacgaacctctgtgttatcggcggggatggtagcttgaccggtgcaaacatctttcggtcagaatggggatcgttgttagaggagcttgtggctgagggaaaaatctcagagaccacagctagaacctactctcatctgaacattgctggactggttggttccattgacaatgacttctgcggcacggacatgaccattggcacagacagcgcccttcataggattatggaggtgatagatgccatcacaacaacggctcagagccatcagagaacttttgtcctggaggtcatgggaaggcattgtggatacttggcactcgtgtctgccctggccagcggtgctgactggctgttcattcccgaagcccccccggaggatgggtgggaaaactttatgtgcgagaggctaggggaaaccaggtccaggggctccaggcttaatattataattattgctgagggggcaattgatagaaacggcaagcccatcagcagcagctacgtcaaggacctggttgtgcagagactgggcttcgatactcgcgtgacggtcctcggacatgtgcagcgtgggggcacaccgtcagcctttgacaggattctgtcctccaaaatgggtatggaggccgtgatggctctcttagaggccacaccggacacaccagcatgcgtggtgacactcagcgggaatcagtccgtgcggctgcccttgatggaatgcgtgcaaatgacgaaggaagtacagaaagcgatggatgacaaacgattcgacgaggctacacaactgcgcggtggctcctttgagaacaactggaatatttacaaactgttggctcaccagaagcccccaaaagagaagtccaatttcagtctggccattctgaacgtgggagcccccgcggcaggaatgaacgcagccgtgaggagtgcagttaggacaggcatttcccatggtcacacagtttatgtagtgcatgatggtttcgagggcctagcaaaggggcaggtgcaggaagtgggatggcatgacgttgctggctggctgggacgcggtggatcaatgctgggaaccaagcggacgctgcccaagggccagctggagtccatcgttgagaatattcgtatctatgggattcatgcattacttgtggtgggagggttcgaggcttacgaaggggttttgcagctcgtagaggcccgcggcaggtacgaggaattatgcattgtcatgtgcgtcatacctgccacaatttcaaataatgttcctggtactgatttttcactggggtccgacacagccgtgaacgcagccatggagagttgcgatagaataaaacagtccgcctccggcaccaagcggagggtgtttattgtggagacgatgggcggttactgtggctacctagctaccgtgaccggcatcgctgtcggagcggatgccgcttatgtgtttgaggaccccttcaacattcacgacctcaaggtcaacgtggagcacatgacggagaagatgaagaccgacattcagcgggggctagtcctgaggaacgagaagtgtcacgactattacaccacagaattcctgtacaacctgtattcctcggaagggaagggcgtgttcgattgccgcactaatgtgttaggccacctgcagcaggggggtgcccccaccccttttgacagaaactatggcacaaaacttggggttaaagcgatgctctggctgtctgagaagctgcgggaggtgtacagaaaaggcagagtctttgcaaacgctcccgactctgcatgcgtcattggtctgaagaagaaggcggttgcattctcaccagtgacagagcttaagaaggacactgacttcgagcaccggatgccccgggagcagtggtggctgtctctccggctgatgctcaaaatgctagctcagtatcgcatttcaatggcagcatacgtctctggggagcttgaacacgtgactcgtcgtaccctgagtatggataagggcttctag

SEQ ID NO: 130336 - DNA, 2912 bp, Artificial Sequence
  derived and/or modified sequence
gcgacgcggcgcaggcggcgggagtgcgagctgggcccgtgtttcggccgccgccatggccgcggtggacctggagaagctgcgggcgtcgggcgcgggcaaggccatcggcgtcctgaccagcggcggcgacgcgcaaggcatgaacgctgctgtccgggctgtgacgcgcatgggcatttatgtgggtgccaaagtcttcctcatctacgagggctatgagggcctcgtggagggaggtgagaacatcaagcaggccaactggctgagcgtctccaacatcatccagctgggcggcactatcattggcagcgctcgctgcaaggcctttaccaccagggaggggcgccgggcagcggcctacaacctggtccagcacggcatcaccaacctgtgcgtcatcggcggggatggcagcctcacaggtgccaacatcttccgcagcgagtggggcagcctgctggaggagctggtggcggaaggtaagatctcagagactacagcccggacctactcgcacctgaacatcgcgggcctagtgggctccatcgataacgacttctgcggcaccgacatgaccatcggcacggactcggccctccaccgcatcatggaggtcatcgatgccatcaccaccactgcccagagccaccagaggaccttcgtgctggaagtgatgggccggcactgcgggtacctggcgctggtatctgcactggcctcaggggccgactggctgttcatccccgaggctccacccgaggacggctgggagaacttcatgtgtgagaggctgggtgagactcggagccgtgggtcccgactgaacatcatcatcatcgctgagggtgccattgaccgcaacgggaagcccatctcgtccagctacgtgaaggacctggtggttcagaggctgggcttcgacacccgtgtaactgtgctgggccacgtgcagcggggagggacgccctctgccttcgaccggatcctgagcagcaagatgggcatggaggcggtgatggcgctgctggaagccacgcctgacacgccggcctgcgtggtcaccctctcggggaaccagtcagtgcggctgcccctcatggagtgcgtgcagatgaccaaggaagtgcagaaagccatggatgacaagaggtttgacgaggccacccagctccgtggtgggagcttcgagaacaactggaacatttacaagctcctcgcccaccagaagccccccaaggagaagtctaacttctccctggccatcctgaatgtgggggccccggcggctggcatgaatgcggccgtgcgctcggcggtgcggaccggcatctcccatggacacacagtatacgtggtgcacgatggcttcgaaggcctagccaagggtcaggtgcaagaagtaggctggcacgacgtggccggctggttggggcgtggtggctccatgctggggaccaagaggaccctgcccaagggccagctggagtccattgtggagaacatccgcatctatggtattcacgccctgctggtggtcggtgggtttgaggcctatgaaggggtgctgcagctggtggaggctcgcgggcgctacgaggagctctgcatcgtcatgtgtgtcatcccagccaccatcagcaacaacgtccctggcaccgacttcagcctgggctccgacactgctgtaaatgccgccatggagagctgtgaccgcatcaaacagtctgcctcggggaccaagcgccgtgtgttcatcgtggagaccatggggggttactgtggctacctggccaccgtgactggcattgctgtgggggccgacgccgcctacgtcttcgaggaccctttcaacatccacgacttaaaggtcaacgtggagcacatgacggagaagatgaagacagacattcagaggggcctggtgctgcggaacgagaagtgccatgactactacaccacggagttcctgtacaacctgtactcatcagagggcaagggcgtcttcgactgcaggaccaatgtcctgggccacctgcagcagggtggcgctccaaccccctttgaccggaactatgggaccaagctgggggtgaaggccatgctgtggttgtcggagaagctgcgcgaggtttaccgcaagggacgggtgttcgccaatgccccagactcggcctgcgtgatcggcctgaagaagaaggcggtggccttcagccccgtcactgagctcaagaaagacactgatttcgagcaccgcatgccacgggagcagtggtggctgagcctgcggctcatgctgaagatgctggcacaataccgcatcagtatggccgcctacgtgtcaggggagctggagcacgtgacccgccgcaccctgagcatggacaagggcttctgaggccagccatgcccacgcccctccccagcccccacccatgccagcgcagcgccagggctcagatggggcctgggctgttgtgtctggagcctgcaggcaggtgggggctgcgtccctgctcagcccatcccctgcctctatccctggccacctgccaggcctccctcgggctggtgtcttgagaccagcctgccaggccctccagcaggaggacagagtgccctggggcatccaccttcctgcccaggggacgtggcgctgtcggtgtttggaggctgctgccccctggctttggcgccccatgggccctcagcgtctccccatgctgggctcactacatgggccagcccttgctctacctggccggtaggctgctggcgcctaggttgtgttgagagggggatgcccctggccctgcctcactgtgacctgctcctgcccacgtgcagcacctgtcaccttttctagaaataaaatcaccctgactgtggggtgcatcggtctccggagagca

SEQ ID NO: 130337 - DNA, 2815 bp, Artificial Sequence
  derived and/or modified sequence
gtttcggccgccgccatggccgcggtggacctggagaagctgcgggcgtcgggcgcgggcaaggccatcggcgtcctgaccagcggcggcgacgcgcaaggcatgaacgctgctgtccgggctgtgacgcgcatgggcatttatgtgggtgccaaagtcttcctcatctacgagggctatgagggcctcgtggagggaggtgagaacatcaagcaggccaactggctgagcgtctccaacatcatccagctgggcggcactatcattggcagcgctcgctgcaaggcctttaccaccaacctgtgcgtcatcggcggggatggcagcctcacaggtgccaacatcttccgcagcgagtggggcagcctgctggaggagctggtggcggaaggtaagatctcagagactacagcccggacctactcgcacctgaacatcgcgggcctagtgggctccatcgataacgacttctgcggcaccgacatgaccatcggcacggactcggccctccaccgcatcatggaggtcatcgatgccatcaccaccactgcccagagccaccagaggaccttcgtgctggaagtgatgggccggcactgcgggtacctggcgctggtatctgcactggcctcaggggccgactggctgttcatccccgaggctccacccgaggacggctgggagaacttcatgtgtgagaggctgggtgagactcggagccgtgggtcccgactgaacatcatcatcatcgctgagggtgccattgaccgcaacgggaagcccatctcgtccagctacgtgaaggacctggtggttcagaggctgggcttcgacacccgtgtaactgtgctgggccacgtgcagcggggagggacgccctctgccttcgaccggatcctgagcagcaagatgggcatggaggcggtgatggcgctgctggaagccacgcctgacacgccggcctgcgtggtcaccctctcggggaaccagtcagtgcggctgcccctcatggagtgcgtgcagatgaccaaggaagtgcagaaagccatggatgacaagaggtttgacgaggccacccagctccgtggtgggagcttcgagaacaactggaacatttacaagctcctcgcccaccagaagccccccaaggagaagtctaacttctccctggccatcctgaatgtgggggccccggcggctggcatgaatgcggccgtgcgctcggcggtgcggaccggcatctcccatggacacacagtatacgtggtgcacgatggcttcgaaggcctagccaagggtcaggtgcaagaagtaggctggcacgacgtggccggctggttggggcgtggtggctccatgctggggaccaagaggaccctgcccaagggccagctggagtccattgtggagaacatccgcatctatggtattcacgccctgctggtggtcggtgggtttgaggcctatgaaggggtgctgcagctggtggaggctcgcgggcgctacgaggagctctgcatcgtcatgtgtgtcatcccagccaccatcagcaacaacgtccctggcaccgacttcagcctgggctccgacactgctgtaaatgccgccatggagagctgtgaccgcatcaaacagtctgcctcggggaccaagcgccgtgtgttcatcgtggagaccatggggggttactgtggctacctggccaccgtgactggcattgctgtgggggccgacgccgcctacgtcttcgaggaccctttcaacatccacgacttaaaggtcaacgtggagcacatgacggagaagatgaagacagacattcagaggggcctggtgctgcggaacgagaagtgccatgactactacaccacggagttcctgtacaacctgtactcatcagagggcaagggcgtcttcgactgcaggaccaatgtcctgggccacctgcagcagggtggcgctccaaccccctttgaccggaactatgggaccaagctgggggtgaaggccatgctgtggttgtcggagaagctgcgcgaggtttaccgcaagggacgggtgttcgccaatgccccagactcggcctgcgtgatcggcctgaagaagaaggcggtggccttcagccccgtcactgagctcaagaaagacactgatttcgagcaccgcatgccacgggagcagtggtggctgagcctgcggctcatgctgaagatgctggcacaataccgcatcagtatggccgcctacgtgtcaggggagctggagcacgtgacccgccgcaccctgagcatggacaagggcttctgaggccagccatgcccacgcccctccccagcccccacccatgccagcgcagcgccagggctcagatggggcctgggctgttgtgtctggagcctgcaggcaggtgggggctgcgtccctgctcagcccatcccctgcctctatccctggccacctgccaggcctccctcgggctggtgtcttgagaccagcctgccaggccctccagcaggaggacagagtgccctggggcatccaccttcctgcccaggggacgtggcgctgtcggtgtttggaggctgctgccccctggctttggcgccccatgggccctcagcgtctccccatgctgggctcactacatgggccagcccttgctctacctggccggtaggctgctggcgcctaggttgtgttgagagggggatgcccctggccctgcctcactgtgacctgctcctgcccacgtgcagcacctgtcaccttttctagaaataaaatcaccctgactgtggggtgcatcggtctccgg

SEQ ID NO: 130338 - DNA, 2343 bp, Artificial Sequence
  derived and/or modified sequence
atggccgctgtcgatcttgagaagctacgagctagcggcgctgggaaagccatcggagtgctgacgtcaggtggcgatgcccaggggatgaatgccgctgtaagagccgtgacgagaatgggaatctacgtcggggctaaggtttttctgatctatgaggggtacgagggactggttgaaggcggtgaaaacattaagcaagccaactggttgtccgtgtcgaacatcatccagctgggcggaaccattattggctctgccaggtgtaaagccttcaccacccgagaaggtaggcgcgctgccgcttataaccttgtgcagcatggtattacaaacttgtgtgtaatcggcggagacgggtccctgaccggcgctaacattttccggtcggaatgggggtctcttctggaagagctggtggctgagggcaaaatctccgagaccaccgctcgtacttactctcaccttaacatagccggactagtgggatcaatcgataacgacttctgcgggacggacatgaccatcggcaccgacagcgccctgcaccgaattatggaggttattgacgctataactactacagctcagagccaccagaggacatttgttctggaggtgatgggaaggcactgcgggtacctagccctggtgtcagcgttggcaagtggcgctgactggctattcatccctgaagcccctcccgaagacggatgggagaattttatgtgtgagagacttggcgagaccagatcccggggttctcgactcaacattataatcatagccgagggtgcaattgaccgaaacggaaagcctatctcatcatcctatgtgaaagatcttgtggttcagcggctggggtttgacacccgcgtgaccgttctcggccatgtgcaacgcggaggcactccctcagcttttgacaggattctgagctcaaagatgggaatggaggcggtcatggcactcttggaggccactccagatactcccgcatgcgtcgtcaccctgagcgggaaccaaagtgttagattgcctctgatggagtgtgttcagatgaccaaggaggtgcaaaaggccatggatgataaacgattcgatgaggccacgcagttgagaggcggtagttttgaaaataactggaacatttacaaactgcttgcccaccagaagccaccgaaggagaagtctaatttttctttggcaatacttaacgtgggtgcacctgccgctggaatgaatgcagccgtgcgctctgcagtcaggaccggtattagccacggacacaccgtgtatgtggtgcatgacggatttgagggcctggccaaaggccaagtgcaagaggtgggttggcacgacgttgctggatggcttggtcgaggtggaagtatgctgggcacaaagcggacgctgccaaaaggacagcttgaaagcatcgtggaaaatatccgaatctacggaatccacgccctactggtagtaggaggatttgaagcctacgaaggcgtgcttcagctggtggaggcgaggggtagatacgaagagctctgtatagttatgtgtgttatccccgcaactattagtaacaacgttcctggtaccgacttcagtctgggttccgacactgccgtgaatgccgctatggaaagctgcgaccgcattaaacagtctgcctcagggacaaagcgtagggtgtttatcgtcgagaccatggggggatactgtggttatttggccacagtgacggggatagcagttggcgcagacgcagcttacgtgtttgaggaccccttcaacatccacgacctcaaggttaatgtagagcacatgacagagaaaatgaagacagacatccaacgaggtctggttctgagaaacgaaaaatgccacgattactataccacagagtttctgtacaatctgtacagctccgaagggaagggcgtgttcgattgcaggaccaacgttctggggcatctgcagcagggcggagctcctacgccctttgatcgaaactatggcaccaagttgggtgttaaggcgatgctctggctcagtgagaagttgagggaagtctaccgcaaagggagagtattcgctaacgctcccgactctgcatgtgtgatcggtctgaaaaaaaaggccgtagcgtttagccctgtcacagagttaaagaaagataccgactttgagcatagaatgcctagagaacagtggtggctgtcgctgcggctgatgctgaagatgttagcgcagtatcggatatccatggctgcctatgttagtggagagctggaacatgttactagaaggacattgtctatggacaaagggttttag

SEQ ID NO: 130339 - DNA, 2343 bp, Artificial Sequence
  derived and/or modified sequence
atggccgccgtggacctggagaagctgagagccagcggcgccggcaaggccatcggcgtgctgaccagcggcggcgacgcccagggcatgaacgccgccgtgagagccgtgaccagaatgggcatctacgtgggcgccaaggtgttcctgatctacgagggctacgagggcctggtggagggcggcgagaacatcaagcaggccaactggctgagcgtgagcaacatcatccagctgggcggcaccatcatcggcagcgccagatgcaaggccttcaccaccagagagggcagaagagccgccgcctacaacctggtgcagcacggcatcaccaacctgtgcgtgatcggcggcgacggcagcctgaccggcgccaacatcttcagaagcgagtggggcagcctgctggaggagctggtggccgagggcaagatcagcgagaccaccgccagaacctacagccacctgaacatcgccggcctggtgggcagcatcgacaacgacttctgcggcaccgacatgaccatcggcaccgacagcgccctgcacagaatcatggaggtgatcgacgccatcaccaccaccgcccagagccaccagagaaccttcgtgctggaggtgatgggcagacactgcggctacctggccctggtgagcgccctggccagcggcgccgactggctgttcatccccgaggccccccccgaggacggctgggagaacttcatgtgcgagagactgggcgagaccagaagcagaggcagcagactgaacatcatcatcatcgccgagggcgccatcgacagaaacggcaagcccatcagcagcagctacgtgaaggacctggtggtgcagagactgggcttcgacaccagagtgaccgtgctgggccacgtgcagagaggcggcacccccagcgccttcgacagaatcctgagcagcaagatgggcatggaggccgtgatggccctgctggaggccacccccgacacccccgcctgcgtggtgaccctgagcggcaaccagagcgtgagactgcccctgatggagtgcgtgcagatgaccaaggaggtgcagaaggccatggacgacaagagattcgacgaggccacccagctgagaggcggcagcttcgagaacaactggaacatctacaagctgctggcccaccagaagccccccaaggagaagagcaacttcagcctggccatcctgaacgtgggcgcccccgccgccggcatgaacgccgccgtgagaagcgccgtgagaaccggcatcagccacggccacaccgtgtacgtggtgcacgacggcttcgagggcctggccaagggccaggtgcaggaggtgggctggcacgacgtggccggctggctgggcagaggcggcagcatgctgggcaccaagagaaccctgcccaagggccagctggagagcatcgtggagaacatcagaatctacggcatccacgccctgctggtggtgggcggcttcgaggcctacgagggcgtgctgcagctggtggaggccagaggcagatacgaggagctgtgcatcgtgatgtgcgtgatccccgccaccatcagcaacaacgtgcccggcaccgacttcagcctgggcagcgacaccgccgtgaacgccgccatggagagctgcgacagaatcaagcagagcgccagcggcaccaagagaagagtgttcatcgtggagaccatgggcggctactgcggctacctggccaccgtgaccggcatcgccgtgggcgccgacgccgcctacgtgttcgaggaccccttcaacatccacgacctgaaggtgaacgtggagcacatgaccgagaagatgaagaccgacatccagagaggcctggtgctgagaaacgagaagtgccacgactactacaccaccgagttcctgtacaacctgtacagcagcgagggcaagggcgtgttcgactgcagaaccaacgtgctgggccacctgcagcagggcggcgcccccacccccttcgacagaaactacggcaccaagctgggcgtgaaggccatgctgtggctgagcgagaagctgagagaggtgtacagaaagggcagagtgttcgccaacgcccccgacagcgcctgcgtgatcggcctgaagaagaaggccgtggccttcagccccgtgaccgagctgaagaaggacaccgacttcgagcacagaatgcccagagagcagtggtggctgagcctgagactgatgctgaagatgctggcccagtacagaatcagcatggccgcctacgtgagcggcgagctggagcacgtgaccagaagaaccctgagcatggacaagggcttctag

SEQ ID NO: 130340 - protein, 784 aa, Artificial Sequence
  derived and/or modified sequence
MDADDSRAPKGSLRKFLEHLSGAGKAIGVLTSGGDAQGMNAAVRAVVRMGIYVGAKVYFIYEGYQGMVDGGSNIAEADWESVSSILQVGGTIIGSARCQAFRTREGRLKAACNLLQRGITNLCVIGGDGSLTGANLFRKEWSGLLEELARNGQIDKEAVQKYAYLNVVGMVGSIDNDFCGTDMTIGTDSALHRIIEVVDAIMTTAQSHQRTFVLEVMGRHCGYLALVSALACGADWVFLPESPPEEGWEEQMCVKLSENRARKKRLNIIIVAEGAIDTQNKPITSEKIKELVVTQLGYDTRVTILGHVQRGGTPSAFDRILASRMGVEAVIALLEATPDTPACVVSLNGNHAVRLPLMECVQMTQDVQKAMDERRFQDAVRLRGRSFAGNLNTYKRLAIKLPDDQIPKTNCNVAVINVGAPAAGMNAAVRSAVRVGIADGHRMLAIYDGFDGFAKGQIKEIGWTDVGGWTGQGGSILGTKRVLPGKYLEEIATQMRTHSINALLIIGGFEAYLGLLELSAAREKHEEFCVPMVMVPATVSNNVPGSDFSIGADTALNTITDTCDRIKQSASGTKRRVFIIETMGGYCGYLANMGGLAAGADAAYIFEEPFDIRDLQSNVEHLTEKMKTTIQRGLVLRNESCSENYTTDFIYQLYSEEGKGVFDCRKNVLGHMQQGGAPSPFDRNFGTKISARAMEWITAKLKEARGRGKKFTTDDSICVLGISKRNVIFQPVAELKKQTDFEHRIPKEQWWLKLRPLMKILAKYKASYDVSDSGQLEHVQPWSV

SEQ ID NO: 130341 - protein, 210 aa, Artificial Sequence
  derived and/or modified sequence
MNAAVRAVVRMGIYVGAKVYFIYEGYQGMVDGGSNIAEADWESVSSILQVGGTIIGSARCQAFRTREGRLKAACNLLQRGITNLCVIGGDGSLTGANLFRKEWSGLLEELARNGQIDKEAVQKYAYLNVVGMVGSIDNDFCGTDMTIGTDSALHRIIEVVDAIMTTAQSHQRTFVLEVMGRHCGYLALVSALACGADWVFLPESPPEEGW

SEQ ID NO: 130342 - protein, 240 aa, Artificial Sequence
  derived and/or modified sequence
MGRHCGYLALVSALACGADWVFLPESPPEEGWEEQMCVKLSENRARKKRLNIIIVAEGAIDTQNKPITSEKIKELVVTQLGYDTRVTILGHVQRGGTPSAFDRILASRMGVEAVIALLEATPDTPACVVSLNGNHAVRLPLMECVQMTQDVQKAMDERRFQDAVRLRGRSFAGNLNTYKRLAIKLPDDQIPKTNCNVAVINVGAPAAGMNAAVRSAVRVGIADGHRMLAIYDGFDGFAKG

SEQ ID NO: 130343 - protein, 166 aa, Artificial Sequence
  derived and/or modified sequence
MNAAVRAVVRMGIYVGAKVYFIYEGYQGMVDGGSNIAEADWESVSSILQVGGTIIGSARCQAFRTREGRLKAACNLLQRGITNLCVIGGDGSLTGANLFRKEWSGLLEELARNGQIDKEAVQKYAYLNVVGMVGSIDNDFCGTDMTIGTDSALHRIIEVVDAIMTT

SEQ ID NO: 130344 - DNA, 2355 bp, Artificial Sequence
  derived and/or modified sequence
atggacgccgatgattcacgtgcacctaaaggtagcctccggaagttcttagaacatctgagtggcgctggcaaagccatcggagtgctcacatccggcggggacgctcaaggtatgaacgctgcagtgcgcgctgtagttaggatgggtatttacgtgggggcgaaagtgtacttcatctacgagggctatcaaggcatggtggacggaggtagcaacatcgcagaagctgactgggagtctgtcagcagtatactgcaggtgggtggaacgatcattggaagtgccagatgtcaagcatttagaacccgtgaaggtaggcttaaggctgcgtgcaatctgctacagcgcgggattacaaacctgtgcgtgatcggtggtgatggtagccttacgggtgccaacttattccggaaagagtggagcggactgcttgaggagctcgcccgtaacggacagatcgacaaagaggcagtgcagaaatatgcctacctgaatgtggtggggatggtcggcagcatagacaatgatttctgcggcacagatatgactataggcaccgactctgccttgcacagaattattgaggtggtcgacgccattatgaccacagcccagtcacaccaacgaacctttgtgctcgaagtcatgggacggcattgtggttacctggctcttgtatccgccctggcttgcggtgcggattgggtgtttttacccgaaagccctccagaggagggctgggaagaacagatgtgcgtcaaactgagtgagaacagggcaaggaagaagcgcctcaacattattatagtggcagagggcgccatcgatacccaaaataagcccatcacttcagagaagattaaggagctggtcgtgactcagctcggctatgacacacgcgtcactatccttggtcatgtgcagcgaggcggaacgcccagcgcctttgataggattttggcctctagaatgggtgtcgaggccgtgatcgcgttgctcgaagcaacgccagatactcctgcctgtgtcgtcagcttgaatggaaaccacgctgtcagacttcccttgatggagtgtgtgcagatgacccaggacgttcagaaagctatggatgaacggcgctttcaggatgccgtacgacttagagggagaagcttcgccggcaatctgaacacttacaagcgcctggccatcaagttaccggatgatcagattcccaaaactaattgtaatgtcgcagtaataaatgtgggagcccctgcagcgggaatgaacgcagcagtgagatcagccgtccgggtgggcatcgctgacggccaccggatgctcgctatatacgatggcttcgacggatttgccaaaggtcagatcaaagaaatcgggtggacggacgttggtggatggacagggcagggagggtccatcttgggcacaaagcgcgtgctgcctggaaaatacttggaagagatcgcaactcagatgcgaacccactctattaacgcactgcttatcatcggcggcttcgaagcatacctcggattgctggaactttctgccgctcgggagaaacatgaggagttttgcgtgccaatggtgatggtccctgccacggtgtccaacaatgtacccggatctgattttagtatcggcgctgatacagcattgaacacaattacagatacctgtgacagaatcaaacaatctgcatctggtacaaagaggagagtctttatcattgagactatggggggatactgcgggtaccttgccaatatggggggcctggccgccggtgcagacgcagcttatatcttcgaggagccatttgatataagggaccttcagtctaatgtagagcatttaaccgaaaagatgaaaactaccattcagcggggactcgtcttaagaaatgaaagttgctcagagaactacacaaccgattttatctaccaactgtactcagaagagggaaagggggtgtttgactgtagaaaaaatgtcctcgggcacatgcagcagggcggtgccccctctccgttcgaccggaattttggaaccaaaataagtgccagagccatggaatggattacagccaagttgaaggaggcccgaggtcgcggtaagaagttcacaacagatgattccatctgtgtgctcggcattagcaaaagaaacgtgatctttcagccggtggccgaactgaaaaaacagaccgatttcgaacaccggatacccaaagaacaatggtggcttaagttaaggccactgatgaagattctggcgaaatacaaagcctcttacgatgtttccgactctggacagctggaacatgtgcagccctggagcgtatag

SEQ ID NO: 130345 - DNA, 2355 bp, Artificial Sequence
  derived and/or modified sequence
atggatgctgatgacagccgggcccccaagggcagcctgaggaagttcctggagcacctgtctggagctgggaaggccatcggcgtgctgaccagcggaggagatgcccagggcatgaatgctgctgtgcgggctgtggtgaggatgggcatctacgtgggcgccaaggtgtacttcatctatgagggctaccagggcatggtggatggcggcagcaacattgctgaggccgactgggagagcgtgagcagcatcctgcaggtgggcggcaccatcatcggcagcgcccgctgccaggccttccgcacccgggagggccgcctgaaggccgcctgcaacctgctgcagaggggcatcaccaacctgtgtgtgattggaggagatggcagcctgaccggggccaacctcttcaggaaggagtggagcggcctgctggaggagctggccagaaatggccagattgacaaggaggccgtgcagaagtatgcctacctgaatgtggtgggcatggtgggcagcattgacaatgacttctgtggcacagacatgaccatcggcacagattctgccctgcaccgcatcatcgaggtggtggatgccatcatgaccacagcccagagccaccagaggacctttgtgctggaggtgatgggccgccactgcggctacctggccctggtgtctgccctggcctgtggggctgactgggtgttcctgcctgagagccccccagaggagggctgggaggagcagatgtgtgtgaagctgtctgagaacagagccaggaagaagaggctgaacatcatcatcgtggccgagggcgccatcgacacccagaacaagcccatcaccagcgagaagatcaaggagctggtggtgacccagctgggctatgacaccagggtgaccatcctgggccacgtgcagagaggaggcaccccatctgcctttgaccgcatcctggccagcaggatgggcgtggaggccgtgattgccctgctggaggccaccccagacaccccagcctgtgtggtgtccctgaatggaaatcatgctgtgcggctgcccctgatggagtgtgtgcagatgacccaggatgtgcagaaggccatggatgagcggcgcttccaggatgctgtgcggctgcggggccgcagctttgctggcaacctgaacacctacaagaggctggccatcaagctgcctgatgaccagatccccaagaccaactgcaatgtggccgtcatcaacgtgggcgccccagctgctggcatgaatgctgctgtgcgctctgctgtgcgggtgggcattgctgatggccacaggatgctggccatctatgatggctttgatggctttgccaagggccagatcaaggagatcggctggacagatgtgggcggctggacaggccagggcggcagcatcctgggcaccaagagggtgctgcccgggaagtacctggaggagatcgccacccagatgaggacccacagcatcaatgccctgctgatcatcggcggctttgaggcctacctgggcctgctggagctgtctgctgcccgggagaagcatgaggagttctgtgtgcccatggtgatggtgcctgccaccgtgagcaacaacgtgcccggcagtgacttcagcatcggggctgacacagccctgaacaccatcacagacacctgtgaccgcatcaagcagagcgccagcggcaccaagagaagagtcttcatcatcgagaccatgggcggctactgcggctacctggccaacatgggcggcctggccgccggggctgatgctgcctacatctttgaggagccctttgacatccgggacctgcagagcaatgtggagcacctgacagagaagatgaagaccaccatccagaggggcctggtgctgagaaatgaaagctgcagcgagaactacaccacagacttcatctaccagctgtacagcgaggagggcaaaggagtgtttgactgcaggaagaatgtgctgggccacatgcagcagggcggggcccccagcccctttgacaggaactttggcaccaagatcagcgcccgggccatggagtggatcacagccaagctgaaggaggcccggggccggggcaagaagttcaccacagatgacagcatctgtgtgctgggcatcagcaagagaaatgtcatcttccagcctgtggccgagctgaagaagcagacagactttgagcaccgcatccccaaggagcagtggtggctgaagctgcggcccctgatgaagatcctggccaagtacaaggccagctatgatgtgtctgattctggccagctggagcacgtgcagccctggagcgtgtag

SEQ ID NO: 130346 - DNA, 2355 bp, Artificial Sequence
  derived and/or modified sequence
atggacgccgacgacagccgggcccccaagggcagcctgcggaagttcttagagcatctgagcggagcaggaaaggctattggcgtgctcacttctggaggagatgctcaggggatgaatgccgcagtccgggcggtcgtgcgcatgggcatttacgttggagccaaagtgtacttcatctatgaggggtaccaaggaatggtcgacggaggatccaatattgctgaggcagattgggaaagtgtaagctccatcctccaggtaggcggcacgattattggcagtgcacggtgtcaggcctttcggacccgcgaaggtcgccttaaggcagcctgtaatctactgcagagaggcatcaccaatctgtgtgtcattgggggggacggttccctgacaggggctaacctattccgaaaagagtggtctgggcttctggaggagcttgctcgcaacgggcaaatcgacaaggaagcagtccaaaagtacgcatacctgaacgttgtgggtatggtcggcagcattgataatgatttttgtggcacagacatgactataggcacagactccgccttgcatcgaattatagaggttgtggacgccataatgacaaccgctcagtctcatcagaggacctttgtgctggaagtgatgggccgacactgcggctatcttgccctggtgtccgcactggcctgcggtgctgactgggtgtttctacctgagtctccaccagaggagggatgggaggaacagatgtgcgtaaagttgtccgaaaatcgggcgcgtaagaagcgtctcaatataataatcgtcgcggaaggtgcgatcgacacccagaataagccgattaccagtgagaagattaaggagttggtcgtgacgcagttgggctacgacacacgcgtcaccattctcggacacgtacaaagaggaggtacaccttccgccttcgatcggattttggccagtagaatgggagttgaggccgtgatcgccctgctcgaagcaacacccgatacccccgcatgtgtcgtgtcactcaatggaaatcacgcagtgcgtttgcccttaatggaatgcgtgcagatgacccaagatgtgcagaaagccatggatgaacgtcggtttcaggacgcagtcaggcttcgcggccggagtttcgctggaaacctgaacacttacaagcgcctggccattaagctgcccgacgaccagatcccaaaaacaaactgcaatgtggccgtgataaacgtcggggcccctgcagccggcatgaacgcagcagtgcgaagcgctgtaagggtgggaatcgctgacgggcatcggatgttagctatttacgacggctttgatgggttcgccaagggacagatcaaggagatcggctggaccgacgttggtggctggaccggccaggggggtagtatcctcggaaccaagagggtgctccccgggaagtacctggaggaaatcgccactcaaatgcgaacccactctatcaacgctctgctcattatcggcggattcgaggcatatttgggcttactggaattgtccgctgcacgggagaagcacgaagaattctgtgtccctatggtcatggtgccagccacagtcagcaataacgtcccagggtccgacttttctattggcgcagacacggccttaaacactatcacagatacatgcgatcggattaagcagtctgctagcggaactaagcgccgagtgttcatcatagaaacaatgggtggttactgtggttacctagccaacatgggtgggctggcggcaggcgctgacgccgcctacatcttcgaagagccctttgatatacgggatctccagtcaaacgtcgagcacctcacagagaagatgaaaacgaccattcagaggggccttgtcctccgaaacgaaagttgcagcgaaaactatacaactgattttatataccagttgtacagcgaggaaggcaaaggtgtgttcgactgccgcaagaatgtcctagggcacatgcagcagggaggagctccttcaccattcgaccggaattttgggactaagatctccgctagagcgatggaatggattaccgcaaaattaaaggaggcgaggggaaggggtaaaaaatttactaccgacgactccatctgtgtgctgggaatatcaaagcgcaatgtgatctttcagccggtggcggaacttaagaaacaaaccgatttcgagcatcggatccctaaggaacagtggtggctcaaacttcgcccacttatgaagatactggcaaagtacaaagcatcatatgacgtgtccgactctggccaattggaacacgtgcagccttggtctgtgtag

SEQ ID NO: 130347 - DNA, 2645 bp, Artificial Sequence
  derived and/or modified sequence
gagtcaggcgcgcgcgggcagggtccccattgcctgctgcgcacccggacgtgcggctcccctcggcctcctcgccatggacgcggacgactcccgggcccccaagggctccttgcggaagttcctggagcacctctccggggccggcaaggccatcggcgtgctgaccagcggcggggatgctcaaggtatgaacgctgccgtccgtgccgtggtgcgcatgggtatctacgtgggggccaaggtgtacttcatctacgagggctaccagggcatggtggacggaggctcaaacatcgcagaggccgactgggagagtgtctccagcatcctgcaagtgggcgggacgatcattggcagtgcgcggtgccaggccttccgcacgcgggaaggccgcctgaaggctgcttgcaacctgctgcagcgaggcatcaccaacctgtgtgtgatcggcggggacgggagcctcaccggggccaacctcttccggaaggagtggagtgggctgctggaggagctggccaggaacggccagatcgataaggaggccgtgcagaagtacgcctacctcaacgtggtgggcatggtgggctccatcgacaatgatttctgcggcaccgacatgaccatcggcacggactccgccctgcacaggatcatcgaggtcgtcgacgccatcatgaccacggcccagagccaccagaggaccttcgttctggaggtgatgggacgacactgtgggtacctggccctggtgagtgccttggcctgcggtgcggactgggtgttccttccagaatctccaccagaggaaggctgggaggagcagatgtgtgtcaaactctcggagaaccgtgcccggaaaaaaaggctgaatattattattgtggctgaaggagcaattgatacccaaaataaacccatcacctctgagaaaatcaaagagcttgtcgtcacgcagctgggctatgacacacgtgtgaccatcctcgggcacgtgcagagaggagggaccccttcggcattcgacaggatcttggccagccgcatgggagtggaggcagtcatcgccttgctagaggccaccccggacaccccagcttgcgtcgtgtcactgaacgggaaccacgccgtgcgcctgccgctgatggagtgcgtgcagatgactcaggatgtgcagaaggcgatggacgagaggagatttcaagatgcggttcgactccgagggaggagctttgcgggcaacctgaacacctacaagcgacttgccatcaagctgccggatgatcagatcccaaagaccaattgcaacgtagctgtcatcaacgtgggggcacccgcggctgggatgaacgcagccgtacgctcagctgtgcgcgtgggcattgccgacggccacaggatgctcgccatctatgatggctttgacggcttcgccaagggccagatcaaagaaatcggctggacagatgtcgggggctggaccggccaaggaggctccattcttgggacaaaacgcgttctcccggggaagtacttggaagagatcgccacacagatgcgcacgcacagcatcaacgcgctgctgatcatcggtggattcgaggcctacctgggactcctggagctgtcagccgcccgggagaagcacgaggagttctgtgtccccatggtcatggttcccgctactgtgtccaacaatgtgccgggttccgatttcagcatcggggcagacaccgccctgaacactatcaccgacacctgcgaccgcatcaagcagtccgccagcggaaccaagcggcgcgtgttcatcatcgagaccatgggcggctactgtggctacctggccaacatgggggggctcgcggccggagctgatgccgcatacattttcgaagagcccttcgacatcagggatctgcagtccaacgtggagcacctgacggagaaaatgaagaccaccatccagagaggccttgtgctcagaaatgagagctgcagtgaaaactacaccaccgacttcatttaccagctgtattcagaagagggcaaaggcgtgtttgactgcaggaagaacgtgctgggtcacatgcagcagggtggggcaccctctccatttgatagaaactttggaaccaaaatctctgccagagctatggagtggatcactgcaaaactcaaggaggcccggggcagaggaaaaaaatttaccaccgatgattccatttgtgtgctgggaataagcaaaagaaacgttatttttcaacctgtggcagagctgaagaagcaaacggattttgagcacaggattcccaaagaacagtggtggctcaagctacggcccctcatgaaaatcctggccaagtacaaggccagctatgacgtgtcggactcaggccagctggaacatgtgcagccctggagtgtctgacccagtcccgcctgcatgtgcctgcagccaccgtggactgtctgtttttgtaacacttaagttattttatcagcactttatgcacgtattattgacattaatacctaatcggcgagtgcccatctgccccacctgctccagtgcgtgctgtctgtggagtgtgtctcatgctttcagatgtgcatatgagcagaattaattaaacatttgccta

SEQ ID NO: 130348 - DNA, 658 bp, Artificial Sequence
  derived and/or modified sequence
attccagtaaaaggaccccagcatcaacgttcttcctgcagggctgggttctcagagaaagaaaacgtgatgcagcagaggatgggattgaagaaacaggagagtgaagtggaaatagcctggcccgcgtgacttaaaccggcccggagatgtgcgggtatgaacgctgccgtccgtgccgtggtgcgcatgggtatctacgtgggggccaaggtgtacttcatctacgagggctaccagggcatggtggacggaggctcaaacatcgcagaggccgactgggagagtgtctccagcatcctgcaagtgggcgggacgatcattggcagtgcgcggtgccaggccttccgcacgcgggaaggccgcctgaaggctgcttgcaacctgctgcagcgaggcatcaccaacctgtgtgtgatcggcggggacgggagcctcaccggggccaacctcttccggaaggagtggagtgggctgctggaggagctggccaggaacggccagatcgataaggaggccgtgcagaagtacgcctacctcaacgtggtgggcatggtgggctccatcgacaatgatttctgcggcaccgacatgaccatcggcacggactccgccctgcacaggatcatcgaggtcgtcgacgccatcatgaccacgg

SEQ ID NO: 130349 - DNA, 2355 bp, Artificial Sequence
  derived and/or modified sequence
atggatgcagatgactcccgtgcccctaagggatctttacgcaagttcctcgagcacctgtcaggcgctggcaaagcgatcggagtgttgactagtggaggtgacgcgcaggggatgaacgcggcagttcgcgcagtggtgcgcatggggatttacgtgggcgcaaaagtttattttatatacgaaggctatcagggaatggtggacggcggaagcaatattgccgaagcagactgggagtccgtgtcatccattcttcaggtggggggaactattattggctcagccaggtgccaggcttttcggacgcgggaagggaggctgaaagctgcttgtaacctgctgcagagaggcatcacaaatctgtgtgttattggcggtgatggcagccttaccggggctaacctgttccgaaaggaatggtccggactcctggaagagctcgccagaaacgggcagattgataaagaagccgtgcaaaagtacgcctacctgaatgtcgtagggatggtgggtagtattgataatgacttttgcggtacagatatgactatcggcacagactccgctctccatcgtattattgaagtggtagacgctatcatgacgaccgcgcagtcacaccaacggacgtttgtgttagaagtcatggggagacattgcgggtacttggccctggtttcagccttagcatgcggagctgattgggtgttcttgcccgaatcgcccccagaggaggggtgggaagaacagatgtgtgtgaaactgtcagagaaccgcgctcggaaaaagcgcctgaatataatcatagtggccgaaggcgcaattgatacacaaaacaagccaatcacaagcgaaaaaatcaaagaattggtcgtgacccagctgggctacgatacccgggtgactattttaggccacgtccaaaggggaggaactccaagtgcctttgatcgcatcttggccagccgaatgggagttgaggcagttatagctctgctagaagctacccctgatacccccgcttgcgtcgtgtctctgaatggcaatcatgcggtgaggcttcccttaatggagtgcgttcagatgacgcaagatgtacagaaagctatggacgaaaggaggttccaggatgcagtgaggctgagagggaggagtttcgctggcaatctcaacacatacaaacgccttgccatcaagctccccgacgatcagatacctaaaacaaattgcaacgtggccgtgattaatgttggagcacccgctgctggcatgaacgcagccgtgcggagtgccgttagagtgggcatcgccgacggccataggatgcttgctatctacgatggattcgacggctttgcgaagggacagattaaggaaatcggatggaccgatgtcgggggttggacaggccagggcggtagcatcctgggcacgaaacgagtgctaccaggcaagtacttagaagaaatagccacacagatgagaacgcactcgatcaacgccttgctcatcattggcggtttcgaagcctatctcgggctcctggaattgtctgcagctcgcgaaaaacatgaggaattctgcgtccccatggtgatggtcccggctacggtcagtaataacgtgccaggcagtgatttttcaatcggagctgacaccgccctcaacaccatcaccgatacctgcgaccgaataaagcagagcgcttcaggcacaaagcgccgtgtgttcataattgagacaatggggggttactgcggctatctcgccaatatgggcggactagcagccggtgctgacgctgcctacatcttcgaagagcctttcgatatccgggacttacagtcgaacgtagagcacctgacagagaaaatgaagaccacaattcaaagaggactagtactgaggaacgagtcgtgctctgagaattacacaacggacttcatttaccaactgtattcagaagaagggaagggtgtctttgattgtcggaagaacgtgctcggccacatgcaacaaggcggagccccttccccatttgaccgcaatttcggaacaaagatttctgctagagctatggagtggataactgcaaagctgaaggaggcaagggggagaggaaaaaagtttacaaccgacgatagcatatgtgtactagggatctctaagagaaatgtgattttccagccagttgccgagttgaagaagcaaacagacttcgaacacaggatcccaaaggaacagtggtggttaaagttgcgacctcttatgaagattctcgctaagtataaggctagctatgatgtgtcggattctggacaattagagcatgtgcagccctggagcgtctag

SEQ ID NO: 130350 - DNA, 2355 bp, Artificial Sequence
  derived and/or modified sequence
atggacgccgacgacagcagagcccccaagggcagcctgagaaagttcctggagcacctgagcggcgccggcaaggccatcggcgtgctgaccagcggcggcgacgcccagggcatgaacgccgccgtgagagccgtggtgagaatgggcatctacgtgggcgccaaggtgtacttcatctacgagggctaccagggcatggtggacggcggcagcaacatcgccgaggccgactgggagagcgtgagcagcatcctgcaggtgggcggcaccatcatcggcagcgccagatgccaggccttcagaaccagagagggcagactgaaggccgcctgcaacctgctgcagagaggcatcaccaacctgtgcgtgatcggcggcgacggcagcctgaccggcgccaacctgttcagaaaggagtggagcggcctgctggaggagctggccagaaacggccagatcgacaaggaggccgtgcagaagtacgcctacctgaacgtggtgggcatggtgggcagcatcgacaacgacttctgcggcaccgacatgaccatcggcaccgacagcgccctgcacagaatcatcgaggtggtggacgccatcatgaccaccgcccagagccaccagagaaccttcgtgctggaggtgatgggcagacactgcggctacctggccctggtgagcgccctggcctgcggcgccgactgggtgttcctgcccgagagcccccccgaggagggctgggaggagcagatgtgcgtgaagctgagcgagaacagagccagaaagaagagactgaacatcatcatcgtggccgagggcgccatcgacacccagaacaagcccatcaccagcgagaagatcaaggagctggtggtgacccagctgggctacgacaccagagtgaccatcctgggccacgtgcagagaggcggcacccccagcgccttcgacagaatcctggccagcagaatgggcgtggaggccgtgatcgccctgctggaggccacccccgacacccccgcctgcgtggtgagcctgaacggcaaccacgccgtgagactgcccctgatggagtgcgtgcagatgacccaggacgtgcagaaggccatggacgagagaagattccaggacgccgtgagactgagaggcagaagcttcgccggcaacctgaacacctacaagagactggccatcaagctgcccgacgaccagatccccaagaccaactgcaacgtggccgtgatcaacgtgggcgcccccgccgccggcatgaacgccgccgtgagaagcgccgtgagagtgggcatcgccgacggccacagaatgctggccatctacgacggcttcgacggcttcgccaagggccagatcaaggagatcggctggaccgacgtgggcggctggaccggccagggcggcagcatcctgggcaccaagagagtgctgcccggcaagtacctggaggagatcgccacccagatgagaacccacagcatcaacgccctgctgatcatcggcggcttcgaggcctacctgggcctgctggagctgagcgccgccagagagaagcacgaggagttctgcgtgcccatggtgatggtgcccgccaccgtgagcaacaacgtgcccggcagcgacttcagcatcggcgccgacaccgccctgaacaccatcaccgacacctgcgacagaatcaagcagagcgccagcggcaccaagagaagagtgttcatcatcgagaccatgggcggctactgcggctacctggccaacatgggcggcctggccgccggcgccgacgccgcctacatcttcgaggagcccttcgacatcagagacctgcagagcaacgtggagcacctgaccgagaagatgaagaccaccatccagagaggcctggtgctgagaaacgagagctgcagcgagaactacaccaccgacttcatctaccagctgtacagcgaggagggcaagggcgtgttcgactgcagaaagaacgtgctgggccacatgcagcagggcggcgcccccagccccttcgacagaaacttcggcaccaagatcagcgccagagccatggagtggatcaccgccaagctgaaggaggccagaggcagaggcaagaagttcaccaccgacgacagcatctgcgtgctgggcatcagcaagagaaacgtgatcttccagcccgtggccgagctgaagaagcagaccgacttcgagcacagaatccccaaggagcagtggtggctgaagctgagacccctgatgaagatcctggccaagtacaaggccagctacgacgtgagcgacagcggccagctggagcacgtgcagccctggagcgtgtag

SEQ ID NO: 130351 - protein, 140 aa, Artificial Sequence
  derived and/or modified sequence
MAGWQSYVDNLMCDGCCQEAAIVGYCDAKYVWAATAGGVFQSITPIEIDMIVGKDREGFFTNGLTLGAKKCSVIRDSLYVDGDCTMDIRTKSQGGEPTYNVAVGRAGRALVIVMGKEGVHGGTLNKKAYELALYLRRSDV

SEQ ID NO: 130352 - DNA, 423 bp, Artificial Sequence
  derived and/or modified sequence
atggcaggatggcagagttatgtggacaatctcatgtgtgacggatgttgccaggaagcagctatcgtaggttactgtgacgcaaagtatgtgtgggccgctactgctggaggggtattccagagtattactccgatcgagatcgatatgattgtgggaaaggatcgagagggcttcttcaccaatggtctgactctcggcgctaagaaatgtagcgtgatcagagactcactgtacgtagatggcgactgtaccatggacattcgcacaaagagtcagggaggagagcctacctataacgttgcggtggggcgggcgggcagggcccttgtcattgtgatgggaaaggagggggtccacggtggaacattgaataaaaaagcctacgaacttgccctgtacctccgccgctccgacgtgtag

SEQ ID NO: 130353 - DNA, 423 bp, Artificial Sequence
  derived and/or modified sequence
atggccggctggcagagctatgtggacaacctgatgtgtgatggctgctgccaggaggccgccatcgtgggctactgtgatgccaagtatgtgtgggccgccacagctgggggcgtcttccagagcatcacccccatcgagattgacatgattgtgggcaaggaccgggagggcttcttcaccaacggcctgaccctgggcgccaagaagtgcagcgtcatccgggacagcctgtatgtggatggagactgcaccatggacatccgcaccaagagccagggcggggagcccacctacaacgtggccgtgggccgggccggccgggccctggtgattgtgatgggcaaggagggcgtgcacggcggcaccctgaacaagaaggcctatgagctggccctgtacctgcggcggagtgatgtgtag

SEQ ID NO: 130354 - DNA, 423 bp, Artificial Sequence
  derived and/or modified sequence
atggccggctggcagagctacgtggacaacctgatgtgcgacggctgctgtcaagaggccgctatcgtaggttattgtgatgctaagtatgtgtgggctgccacagccggcggagtgttccagagcatcacgcccatcgaaattgacatgattgttggaaaggatagagaaggcttcttcaccaacgggctgactctcggggccaaaaagtgcagcgtgataagagactccctttatgtagacggcgactgtaccatggatatcagaaccaagagtcaggggggggaacctacttataatgtggcggttggtcgggccggacgtgcacttgtgattgtcatgggtaaagagggggtacatggcgggacactaaataaaaaggcttatgagctggctctttatctccggcgcagcgacgtgtag

SEQ ID NO: 130355 - DNA, 423 bp, Artificial Sequence
  derived and/or modified sequence
atggctgggtggcaaagttacgtggacaatctgatgtgtgatggttgctgtcaggaggccgcaattgttgggtattgcgatgccaaatacgtctgggcagctactgctggaggggtgtttcagtctattacacccattgaaatcgatatgatcgtcggtaaggacagagagggattcttcacaaatggactaactctaggcgcaaagaagtgtagcgtgattagggatagtctttatgttgacggcgactgcaccatggacattagaacaaaatcccaaggtggagaacccacatacaatgtggcggtgggtcgcgcaggacgggcattagtgatcgtcatgggcaaagaaggagtgcacggcggtaccctcaataaaaaagcctacgaattggccctgtatttgaggaggtctgatgtgtag

SEQ ID NO: 130356 - DNA, 1780 bp, Artificial Sequence
  derived and/or modified sequence
gcctccccccgcgccgccgccgcccgctaccgccgccgccgccgctgcgcctgctgctcctcgccgtccgcgctgcagtgcgaagggctcgaagatggccggttggcagagctacgtggataacctgatgtgcgatggctgctgccaggaggccgccattgtcggctactgcgacgccaaatacgtctgggcagccacggccgggggcgtctttcagagcattacgccaatagaaatagatatgattgtaggaaaagaccgggaaggtttctttaccaacggtttgactcttggcgcgaagaaatgctcagtgatcagagatagtctatacgtcgatggtgactgcacaatggacatccggacaaagagtcaaggtggggagccaacatacaatgtggctgtcggcagagctggtagagcattggttatagtcatgggaaaggaaggtgtccacggaggcacacttaacaagaaagcatatgaactcgctttatacctgaggaggtctgatgtgtaagcagcctctccccatctacctagcaactgtcttcatcaacaaccctaattatggtcacaatgctaccaaactgtagatggtagctaatttttctttacctattttctaatgtcatgattcctgtttgcccaatggatcatttgtatgttaaccactgtatgtaaccaacccttatctggcaacataattgcagcacaataatgatttgcatgataccttgaaattggggggagggggcatgccaagttgggcatcactttgtcttagcaattaatgggatattgattactaaaataagttaatattaagcaaggtgccggttgtacaatctctgatcagtgtcttttcagcactttgagcatttacttggctcatttagtcttccttttgtagcgcatggttgggaggaaaaagtgcatgcatcattccttcactcttctctttttcccgccccccctcccttcgcacataggcatttggtttgcttccatctttttttatgcagtgcctgtttttttttaaccaattaaaatcccttttgttgatgagctattgagagctgcagtagtttgcttttagtattgttgttgcacttgagcagagacaaacctttattcatagtgtctacaggacatatgaagagtgcaatggcaaaacaagagcaaaaagcacttcctcccatgaccttacagtaaccatactgattgaatccccagggacattccatcattgcaatagctcagatttttcttcctttttctttgcacaccagctctactctttagtaaaattgtaaaaggctgccattatggacattaggtatcccaacataaccatctggagtgtgtccagtttgttcttcataggaccaatttttatttgcagcttgagtttttatatgaagttgcattattgtggacttggctgtcttgtgatgaatttttttcatatgtattctgtgccatactattgttaaaatgaactgttgctattgtgagatggattttaactgacctattaagggtttctttcgaatggcactactttagggacattctagtatttgcttctattgtttgggccttgtggataatgtacagatttaaaaacaaatcttgttgctgatttgtccatttctttccctgcactttgttacatctgggatacagtctaactcatctgatttaatatgcatttaaaaaaatgccataactattaaacaccttgtttacagacagatgaaataaatttattccaaccaaa

SEQ ID NO: 130357 - DNA, 423 bp, Artificial Sequence
  derived and/or modified sequence
atggccggctggcagagctacgtggacaacctgatgtgcgacggctgctgccaggaggccgccatcgtgggctactgcgacgccaagtacgtgtgggccgccaccgccggcggcgtgttccagagcatcacccccatcgagatcgacatgatcgtgggcaaggacagagagggcttcttcaccaacggcctgaccctgggcgccaagaagtgcagcgtgatcagagacagcctgtacgtggacggcgactgcaccatggacatcagaaccaagagccagggcggcgagcccacctacaacgtggccgtgggcagagccggcagagccctggtgatcgtgatgggcaaggagggcgtgcacggcggcaccctgaacaagaaggcctacgagctggccctgtacctgagaagaagcgacgtgtag

SEQ ID NO: 130358 - protein, 254 aa, Artificial Sequence
  derived and/or modified sequence
MAAYKLVLIRHGESAWNLENRFSGWYDADLSPAGHEEAKRGGQALRDAGYEFDICFTSVQKRAIRTLWTVLDAIDQMWLPVVRTWRLNERHYGGLTGLNKAETAAKHGEAQVKIWRRSYDVPPPPMEPDHPFYSNISKDRRYADLTEDQLPSCESLKDTIARALPFWNEEIVPQIKEGKRVLIAAHGNSLRGIVKHLEGLSEEAIMELNLPTGIPIVYELDKNLKPIKPMQFLGDEETVRKAMEAVAAQGKAKK

SEQ ID NO: 130359 - protein, 144 aa, Artificial Sequence
  derived and/or modified sequence
MPLIRCGCHDVPPPPMEPDHPFYSNISKDRRYADLTEDQLPSCESLKDTIARALPFWNEEIVPQIKEGKRVLIAAHGNSLRGIVKHLEGLSEEAIMELNLPTGIPIVYELDKNLKPIKPMQFLGDEETVRKAMEAVAAQGKAKK

SEQ ID NO: 130360 - DNA, 765 bp, Artificial Sequence
  derived and/or modified sequence
atggctgcctacaagctagtgcttatccgccacggggagtccgcttggaacctggagaatagattctcaggctggtacgatgccgatcttagtccagcaggacatgaggaagccaaacgcggcggtcaggctttgagagacgctggttatgaattcgatatttgcttcaccagtgtccagaagcgagccatccggacgctgtggaccgtactggatgccatcgaccagatgtggcttccggtagttaggacctggcgcctcaatgagaggcattatgggggcctcaccggactcaacaaggcagagacggcagcaaaacatggggaggctcaggtaaaaatctggcggagatcatatgacgtgccacccccccccatggagccggatcatccattttactctaatattagtaaggacaggcggtacgccgatctgacggaggatcagctcccgagttgcgaatccctcaaggataccatagctagagccctccccttctggaacgaagagattgtgccgcagataaaagaagggaagagagtgctgatagcggctcatgggaacagcctgcggggaatcgttaagcacctcgagggattgagtgaggaggctatcatggagcttaatttacccaccggcattccaatcgtgtacgagcttgacaaaaacctgaagccaatcaaacctatgcagttcctcggagatgaggaaactgtgcggaaggccatggaagccgtcgctgcccagggcaaagccaaaaaatag

SEQ ID NO: 130361 - DNA, 765 bp, Artificial Sequence
  derived and/or modified sequence
atggccgcctacaagctggtgctgatcagacatggagagagcgcctggaacctggagaaccgcttcagcggctggtatgatgctgacctgagccctgctggccacgaggaggccaagagaggaggccaggccctgagagatgctggctatgaatttgacatctgcttcacctctgtgcagaagagggccatccgcaccctgtggacagtgctggatgccatcgaccagatgtggctgcctgtggtgaggacctggaggctgaatgaaagacactacggcggcctgaccggcctgaacaaggccgagacagctgccaagcatggagaggcccaggtgaagatctggaggaggagctatgatgtgcccccaccacccatggagccagaccaccccttctacagcaacatcagcaaggaccggcgctatgctgacctgacagaggaccagctgcccagctgtgagagcctgaaggacaccatcgcccgggccctgcccttctggaatgaggagatcgtgccccagatcaaggagggcaagagggtgctgattgctgcccacggcaacagcctgcggggcatcgtgaagcacctggagggcctgtctgaggaggccatcatggagctgaacctgcccaccggcatccccatcgtgtatgagctggacaagaacctgaagcccatcaagcccatgcagttcctgggagatgaggagaccgtgaggaaggccatggaggccgtggccgcccagggcaaggccaagaagtag

SEQ ID NO: 130362 - DNA, 765 bp, Artificial Sequence
  derived and/or modified sequence
atggccgcctacaagctggtgctgatccggcacggcgagagcgcctggaatctcgaaaacaggttctccggctggtacgacgcggatcttagccctgctggccacgaggaggcaaaaagaggtggccaggccctgagagatgccggctacgagtttgatatctgctttacttcggttcagaaaagggcaattaggacactctggaccgtacttgacgctattgaccaaatgtggctcccagtcgtccgaacctggcgacttaacgagcggcactatgggggcctgacaggtcttaataaggcggagacggcggcgaagcatggggaagcccaggtaaaaatttggcgtaggtcctacgatgtgccgccgcctcccatggagccagatcatcctttttattcaaatatctctaaagaccggagatacgcagatcttaccgaggatcagcttccctcctgtgaatcactaaaagacacaatcgctcgtgccctccctttctggaatgaggagatcgttccccagatcaaagagggcaaaagggtcctgatcgccgctcatggtaattccctgagggggatcgtaaaacaccttgaagggctgagtgaagaagctattatggagctgaatctgccaactgggattcctatcgtctacgaattagacaaaaatctgaaacctataaaacctatgcagtttctgggtgatgaggaaacagtgcgcaaggccatggaggcggtcgcagcacaggggaaggcgaaaaagtag

SEQ ID NO: 130363 - DNA, 1830 bp, Artificial Sequence
  derived and/or modified sequence
agcggtccagagcgagtggaaagatttgggcgagaacttgcgcgggagccggactgagcggtgcgagcgcgcaggcgcggccgacggggcgggctgctactccggaatctgctaatcccagtcggtgccgcatccccagcccgccgccatggccgcctacaaactggtgctgatccggcacggcgagagcgcatggaacctggagaaccgcttcagcggctggtacgacgccgacctgagcccggcgggccacgaggaggcgaagcgcggcgggcaggcgctacgagatgctggctatgagtttgacatctgcttcacctcagtgcagaagagagcgatccggaccctctggacagtgctagatgccattgatcagatgtggctgccagtggtgaggacttggcgcctcaatgagcggcactatgggggtctaaccggtctcaataaagcagaaactgctgcaaagcatggtgaggcccaggtgaagatctggaggcgctcctatgatgtcccaccacctccgatggagcccgaccatcctttctacagcaacatcagtaaggatcgcaggtatgcagacctcacagaagatcagctaccctcctgtgagagtctgaaggatactattgccagagctctgcccttctggaatgaagaaatagttccccagatcaaggaggggaaacgtgtactgattgcagcccatggcaacagcctccggggcattgtcaagcatctggagggtctctctgaagaggctatcatggagctgaacctgccgactggtattcccattgtctatgaattggacaagaacttgaagcctatcaagcccatgcagtttctgggggatgaagagacggtgcgcaaagccatggaagctgtggctgcccagggcaaggccaagaagtgaaggccggcggggaggatactgtccccaggagcaccctccctgcccgtcttgtccctctgcccctcccacctgcacatgtcacactgaccacatctgtagacatcttgagttgtagctgcagacggggaccagtggctcccattttcattttagccattttgtcgcctgcacccactcccttcatacaatctagtcagaatagcagttctagagcacaggttctcagtctaagctatggaaaagctccccttatccaacagagtttaaaagtagtgacttgggtttttgcgagtgctttgtttactaaggactttggggaggaaccatgctaagccatgaccagtgaggagaagcaacagagcctgtctgtccccatgagcggagtctgtcctctgctcttctgcagtcaggtcactgcctactgcctgggggctctagtcattccagtggaagacgaatgtaacctgcgtggtgatgtgacaactgtttcctccctgaccccagaggatctggctctaggttgggatcaatcctgaatttcgttatgtgttaatttacttttattaaaaaagtatagtatatataatacaaaacaataacccttctggggtttcttgtggcggttgaaatagtcccacatgtggtcatcagaaaataagccattcctcataccaatataggatcagctccttgacctctgaggggcaggagtgcttcctggtgtgtgtattagaatcccttcctgccttgtttcatggcagtgaaatgcctcttggtcctgtccaagtgtatctttcactgatttctgaatcatgttctagttgcttgaccctgccacatgggtccagtgttcatctgagcataactgtactaaatcctttttccatatcagtataataaaggagtgatgtgcaata

SEQ ID NO: 130364 - DNA, 1385 bp, Artificial Sequence
  derived and/or modified sequence
aatcccagtcggtgccgcatccccagcccgccgccatggccgcctacaaactggtgctgatccggcacggcgagagcgcatggaacctggagaaccgcttcagcggctggtacgacgccgacctgagcccggcgggccacgaggaggcgaagcgcggcgggcaggcgctacgagatgctggctatgagtttgacatctgcttcacctcagtgcagaagagagcgatccggaccctctggacagtgctagatgccattgatcagatgtggctgccatgatgtcccaccacctccgatggagcccgaccatcctttctacagcaacatcagtaaggatcgcaggtatgcagacctcacagaagatcagctaccctcctgtgagagtctgaaggatactattgccagagctctgcccttctggaatgaagaaatagttccccagatcaaggaggggaaacgtgtactgattgcagcccatggcaacagcctccggggcattgtcaagcatctggagggtctctctgaagaggctatcatggagctgaacctgccgactggtattcccattgtctatgaattggacaagaacttgaagcctatcaagcccatgcagtttctgggggatgaagagacggtgcgcaaagccatggaagctgtggctgcccagggcaaggccaagaagtgaaggccggcggggaggatactgtccccaggagcaccctccctgcccgtcttgtccctctgcccctcccacctgcacatgtcacactgaccacatctgtagacatcttgagttgtagctgcagacggggaccagtggctcccattttcattttagccattttgtcgcctgcacccactcccttcatacaatctagtcagaatagcagttctagagcacaggttctcagtctaagctatggaaaagctccccttatccaacagagtttaaaagtagtgacttgggtttttgcgagtgctttgtttactaaggactttggggaggaaccatgctaagccatgaccagtgaggagaagcaacagagcctgtctgtccccatgagcggagtctgtcctctgctcttctgcagtcaggtcactgcctactgcctgggggctctagtcattccagtggaagacgaatgtaacctgcgtggtgatgtgacaactgtttcctccctgaccccagaggatctggctctaggttgggatcaatcctgaatttcgttatgtgttaatttacttttattaaaaaagtatagtatatataatacaaaacaataacccttctggggtttcttgtggcggttgaaatagtcccacatgtggtcatcagaaaataagccattcctcataccaatataggatcagctccttgacctctga

SEQ ID NO: 130365 - DNA, 765 bp, Artificial Sequence
  derived and/or modified sequence
atggcggcttacaaactggtccttattcgacatggcgagtccgcctggaacctggagaatagattctctggatggtatgacgctgatctctctccagcaggccacgaggaggcgaagcggggaggtcaagccttacgggatgccggttatgagtttgacatctgtttcacatccgtgcagaagcgagcaatccgcacactatggaccgtcctggacgcaattgaccagatgtggctgccggtggttcgtacttggcgattgaatgaaaggcattatggaggcttaactggtttaaataaagcagaaactgccgcaaagcatggcgaagcccaggtaaaaatctggcgacgcagttacgatgtaccacccccacctatggagccagaccatccattttattcaaatataagcaaagaccggagatatgccgacctgacagaagatcagctgccctcatgtgaaagtcttaaggataccattgccagggcactgccattctggaatgaagaaattgtaccacagattaaggagggcaaacgagttctgatcgcggcacacggcaatagtctgaggggtattgtgaagcaccttgagggtctttccgaagaggctattatggagttaaacttacctaccggaatcccaatcgtctacgagctggacaaaaacctgaagcctataaagcctatgcagttcctgggggatgaagagacggtcaggaaagccatggaagcagtagccgcacaggggaaggctaagaaatag

SEQ ID NO: 130366 - DNA, 765 bp, Artificial Sequence
  derived and/or modified sequence
atggccgcctacaagctggtgctgatcagacacggcgagagcgcctggaacctggagaacagattcagcggctggtacgacgccgacctgagccccgccggccacgaggaggccaagagaggcggccaggccctgagagacgccggctacgagttcgacatctgcttcaccagcgtgcagaagagagccatcagaaccctgtggaccgtgctggacgccatcgaccagatgtggctgcccgtggtgagaacctggagactgaacgagagacactacggcggcctgaccggcctgaacaaggccgagaccgccgccaagcacggcgaggcccaggtgaagatctggagaagaagctacgacgtgccccccccccccatggagcccgaccaccccttctacagcaacatcagcaaggacagaagatacgccgacctgaccgaggaccagctgcccagctgcgagagcctgaaggacaccatcgccagagccctgcccttctggaacgaggagatcgtgccccagatcaaggagggcaagagagtgctgatcgccgcccacggcaacagcctgagaggcatcgtgaagcacctggagggcctgagcgaggaggccatcatggagctgaacctgcccaccggcatccccatcgtgtacgagctggacaagaacctgaagcccatcaagcccatgcagttcctgggcgacgaggagaccgtgagaaaggccatggaggccgtggccgcccagggcaaggccaagaagtag

SEQ ID NO: 130367 - protein, 388 aa, Artificial Sequence
  derived and/or modified sequence
MKWMVVVLVCLQLLEAAVVKVPLKKFKSIRETMKEKGLLGEFLRTHKYDPAWKYRFGDLSVTYEPMAYMDAAYFGEISIGTPPQNFLVLFDTGSSNLWVPSVYCQSQACTSHSRFNPSESSTYSTNGQTFSLQYGSGSLTGFFGYDTLTVQSIQVPNQEFGLSENEPGTNFVYAQFDGIMGLAYPALSVDEATTAMQGMVQEGALTSPVFSVYLSNQQGSSGGAVVFGGVDSSLYTGQIYWAPVTQELYWQIGIEEFLIGGQASGWCSEGCQAIVDTGTSLLTVPQQYMSALLQATGAQEDEYGQFLVNCNSIQNLPSLTFIINGVEFPLPPSSYILSNNGYCTVGVEPTYLSSQNGQPLWILGDVFLRSYYSVYDLGNNRVGFATAA

SEQ ID NO: 130368 - protein, 104 aa, Artificial Sequence [sequence omitted]

SEQ ID NO: 130369 - DNA, 1167 bp, Artificial Sequence
  derived and/or modified sequence
atgaaatggatggtagtagtcttggtatgcctgcagctcctcgaggccgccgtcgttaaagtgcccctgaagaaatttaagtctattcgcgagactatgaaagaaaaggggttgctcggggagttcctccggacacataagtacgacccagcctggaagtatcggttcggcgacctcagtgttacctatgaacccatggcctacatggatgccgcctatttcggggaaataagcatcggcactcctccacagaatttcctcgtcctgtttgacacaggatcctctaacctgtgggttccaagtgtgtattgccagagtcaggcttgcacaagccactctcgttttaatcccagcgaaagcagcacctacagcacgaatgggcagaccttcagcctccaatacggatccggctccctgacgggcttcttcgggtatgacactctcacagtgcagagcatacaggtgcctaatcaggagttcggactgtcagagaatgaacccggcaccaacttcgtttacgctcaattcgacggaattatgggcctggcatacccggcactgagtgtggatgaagccactacggccatgcagggcatggtgcaggaaggggccctgacaagtcctgtcttctcagtgtaccttagtaaccagcaaggctccagcggaggagccgtcgtttttggcggagtggacagtagtttatacaccggacaaatttattgggctcccgtgactcaggagctgtactggcagattggaatagaggagttcttgattgggggccaggccagtggctggtgctcagaggggtgtcaggcgatcgttgacactgggacgagtctcctgactgtgcctcagcaatatatgtctgctctgctgcaagcgacaggggcacaggaggatgagtacggccagtttttagtaaactgtaatagcatccagaatctgccttctctcactttcattatcaatggcgtagagtttccactgccaccaagcagctacatcttgtccaacaacggatattgtactgtgggagtcgagcccacctacttgagctcccagaatgggcagcctctgtggattctaggggacgttttcctgcgcagctactatagtgtctatgacctggggaacaatcgtgtcggattcgccactgcggcctag

SEQ ID NO: 130370 - DNA, 1167 bp, Artificial Sequence
  derived and/or modified sequence
atgaagtggatggtggtggtgctggtgtgcctgcagctgctggaggccgctgtggtgaaggtgcccctgaagaagttcaagagcatccgggagaccatgaaggagaagggcctgctgggggagttcctgcggacccacaagtatgaccctgcctggaagtacagatttggagacctgtctgtgacctatgagcccatggcctacatggatgctgcctactttggagagatcagcatcggcaccccaccccagaacttcctggtgctgtttgacaccggcagcagcaacctgtgggtgcccagcgtgtactgccagagccaggcctgcaccagccacagccgcttcaaccccagcgagagcagcacctacagcaccaacggccagaccttcagcctgcagtatggcagcggcagcctgaccggcttcttcggctatgacaccctgactgtgcagagcatccaggtgcccaaccaggagtttggcctgtctgaaaatgaacctggcaccaactttgtgtatgcccagtttgatggcatcatgggcctggcctacccagccctgtctgtggatgaggccaccacagccatgcagggcatggtgcaggagggcgccctgaccagccctgtgttttctgtgtacctgagcaaccagcagggcagcagtggaggagctgtggtgtttggaggagtggacagcagcctgtacacaggccagatctactgggcccctgtgacccaggagctgtactggcagatcggcatcgaggagttcctgattggaggccaggccagcggctggtgcagcgagggctgccaggccatcgtggacaccggcaccagcctgctgactgtgccccagcagtacatgtctgccctgctgcaggccaccggggcccaggaggatgaatatggccagttcctggtgaactgcaacagcatccagaacctgcccagcctgaccttcatcatcaacggggtggagttccccctgccccccagcagctacatcctgagcaacaacggctactgcaccgtgggcgtggagcccacctacctgagcagccagaatggccagcccctgtggatcctgggagatgtgttcctgcggagctactacagcgtgtatgacctgggcaacaacagagtgggctttgccacagctgcctag

SEQ ID NO: 130371 - DNA, 1167 bp, Artificial Sequence
  derived and/or modified sequence
atgaagtggatggtggtggtgctggtgtgcctgcagctgctggaggctgccgttgtgaaggtccccctcaaaaagttcaagtccatacgtgagaccatgaaagagaaaggactcctgggggagtttctccgtacccacaagtatgatccagcgtggaagtatagatttggcgacctgtcagtcacatatgagcccatggcttacatggatgccgcctatttcggagagatcagcatcgggactcccccccagaattttctagtgctgttcgataccggaagttcgaatctctgggtcccatctgtatactgtcaatcccaggcctgcacgagtcacagcagatttaacccttctgagtcctctacttatagcactaatggacaaaccttcagcctgcagtacggatcaggatccctcactggcttcttcgggtacgacacacttaccgtgcagtccatccaggtccctaaccaggagttcgggctgtccgaaaacgagcctggaacaaatttcgtatacgcacagtttgatggaatcatgggcctggcctatcccgccctcagtgttgacgaggcgactacagcaatgcaaggcatggtacaggagggcgctctgacatcccctgtgttcagcgtgtatcttagcaaccagcagggcagtagcggaggtgctgtagtgttcggaggggtggatagcagtctctacacagggcagatctactgggctccagtgactcaggaactttactggcagattggcattgaagagtttttgatcggtggtcaggctagcggctggtgctctgaaggctgtcaggctatcgtcgacaccggcacctctcttcttactgtaccccagcagtatatgagcgctctccttcaggccactggagcccaagaagacgaatatgggcaattccttgtcaactgcaactctatccagaatctaccaagcctgaccttcataataaacggagttgagtttcctctccccccatccagctatattctgagcaacaatggatattgcaccgtgggagtagaaccaacatacctctcaagtcagaatggtcagcccctttggattttgggggatgtgttcctgagaagttattattccgtgtacgacctcggcaataacagggtggggtttgcaacggcagcatag

SEQ ID NO: 130372 - DNA, 1167 bp, Artificial Sequence
  derived and/or modified sequence
atgaaatggatggtcgtcgtcttagtgtgcctccagctcctggaggcggcagtcgtaaaagtccctctgaagaaattcaagtccatccgcgaaaccatgaaagagaaaggtctcctgggcgaattcctgcgcacacacaaatacgatcctgcctggaagtatcggtttggcgatctttccgtgacctatgagcccatggcatacatggatgcagcctactttggagagatatcaattggcactcccccacagaactttttggttttgttcgatacaggcagctcgaatctctgggtcccttcggtgtattgccagtcccaggcctgcacctcccactcacgatttaacccgtcggagtcgtccacgtactctaccaatgggcaaaccttcagtctgcaatacggaagcgggagccttaccggatttttcggatatgatactcttactgtgcagtctatccaggtgccgaatcaggagttcggcctttctgaaaatgagccgggaactaactttgtgtacgcgcaatttgatggcatcatgggcctggcatacccagcactcagtgtcgatgaggccaccacagctatgcagggtatggtgcaagaaggcgctttgacctccccagtgttcagcgtgtacctttcaaatcagcaaggatcgtctggcggtgccgtagtgtttggcggagtagactccagcttgtacacaggtcagatatactgggccccagtcacccaggaactgtactggcagattggtatcgaggaattcttgatcggaggccaggcgtcgggatggtgttccgaggggtgccaagccattgtagataccgggacatctcttctgactgtcccacagcagtatatgtctgctttgctgcaggccactggagctcaggaggacgaatacggacagttcctagtgaattgtaattccattcagaatctcccttcgttgacctttatcatcaacggcgtggaatttcccctgcccccatcctcctacatactttccaacaacggatattgtacagtgggcgtcgagccaacctatctctcaagccagaatggccagcctctgtggatactcggggacgtgttcctacgcagctactattccgtatacgacttaggaaataacagggtgggattcgccacagcggcttag

SEQ ID NO: 130373 - DNA, 1371 bp, Artificial Sequence
  derived and/or modified sequence
actccactgcgactgcagaactcagagctgctcttcctctgtggccagttggggaccagcatcatgaagtggatggtggtggtcttggtctgcctccagctcttggaggcagcagtggtcaaagtgcccctgaagaaatttaagtctatccgtgagaccatgaaggagaagggcttgctgggggagttcctgaggacccacaagtatgatcctgcttggaagtaccgctttggtgacctcagcgtgacctacgagcccatggcctacatggatgctgcctactttggtgagatcagcatcgggactccaccccagaacttcctggtcctttttgacaccggctcctccaacttgtgggtgccctctgtctactgccagagccaggcctgcaccagtcactcccgcttcaaccccagcgagtcgtccacctactccaccaatgggcagaccttctccctgcagtatggcagtggcagcctcaccggcttctttggctatgacaccctgactgtccagagcatccaggtccccaaccaggagttcggcttgagtgagaatgagcctggtaccaacttcgtctatgcgcagtttgatggcatcatgggcctggcctaccctgctctgtccgtggatgaggccaccacagctatgcagggcatggtgcaggagggcgccctcaccagccccgtcttcagcgtctacctcagcaaccagcagggctccagcgggggagcggttgtctttgggggtgtggatagcagcctgtacacggggcagatctactgggcgcctgtcacccaggaactctactggcagattggcattgaagagttcctcatcggcggccaggcctccggctggtgttctgagggttgccaggccatcgtggacacaggcacctctctgctcactgtgccccagcagtacatgagtgctcttctgcaggccacaggggcccaggaggatgagtatggacagtttctcgtgaactgtaacagcattcagaatctgcccagcttgaccttcatcatcaatggtgtggagttccctctgccaccttcctcctatatcctcagtaacaacggctactgcaccgtgggagtcgagcccacctacctgtcctcccagaacggccagcccctgtggatcctcggggatgtcttcctcaggtcctactattccgtctacgacttgggcaacaacagagtaggctttgccactgccgcctagacttgctgcctcgacacgtgggctcccctcttcctcttgaccctgcaccctcctagggcattgtatctgtctttccactctggattcagccttctttttctggactctggactttctctaataataaatagttcttcttta

SEQ ID NO: 130374 - DNA, 1137 bp, Artificial Sequence
  derived and/or modified sequence
cttcactccactgcgactgcagaactcagagctgctcttcctctgtggccagttggggaccagcatcatgaagtggatggtggtggtcttggtctgcctccagctcttggaggcagcagtggtcaaagtgcccctgaagaaatttaagtctatccgtgagaccatgaaggagaagggcttgctgggggagttcctgaggacccacaagtatgatcctgcttggaagtaccgctttggtgacctcagcgtgacctacgagcccatggcctacatggatgtccagagcatccaggtccccaaccaggagttcggcttgagtgagaatgagcctggtaccaacttcgtctatgcgcagtttgatggcatcatgggcctggcctaccctgctctgtccgtggatgaggccaccacagctatgcagggcatggtgcaggagggcgccctcaccagccccgtcttcagcgtctacctcagcaaccagcagggctccagcgggggagcggttgtctttgggggtgtggatagcagcctgtacacggggcagatctactgggcgcctgtcacccaggaactctactggcagattggcattgaagagttcctcatcggcggccaggcctccggctggtgttctgagggttgccaggccatcgtggacacaggcacctctctgctcactgtgccccagcagtacatgagtgctcttctgcaggccacaggggcccaggaggatgagtatggacagtttctcgtgaactgtaacagcattcagaatctgcccagcttgaccttcatcatcaatggtgtggagttccctctgccaccttcctcctatatcctcagtaacaacggctactgcaccgtgggagtcgagcccacctacctgtcctcccagaacggccagcccctgtggatcctcggggatgtcttcctcaggtcctactattccgtctacgacttgggcaacaacagagtaggctttgccactgccgcctagacttgctgcctcgacacgtgggctcccctcttcctcttgaccctgcaccctcctagggcattgtatctgtctttccactctggattcagccttctttttctggactctggactttctctaataataaatagttcttcttt

SEQ ID NO: 130375 - DNA, 1167 bp, Artificial Sequence
  derived and/or modified sequence
atgaagtggatggtggtggtgctggtgtgcctgcagctgctggaggccgccgtggtgaaggtgcccctgaagaagttcaagagcatcagagagaccatgaaggagaagggcctgctgggcgagttcctgagaacccacaagtacgaccccgcctggaagtacagattcggcgacctgagcgtgacctacgagcccatggcctacatggacgccgcctacttcggcgagatcagcatcggcacccccccccagaacttcctggtgctgttcgacaccggcagcagcaacctgtgggtgcccagcgtgtactgccagagccaggcctgcaccagccacagcagattcaaccccagcgagagcagcacctacagcaccaacggccagaccttcagcctgcagtacggcagcggcagcctgaccggcttcttcggctacgacaccctgaccgtgcagagcatccaggtgcccaaccaggagttcggcctgagcgagaacgagcccggcaccaacttcgtgtacgcccagttcgacggcatcatgggcctggcctaccccgccctgagcgtggacgaggccaccaccgccatgcagggcatggtgcaggagggcgccctgaccagccccgtgttcagcgtgtacctgagcaaccagcagggcagcagcggcggcgccgtggtgttcggcggcgtggacagcagcctgtacaccggccagatctactgggcccccgtgacccaggagctgtactggcagatcggcatcgaggagttcctgatcggcggccaggccagcggctggtgcagcgagggctgccaggccatcgtggacaccggcaccagcctgctgaccgtgccccagcagtacatgagcgccctgctgcaggccaccggcgcccaggaggacgagtacggccagttcctggtgaactgcaacagcatccagaacctgcccagcctgaccttcatcatcaacggcgtggagttccccctgccccccagcagctacatcctgagcaacaacggctactgcaccgtgggcgtggagcccacctacctgagcagccagaacggccagcccctgtggatcctgggcgacgtgttcctgagaagctactacagcgtgtacgacctgggcaacaacagagtgggcttcgccaccgccgcctag

SEQ ID NO: 130376 - protein, 170 aa, Artificial Sequence
  derived and/or modified sequence
MPVMRLFPCFLQLLAGLALPAVPPQQWALSAGNGSSEVEVVPFQEVWGRSYCRALERLVDVVSEYPSEVEHMFSPSCVSLLRCTGCCGDENLHCVPVETANVTMQLLKIRSGDRPSYVELTFSQHVRCECRPLREKMKPERRRPKGRGKRRREKQRPTDCHLCGDAVPRR

SEQ ID NO: 130377 - DNA, 513 bp, Artificial Sequence
  derived and/or modified sequence
atgcccgtgatgagactgttcccctgcttcctgcagctgctggccggcctggccctgcccgccgtgcccccccagcagtgggccctgagcgccggcaacggcagcagcgaggtggaggtggtgcccttccaggaggtgtggggcagaagctactgcagagccctggagagactggtggacgtggtgagcgagtaccccagcgaggtggagcacatgttcagccccagctgcgtgagcctgctgagatgcaccggctgctgcggcgacgagaacctgcactgcgtgcccgtggagaccgccaacgtgaccatgcagctgctgaagatcagaagcggcgacagacccagctacgtggagctgaccttcagccagcacgtgagatgcgagtgcagacccctgagagagaagatgaagcccgagagaagaagacccaagggcagaggcaagagaagaagagagaagcagagacccaccgactgccacctgtgcggcgacgccgtgcccagaagatag

SEQ ID NO: 130378 - DNA, 513 bp, Artificial Sequence
  derived and/or modified sequence
atgccagttatgcgactcttcccgtgctttctccaactgcttgctggtctggcactccctgccgtgcctccacagcagtgggcactaagcgccggtaacgggagctcagaggtggaggtagtgcccttccaagaagtgtggggcagatcttactgtagagctctggaacggttagtcgatgtcgtctccgagtaccctagcgaggtcgagcacatgttcagcccgtcttgtgtgagtctgctcagatgcacgggatgttgtggagacgaaaacctccattgtgtcccagtcgaaactgctaacgtcaccatgcagctacttaagataagatccggtgatcgaccttcatacgttgagctcaccttctctcagcacgtgcgatgtgagtgtcgacctttgagggaaaagatgaaacctgagcgacgcagaccgaagggccggggaaagcgtagacgggaaaagcaacggccaaccgattgccacctctgtggagatgccgtccctaggaggtag

SEQ ID NO: 130379 - DNA, 513 bp, Artificial Sequence
  derived and/or modified sequence
atgcctgtgatgaggctcttcccctgcttcctgcagctgctggccggcctggccctgcctgctgtgcccccccagcagtgggccctgtctgctggaaatggcagcagcgaggtggaggtggtgcccttccaggaggtgtggggccgcagctactgccgggccctggagcggctggtggatgtggtgtctgagtaccccagcgaggtggagcacatgttcagccccagctgtgtgtccctgctgcgctgcaccggctgctgcggagatgagaacctgcactgtgtgcctgtggagacagccaacgtgaccatgcagctgctgaagatccgcagcggggaccggcccagctatgtggagctgaccttcagccagcacgtgcgctgtgaatgtcggcccctgcgggagaagatgaagccagagcggcggcggcccaagggccggggcaagagaagaagagagaagcagaggcccacagactgccacctgtgtggagatgctgtgcccaggaggtag

SEQ ID NO: 130380 - DNA, 513 bp, Artificial Sequence
  derived and/or modified sequence
atgcccgtgatgcggctgttcccctgcttcctgcagctgctggccgggctggccctgccggccgtccctcctcagcagtgggccttaagcgcgggaaatggctccagcgaggtcgaggttgtcccatttcaggaggtatggggcaggtcctattgcagagctttggagcggttggtagatgtggtttcggaatacccatccgaagttgaacacatgtttagtccgtcctgtgtatcgctgctgcgatgcactggatgctgcggagatgagaacttgcactgtgtccccgtcgaaacggcaaacgtgaccatgcagctccttaagatccgcagtggtgatagacccagttatgtcgaacttactttcagccagcacgtgaggtgtgaatgtaggcccctcagagagaagatgaaacccgagcgcaggcggccaaagggccggggcaaaagacggagagaaaagcaaagaccaaccgattgccatctgtgcggtgacgcagtcccacggaggtag

SEQ ID NO: 130381 - DNA, 513 bp, Artificial Sequence
  derived and/or modified sequence
atgccagtgatgcgtttgttcccttgcttcctgcagctgctcgccggacttgctttgccagccgtgcctcctcagcagtgggcgctgtctgccggtaacggatcctctgaggtagaggtggttccatttcaagaggtgtgggggcgttcctactgtcgggcattagaacgacttgttgatgtggtgtcagagtaccccagcgaggtggaacacatgttctcaccaagctgtgtcagccttctgcgctgcaccgggtgttgtggggatgagaatctgcactgtgtgcccgtcgagactgcgaatgtcacaatgcagctactcaaaatcagatccggggataggccgtcctacgttgagcttacattcagccaacacgttagatgcgaatgccggccattaagagagaagatgaagcccgaacggaggcgcccaaagggacggggtaagagacggagagaaaagcagcgcccaactgattgccatctgtgtggagacgcagtacctcggagatag

SEQ ID NO: 130382 - DNA, 1927 bp, Artificial Sequence
  derived and/or modified sequence
gtctggacctgccgagagcccctcgcacgcactgcgggctccggcgctgcgggctggccgggcgctgcgggctgaccgggcgctccgggaactcggctcgggaacctcgtctgcggtgggcggggccggcccggagccccgccccggctcagtccctgaaacccaggcgcggaccggctgcagtctcagaagggagctgctgtctgcggaggaaactgcatcgacggacggccgcccagctacgggaggacctggagtggcactgggcgcccgacggaccatccccgggacccgcctgcccctcggcgccccgccccgccgggccgctccccgtcgggttccccagccacagccttacctacgggctcctgactccgcaaggcttccagaagatgctcgaaccaccggccggggcctcggggcagcagtgagggaggcgtccagccccccactcagctcttctcctcctgtgccaggggctccccgggggatgagcatggtggttttccctcggagccccctggctcgggacgtctgagaagatgccggtcatgaggctgttcccttgcttcctgcagctcctggccgggctggcgctgcctgctgtgcccccccagcagtgggccttgtctgctgggaacggctcgtcagaggtggaagtggtacccttccaggaagtgtggggccgcagctactgccgggcgctggagaggctggtggacgtcgtgtccgagtaccccagcgaggtggagcacatgttcagcccatcctgtgtctccctgctgcgctgcaccggctgctgcggcgatgagaatctgcactgtgtgccggtggagacggccaatgtcaccatgcagctcctaaagatccgttctggggaccggccctcctacgtggagctgacgttctctcagcacgttcgctgcgaatgccggcctctgcgggagaagatgaagccggaaaggaggagacccaagggcagggggaagaggaggagagagaagcagagacccacagactgccacctgtgcggcgatgctgttccccggaggtaacccaccccttggaggagagagaccccgcacccggctcgtgtatttattaccgtcacactcttcagtgactcctgctggtacctgccctctatttattagccaactgtttccctgctgaatgcctcgctcccttcaagacgaggggcagggaaggacaggaccctcaggaattcagtgccttcaacaacgtgagagaaagagagaagccagccacagacccctgggagcttccgctttgaaagaagcaagacacgtggcctcgtgaggggcaagctaggccccagaggccctggaggtctccaggggcctgcagaaggaaagaagggggccctgctacctgttcttgggcctcaggctctgcacagacaagcagcccttgctttcggagctcctgtccaaagtagggatgcggatcctgctggggccgccacggcctggctggtgggaaggccggcagcgggcggaggggatccagccacttccccctcttcttctgaagatcagaacattcagctctggagaacagtggttgcctgggggcttttgccactccttgtcccccgtgatctcccctcacactttgccatttgcttgtactgggacattgttctttccggccaaggtgccaccaccctgccccccctaagagacacatacagagtgggccccgggctggagaaagagctgcctggatgagaaacagctcagccagtggggatgaggtcaccaggggaggagcctgtgcgtcccagctgaaggcagtggcaggggagcaggttccccaagggccctggcacccccacaagctgtccctgcagggccatctgactgccaagccagattctcttgaataaagtattctagtgtggaaa

SEQ ID NO: 130383 - protein, 272 aa, Artificial Sequence
  derived and/or modified sequence
MAAKVFESIGKFGLALAVAGGVVNSALYNVDAGHRAVIFDRFRGVQDIVVGEGTHFLIPWVQKPIIFDCRSRPRNVPVITGSKDLQNVNITLRILFRPVASQLPRIFTSIGEDYDERVLPSITTEILKSVVARFDAGELITQRELVSRQVSDDLTERAATFGLILDDVSLTHLTFGKEFTEAVEAKQVAQQEAERARFVVEKAEQQKKAAIISAEGDSKAAELIANSLATAGDGLIELRKLEAAEDIAYQLSRSRNITYLPAGQSVLLQLPQ

SEQ ID NO: 130384 - protein, 246 aa, Artificial Sequence
  derived and/or modified sequence
MAAKVFESIGKFGLALAVAGGVVNSALYNVDAGHRAVIFDRFRGVQDIVVGEGTHFLIPWVQKPIIFDCRSRPRNVPVITGSKDLQNVNITLRILFRPVASQLPRIFTSIGEDYDERVLPSITTEILKSVVARFDAGELITQRELVSRQVSDDLTERAATFGLILDDVSLTHLTFGKEFTEAVEAKQVAQQEAERARFVVEKAEQQKKAAIISAEGDSKAAELIANSLATAGDGLIELRKLEAAED

SEQ ID NO: 130385 - protein, 124 aa, Artificial Sequence
  derived and/or modified sequence
MAAKVFESIGKFGLALAVAGGVVNSALYNVDAGHRAVIFDRFRGVQDIVVGEGTHFLIPWVQKPIIFDCRSRPRNVPVITGSKDLQNVNITLRILFRPVASQLPRIFTSIGEDYDERVLPSITT

SEQ ID NO: 130386 - protein, 201 aa, Artificial Sequence
  derived and/or modified sequence
MAAKVFESIGKFGLALAVAGGVVNSALYNVDAGHRAVIFDRFRGVQDIVVGEGTHFLIPWVQKPIIFDCRSRPRNVPVITGSKDLQNVNITLRILFRPVASQLPRIFTSIGEDYDERVLPSITTEILKSVVARFDAGELITQRELVSRQVSDDLTERAATFGLILDDVSLTHLTFGKEFTEAVEAKQVAQQEAERARFVVE

SEQ ID NO: 130387 - protein, 214 aa, Artificial Sequence
  derived and/or modified sequence
MAAKVFESIGKFGLALAVAGGVVNSALYNVDAGHRAVIFDRFRGVQDIVVGEGTHFLIPWVQKPIIFDCRSRPRNVPVITGSKDLQNVNITLRILFRPVASQLPRIFTSIGEDYDERVLPSITTEILKSVVARFDAGELITQRELVSRQVSDDLTERAATFGLILDDVSLTHLTFGKEFTEAVEAKQVAQQEAERARFVVEKAEQQKKAAIISA

SEQ ID NO: 130388 - protein, 204 aa, Artificial Sequence
  derived and/or modified sequence
MAAKVFESIGKFGLALAVAGGVVNSALYNVDAGHRAVIFDRFRGVQDIVVGEGTHFLIPWVQKPIIFDCRSRPRNVPVITGSKDLQNVNITLRILFRPVASQLPRIFTSIGEDYDERVLPSITTEILKSVVARFDAGELITQRELVSRQVSDDLTERAATFGLILDDVSLTHLTFGKEFTEAVEAKQVAQQEAERARFVVEKVS

SEQ ID NO: 130389 - DNA, 819 bp, Artificial Sequence
  derived and/or modified sequence
atggccgcaaaggtgtttgagtcaatcggcaagttcggattggccctggcggttgcaggaggagtggtgaattctgccctttataacgtagatgctggacacagagctgtgatcttcgaccggtttcgtggtgtgcaagacatcgtggttggggaaggcacccatttcttaataccgtgggtgcagaagccaattattttcgattgcagaagccggccaaggaacgtgccggttatcaccggatccaaagacctgcagaatgttaatattaccctcaggattctgttccggcccgtggctagccagttgcctagaatctttacgagtatcggcgaagattacgatgaacgcgttctgccatcaatcacaacagaaatcttgaagagcgtggtagctcggtttgatgctggggaactgattacccagagggagttagtttcccgtcaggtatccgatgatctgacagagcgggctgctaccttcggcctgatcctcgatgacgtgagtctcactcatctgaccttcggcaaagaatttacagaagccgtcgaagctaaacaggtcgctcagcaggaggccgagagagcccggtttgtcgtcgagaaggcagaacaacagaagaaagccgcgatcatctccgctgaaggagattcgaaggccgccgagctcatcgcaaatagtctggccactgccggggatggccttattgagctgcgaaagcttgaagcagccgaagacatcgcttatcagttaagcagatcaagaaacattacctatctgcccgccgggcagagcgttctccttcaactcccccagtag

SEQ ID NO: 130390 - DNA, 741 bp, Artificial Sequence
  derived and/or modified sequence
atggccgctaaggtgtttgagtctattggcaaatttggattggctctggccgtggccggcggcgtagttaattccgccctgtacaatgtcgatgccgggcaccgggcggtcattttcgacaggttccgcggcgtacaggacattgtcgtgggcgagggtacgcatttcctcattccttgggtgcagaaacccattatattcgactgccgcagccgtccaaggaatgtacccgtaattactggcagtaaggatcttcaaaatgtcaatatcacactcaggatactattcagacccgtcgcatctcagttgcctagaatattcacctcaataggtgaagactatgacgaacgcgtactgcccagcatcactactgaaatcctgaaatcagtggtggcccggttcgatgcgggtgaactcataactcaacgtgagctcgtttcccgccaggtatcggacgacttaacagagagggcagcaacatttggcctgatcctggacgatgtcagtctgactcatctgaccttcggcaaggaattcaccgaggccgtagaagctaagcaagtcgcccagcaggaggccgagcgggcacgcttcgtggttgagaaagccgagcagcagaagaaagctgcgatcatctctgccgaaggagactctaaggctgccgaacttatcgcaaattcccttgctacagccggtgacggtctcattgagctgagaaagctggaggcagctgaggactag

SEQ ID NO: 130391 - DNA, 606 bp, Artificial Sequence
  derived and/or modified sequence
atggccgccaaggtcttcgagagtatcggcaagttcggcctggccctcgctgtcgcggggggggtagtaaacagcgctctctacaatgtggacgccgggcacagagctgtgatttttgataggtttcgtggtgtccaggacatagtggtgggggaggggacgcattttctgatcccttgggtgcaaaaacctatcattttcgattgtagatcccgaccacgcaatgtcccagtcattacgggcagtaaggacctgcaaaatgtaaacatcactttgcgtatcctgtttcggcccgtagcgtcacagctcccccgcatttttacgtctataggcgaagattacgatgagcgggtcctaccctcaatcaccactgaaatcctaaaatcagtggttgctcgctttgatgcaggggagcttatcactcagcgggagttggtgagcagacaggtttccgatgaccttacagaacgagcagcgaccttcggcctcattcttgatgatgtcagcctgacgcacctgaccttcgggaaggagttcacagaagccgtggaggccaaacaagttgcccagcaggaagccgaacgggcacgctttgtggtcgaatag

SEQ ID NO: 130392 - DNA, 645 bp, Artificial Sequence
  derived and/or modified sequence
atggccgccaaggtcttcgaatcaatcggtaagttcggtctcgctctcgcagtggccggcggagtggttaatagtgctctttataatgttgacgcaggccacagagccgtcatctttgataggttccgaggtgtgcaggatatagtcgtgggggagggcacgcatttccttattccgtgggtgcagaagcctattatttttgattgcagatcccggccaagaaatgtgcccgtcatcaccggcagcaaagacctgcagaacgtgaacatcacattgcggatcctgtttcggccggtggcctcccagctgcccaggatcttcacctccatcggagaggattacgacgaacgagttctgccttccataaccacggagatacttaaatcagtggttgctaggtttgacgcaggcgaactaattacacagcgagaactcgtgagtagacaggtgtcggacgatctgacagaacgtgcagcgacatttggcctgatcctcgatgatgtttcccttacacatctgacttttgggaaggagtttacggaggctgttgaagccaagcaagtggcgcagcaggaagccgagagggcaagattcgtcgtcgaaaaagccgaacaacagaaaaaggcggctattatctccgcgtag

SEQ ID NO: 130393 - DNA, 615 bp, Artificial Sequence
  derived and/or modified sequence
atggccgccaaggtatttgagagtataggaaagttcggcctggcactggccgtggccggaggggtcgtcaattctgccctgtataatgtggatgctggccatcgggccgtcatctttgacaggttccggggtgtgcaggacattgtcgtcggtgagggcacacactttctaatcccatgggtgcagaaacctatcatattcgattgtcgctctagacctcgtaacgtacccgtaatcactggctctaaagatctgcagaacgtcaatatcaccctccgcattctctttcggccggttgcctctcaactgccgagaattttcacttctattggagaggactacgatgagagggtgctgccatctattaccactgagattctgaagtcggtggtggcaaggtttgatgccggggaattaataactcaaagagagctggtgtcccggcaggtgtcagacgatttgaccgagcgggctgcaacgttcggcctaatcctggacgacgtgagcctcacgcacctgacatttggtaaggagtttactgaagctgtcgaagctaagcaagtggctcagcaggaggctgaaagagctcgattcgtcgttgaaaaggtgagttag

SEQ ID NO: 130394 - DNA, 819 bp, Artificial Sequence
  derived and/or modified sequence
atggccgccaaggtgtttgagagcatcggcaagtttggcctggccctggccgtggccggcggcgtggtgaacagcgccctgtacaacgtggatgctggccaccgggccgtcatctttgaccgcttccggggcgtgcaggacatcgtggtgggggagggcacccacttcctgatcccctgggtgcagaagcccatcatctttgactgccgcagccggcccagaaatgtgcctgtgatcaccggcagcaaggacctgcagaatgtgaacatcaccctgcgcatcctcttccggcctgtggccagccagctgccccgcatcttcaccagcatcggggaggactatgatgagcgggtgctgcccagcatcaccacagagatcctgaagtctgtggtggccaggtttgatgctggggagctgatcacccagcgggagctggtgtcccggcaggtgtctgatgacctgacagagcgggccgccaccttcggcctcatcctggatgatgtgtccctgacccacctgaccttcggcaaggagttcacagaggccgtggaggccaagcaggtggcccagcaggaggccgagcgggccaggtttgtggtggagaaggccgagcagcagaagaaggccgccatcatctctgctgagggggacagcaaggctgctgagctgattgccaacagcctggccacagctggagatggcctcatcgagctgaggaagctggaggccgcagaagatattgcctaccagctgagccgcagcaggaacatcacctacctgcctgctggccagagcgtgctgctgcagctgccccagtag

SEQ ID NO: 130395 - DNA, 741 bp, Artificial Sequence
  derived and/or modified sequence
atggccgccaaggtgtttgagagcatcggcaagtttggcctggccctggccgtggccggcggcgtggtgaacagcgccctgtacaacgtggatgctggccaccgggccgtcatctttgaccgcttccggggcgtgcaggacatcgtggtgggggagggcacccacttcctgatcccctgggtgcagaagcccatcatctttgactgccgcagccggcccagaaatgtgcctgtgatcaccggcagcaaggacctgcagaatgtgaacatcaccctgcgcatcctcttccggcctgtggccagccagctgccccgcatcttcaccagcatcggggaggactatgatgagcgggtgctgcccagcatcaccacagagatcctgaagtctgtggtggccaggtttgatgctggggagctgatcacccagcgggagctggtgtcccggcaggtgtctgatgacctgacagagcgggccgccaccttcggcctcatcctggatgatgtgtccctgacccacctgaccttcggcaaggagttcacagaggccgtggaggccaagcaggtggcccagcaggaggccgagcgggccaggtttgtggtggagaaggccgagcagcagaagaaggccgccatcatctctgctgagggggacagcaaggctgctgagctgattgccaacagcctggccacagctggagatggcctcatcgagctgaggaagctggaggccgcagaagattag

SEQ ID NO: 130396 - DNA, 606 bp, Artificial Sequence
  derived and/or modified sequence
atggccgccaaggtgtttgagagcatcggcaagtttggcctggccctggccgtggccggcggcgtggtgaacagcgccctgtacaacgtggatgctggccaccgggccgtcatctttgaccgcttccggggcgtgcaggacatcgtggtgggggagggcacccacttcctgatcccctgggtgcagaagcccatcatctttgactgccgcagccggcccagaaatgtgcctgtgatcaccggcagcaaggacctgcagaatgtgaacatcaccctgcgcatcctcttccggcctgtggccagccagctgccccgcatcttcaccagcatcggggaggactatgatgagcgggtgctgcccagcatcaccacagagatcctgaagtctgtggtggccaggtttgatgctggggagctgatcacccagcgggagctggtgtcccggcaggtgtctgatgacctgacagagcgggccgccaccttcggcctcatcctggatgatgtgtccctgacccacctgaccttcggcaaggagttcacagaggccgtggaggccaagcaggtggcccagcaggaggccgagcgggccaggtttgtggtggagtag

SEQ ID NO: 130397 - DNA, 645 bp, Artificial Sequence
  derived and/or modified sequence
atggccgccaaggtgtttgagagcatcggcaagtttggcctggccctggccgtggccggcggcgtggtgaacagcgccctgtacaacgtggatgctggccaccgggccgtcatctttgaccgcttccggggcgtgcaggacatcgtggtgggggagggcacccacttcctgatcccctgggtgcagaagcccatcatctttgactgccgcagccggcccagaaatgtgcctgtgatcaccggcagcaaggacctgcagaatgtgaacatcaccctgcgcatcctcttccggcctgtggccagccagctgccccgcatcttcaccagcatcggggaggactatgatgagcgggtgctgcccagcatcaccacagagatcctgaagtctgtggtggccaggtttgatgctggggagctgatcacccagcgggagctggtgtcccggcaggtgtctgatgacctgacagagcgggccgccaccttcggcctcatcctggatgatgtgtccctgacccacctgaccttcggcaaggagttcacagaggccgtggaggccaagcaggtggcccagcaggaggccgagcgggccaggtttgtggtggagaaggccgagcagcagaagaaggccgccatcatcagcgcctag

SEQ ID NO: 130398 - DNA, 615 bp, Artificial Sequence
  derived and/or modified sequence
atggccgccaaggtgtttgagagcatcggcaagtttggcctggccctggccgtggccggcggcgtggtgaacagcgccctgtacaacgtggatgctggccaccgggccgtcatctttgaccgcttccggggcgtgcaggacatcgtggtgggggagggcacccacttcctgatcccctgggtgcagaagcccatcatctttgactgccgcagccggcccagaaatgtgcctgtgatcaccggcagcaaggacctgcagaatgtgaacatcaccctgcgcatcctcttccggcctgtggccagccagctgccccgcatcttcaccagcatcggggaggactatgatgagcgggtgctgcccagcatcaccacagagatcctgaagtctgtggtggccaggtttgatgctggggagctgatcacccagcgggagctggtgtcccggcaggtgtctgatgacctgacagagcgggccgccaccttcggcctcatcctggatgatgtgtccctgacccacctgaccttcggcaaggagttcacagaggccgtggaggccaagcaggtggcccagcaggaggccgagcgggccaggtttgtggtggagaaggtgtcctag

SEQ ID NO: 130399 - DNA, 819 bp, Artificial Sequence
  derived and/or modified sequence
atggccgccaaggtgttcgagagcatcggcaagttcggcctggccctcgcagtcgccggcggcgtcgtgaatagcgcgctgtataacgtcgacgccgggcatagagccgtgattttcgaccgctttagaggcgtgcaggatattgtggttggcgagggaacacattttttgataccctgggtccagaaacccataatattcgattgtaggtcaagaccacgaaacgtccccgtgatcaccgggtctaaagaccttcagaatgttaatatcacattacgaattctgttccgcccagtggctagccagttgccacgcattttcactagtattggcgaagattatgatgagcgtgtgctgccatccattactactgagatcttgaagagtgtggtagctagattcgatgctggcgaactaatcacacaacgcgagttggtatcaaggcaagtaagtgacgatctgactgagagggcagcaactttcggtcttatcctggacgatgtgtctctcactcatttgaccttcgggaaggaatttacggaagccgtggaggccaaacaggtagctcaacaggaagctgaacgagcccgattcgtcgtggagaaagctgagcaacagaaaaaagctgctattatatcagccgaaggtgattccaaggccgcagaacttattgcaaactctttggcaactgccggtgacgggcttatcgaactgaggaaactggaggctgctgaggacatcgcctatcaactatcaaggagtcggaacattacttacctgcccgctggacagtctgttctgttgcagcttccacagtag

SEQ ID NO: 130400 - DNA, 741 bp, Artificial Sequence
  derived and/or modified sequence
atggccgccaaggtgttcgagagcatcggcaagttcggcctggccctggcagtggctggaggtgtagtcaactctgctctgtacaatgtggacgcaggtcatagggctgtgatctttgaccgattccgcggagtgcaggatatcgttgtaggcgagggtactcacttcctgattccgtgggttcagaagccaatcatctttgattgccgatcaagaccgcgtaacgttcctgtgattacaggcagcaaggatctgcaaaatgtgaatattaccctccgaatcctgtttcgtcctgtcgcctcacaactgcctagaatttttacctcaattggagaagattacgatgagcgcgtcttgccttctatcacgacagagattcttaagagcgtcgtagctcgctttgacgccggggaactaatcacccaacgtgagttggtgagtaggcaagtgagcgacgacctgacagagcgggccgccacatttgggctcatcttggacgatgtgtcacttacacacctgacgtttggcaaggagtttaccgaagccgtggaagcgaaacaggttgctcagcaggaagccgaacgcgcgcgatttgtggtggaaaaggctgaacagcaaaagaaggcggcaattatttccgccgaaggagattccaaagcagctgaactgatcgccaacagtttggccacggccggagacggacttatcgagctccgaaagctcgaggcggcagaagattag

SEQ ID NO: 130401 - DNA, 606 bp, Artificial Sequence
  derived and/or modified sequence
atggccgccaaggtgttcgagagcatcggcaagttcggcctggccctagccgtggcaggaggcgttgtgaattctgccttatataatgtggacgctggacatcgggccgtcatttttgataggtttagaggggtgcaggatatagtggtaggagagggcacacactttctcattccatgggtccagaagccgattatctttgactgtagaagcaggccccggaacgtgccagtgatcacaggatcaaaagacctgcagaacgtaaatataactctccggatcctctttagacctgttgcgtcacagttgccccggatattcacctccattggagaggactatgacgagagagtgttgccatcaattactaccgagatcctcaagtccgtcgttgcccgattcgacgcgggcgagctcatcacgcaacgggagctcgtgagtcgccaggtgtccgatgatctgactgagcgagctgccaccttcggcctgatactggacgacgtgagtctgacccacctgacattcggaaaggaattcactgaggccgtcgaagcaaaacaggtcgcccagcaagaggccgagcgggcacgctttgtggtggaatag

SEQ ID NO: 130402 - DNA, 645 bp, Artificial Sequence
  derived and/or modified sequence
atggccgccaaggtgttcgagagcatcggcaagttcggcctggccctcgccgtagcaggaggggtcgttaattccgctctctataacgttgacgcggggcatagagcagttatcttcgaccggttccgaggtgtgcaggatattgtggtcggcgaggggacgcatttcttaattccatgggtacaaaaacccattattttcgactgccgttcccgaccccggaacgttcccgtgattaccggctccaaagatttgcagaacgtcaacattactctgcgcattcttttccgaccagtggcatcccaactgccacggatttttacatcaatcggcgaagactatgacgaaagggtgctgccttctataaccacagaaatactcaagtcagtggtggcccgattcgacgctggggaactgataacccaacgtgaactggtgagtcgccaggtgtccgacgatctcactgagagggccgctactttcggccttattcttgacgatgtgtccctaacacacctgacatttggcaaggaattcaccgaagccgtcgaagcgaaacaagtggcgcagcaggaggcggaaagggcaagattcgtggtggaaaaagcggaacaacaaaaaaaggccgcaatcatctctgcatag

SEQ ID NO: 130403 - DNA, 615 bp, Artificial Sequence
  derived and/or modified sequence
atggccgccaaggtgttcgagagcatcggcaagttcggcctggccctagctgtggctggcggagttgtcaatagtgccctatataacgtggatgctggccatagggcagtgatctttgatcgtttccgcggcgttcaggatatcgtggtgggcgaaggtacccactttctaatcccttgggttcagaagcctattatttttgattgcagatcacgtccccgcaatgttccagtgatcaccgggagtaaagatctccagaatgtcaatatcacactgcgtatcttgttccgtcccgtcgctagccaacttcccagaatctttacttccattggggaggactatgatgaaagagtcctgcccagcattacaacagaaatcctgaagagcgtggtggccagatttgatgctggagaactgatcacacagcgcgaactcgtcagccggcaggtcagtgacgatctaactgagcgggcggccactttcgggcttatcctggacgacgtctcactgactcacctgacattcggcaaagagttcacagaggcagtagaagctaaacaagtggctcagcaagaggcggagcgggcgcgttttgtcgtagagaaggtaagctag

SEQ ID NO: 130404 - DNA, 819 bp, Artificial Sequence
  derived and/or modified sequence
atggctgctaaagtattcgagagtatcggcaagttcggtctggctctcgcagtagctgggggtgtggttaactctgcactttataacgtcgacgctgggcacagagccgtgatcttcgatcgcttcagaggagtgcaggacatcgtggtcggggagggcacccattttcttatcccctgggtgcaaaagcccattatattcgactgccgtagccggcctagaaacgtgccggtgattaccggatcaaaagatctgcagaatgttaacataacattgcgtatcttgttccggcctgtggccagccagctcccacgaattttcacgagcattggcgaggactacgacgaaagggtattgcccagtatcaccacagaaatcttgaaaagtgtagttgccagattcgacgcaggcgaactcattacccagcgggaactcgtctctcgccaggtgtctgatgacctcaccgaacgagctgccacatttggcctgattctggatgacgtgtcattgacccatctcacatttgggaaagagtttactgaagctgttgaagctaagcaggtggcgcaacaggaggcagagagagcaaggtttgtggttgaaaaagctgaacaacagaagaaagccgcaatcatttcagctgagggtgactctaaggctgctgaactgatcgctaattcgctcgccactgctggggacggcctgattgagctcaggaaattggaggctgcagaagacattgcatatcaactgagcaggtcaagaaacatcacctaccttcctgcaggtcagagcgtactgcttcagttgccccagtag

SEQ ID NO: 130405 - DNA, 741 bp, Artificial Sequence
  derived and/or modified sequence
atggccgcaaaggttttcgaatccatcgggaaatttgggttagccctggctgtcgcaggtggcgtggtgaatagcgctctgtacaatgtggacgccggtcaccgcgctgtaatctttgaccggttccgaggagtccaggacattgtggtcggggagggtactcattttctgattccttgggttcaaaagcctattatcttcgattgccgatctcgtccaagaaacgtgcctgtcattactggcagcaaggatctgcaaaacgtgaatattaccctgcgcatcctgttccgacctgtggcttcacagttgccccgaatatttaccagcatcggcgaggactatgacgagagagttctaccctcaataactactgagattctcaaatccgtggttgccaggtttgatgcgggagaactcatcacccaacgggagctggtttcacggcaggtcagcgatgatttaactgaaagagccgctacattcggcctgatcctggacgatgtatcgctgacacaccttacctttggcaaggaattcacggaggccgtggaggcgaaacaagtggcacagcaggaggctgaacgggctcgttttgttgtcgagaaagccgaacagcaaaagaaagctgcaatcatctctgccgaaggagattcaaaggcagccgaactgatcgcaaactcacttgctacagccggtgatggactgatagagttaaggaagcttgaagccgcagaggactag

SEQ ID NO: 130406 - DNA, 606 bp, Artificial Sequence
  derived and/or modified sequence
atggccgctaaggtgttcgaaagcatcggcaagttcgggctcgcgcttgcagtagcaggaggggttgtgaattccgctctttataatgtggacgccggtcaccgggctgtgatctttgacagattccgaggggtccaggacatagttgtcggtgagggtactcactttcttattccgtgggtgcagaaaccaattatttttgattgtcgctccagacctaggaacgtccccgtcataactggatcaaaagacctccaaaacgtgaacattaccctaaggatcctgtttcgacccgtcgccagccagcttccacggatttttacaagcataggtgaagattatgatgagagggttctgccgtctatcaccaccgagattctgaagtctgtggttgctcgatttgatgccggagaattaatcacacagagagagctcgtgtcacgtcaagtttccgacgacctaacagagcgcgcagctactttcggcctcatcctagacgacgtgtcactaactcatctgaccttcggcaaagaattcacagaggcagtggaggcaaagcaggtggcccaacaggaagctgagcgggcaaggttcgtagtggaatag

SEQ ID NO: 130407 - DNA, 645 bp, Artificial Sequence
  derived and/or modified sequence
atggctgccaaggtctttgagagtatcgggaaatttggtctggcactggccgtcgcgggaggtgtagtgaactccgctctttataacgtggatgctgggcatcgcgcagtcatttttgaccgtttcaggggcgttcaggatatagtcgtgggtgaagggacacactttctgatcccctgggttcagaagcctataatttttgactgtcggtcgcgaccgaggaatgtgccggtcatcacaggaagcaaggacctccaaaacgtgaacatcactctcaggatcctgtttcgccctgtggctagccagctgccacggattttcacaagcattggggaggattatgacgaaagagtgctgccatccatcacgaccgaaatcttgaagagtgtggtggctcgattcgacgccggagagttgataacacagagagagctagtttcacgtcaagttagcgacgacctgactgaacgagccgctaccttcggtctgatcttagatgacgtgagcttgacccatctaaccttcgggaaggaatttaccgaggctgtagaggctaagcaagttgcccagcaagaagccgaaagagcacgttttgtcgtcgagaaagcagagcaacagaaaaaggctgcaatcattagtgcctag

SEQ ID NO: 130408 - DNA, 615 bp, Artificial Sequence
  derived and/or modified sequence
atggcagccaaagtgttcgaatccattggaaagttcggacttgctttggcagtagccggaggtgtggtgaacagtgcactctataacgtggatgccggacacagagcagtaatattcgatagattccgaggcgttcaagatatcgtggttggggaaggcactcactttctcattccctgggtgcaaaagcccatcatctttgactgcagaagccggccacgtaacgtcccggtcattacaggctctaaggatctacaaaacgttaacataacactgcggattctgttcaggcccgttgccagccaactcccgagaatcttcacctctattggtgaggactatgacgaaagagtgctgccgtctattaccaccgaaatcctgaaaagcgtggttgcacgctttgatgctggtgagcttattactcaacgggagctcgtcagtcgtcaggtgtccgacgacctgacagagcgggctgctaccttcgggttaatcctcgatgacgtctccttgacccatctcacttttggtaaagagtttaccgaagctgtcgaagcaaaacaggtcgcccagcaggaagctgagcgagctcggttcgtcgttgaaaaggtgtcttag

SEQ ID NO: 130409 - DNA, 1832 bp, Artificial Sequence
  derived and/or modified sequence
agtatgtgtggttggggaattcatgtggaggtcagagtggaagcaggtgtgagagggtccagcagaaggaaacatggctgccaaagtgtttgagtccattggcaagtttggcctggccttagctgttgcaggaggcgtggtgaactctgccttatataatgtggatgctgggcacagagctgtcatctttgaccgattccgtggagtgcaggacattgtggtaggggaagggactcattttctcatcccgtgggtacagaaaccaattatctttgactgccgttctcgaccacgtaatgtgccagtcatcactggtagcaaagatttacagaatgtcaacatcacactgcgcatcctcttccggcctgtcgccagccagcttcctcgcatcttcaccagcatcggagaggactatgatgagcgtgtgctgccgtccatcacaactgagatcctcaagtcagtggtggctcgctttgatgctggagaactaatcacccagagagagctggtctccaggcaggtgagcgacgaccttacagagcgagccgccacctttgggctcatcctggatgacgtgtccttgacacatctgaccttcgggaaggagttcacagaagcggtggaagccaaacaggtggctcagcaggaagcagagagggccagatttgtggtggaaaaggctgagcaacagaaaaaggcggccatcatctctgctgagggcgactccaaggcagctgagctgattgccaactcactggccactgcaggggatggcctgatcgagctgcgcaagctggaagctgcagaggacatcgcgtaccagctctcacgctctcggaacatcacctacctgccagcggggcagtccgtgctcctccagctgccccagtgagggcccaccctgcctgcacctccgcgggctgactgggccacagccccgatgattcttaacacagccttccttctgctcccaccccagaaatcactgtgaaatttcatgattggcttaaagtgaaggaaataaaggtaaaatcacttcagatctctaattagtctatcaaatgaaactctttcattcttctcacatccatctacttttttatccacctccctaccaaaaattgccaagtgcctatgcaaaccagctttaggtcccaattcggggcctgctggagttccggcctgggcaccagcatttggcagcacgcaggcggggcagtatgtgatggactggggagcacaggtgtctgcctagatccacgtgtggcctccgtcctgtcactgatggaaggtttgcggatgagggcatgtgcggctgaactgagaaggcaggcctccgtcttcccagcggttcctgtgcagatgctgctgaagagaggtgccggggaggggcagagaggaagtggtctgtctgttaccataagtctgattctctttaactgtgtgaccagcggaaacaggtgtgtgtgaactgggcacagattgaagaatctgcccctgttgaggtgggtgggcctgactgttgccccccagggtcctaaaacttggatggacttgtatagtgagagaggaggcctggaccgagatgtgagtcctgttgaagacttcctctctaccccccaccttggtccctctcagatacccagtggaattccaacttgaaggattgcatcctgctggggctgaacatgcctgccaaagacgtgtccgacctacgttcctggccccctcattcagagactgcccttctcacgggctctatgcctgcactgggaaggaaacaaatgtgtataaactgctgtcaataaatgacacccagaccttccggctca

SEQ ID NO: 130410 - DNA, 907 bp, Artificial Sequence
  derived and/or modified sequence
gcgcagtatgtgtggttggggaattcatgtggaggtcagagtggaagcagttatcttggccccaggatgtcatccagctcctgcttccataagaagcatgtcgttcttaatacacgatgttgacaagcagtatggtgaggaggtgtgagagggtccagcagaaggaaacatggctgccaaagtgtttgagtccattggcaagtttggcctggccttagctgttgcaggaggcgtggtgaactctgccttatataatgtggatgctgggcacagagctgtcatctttgaccgattccgtggagtgcaggacattgtggtaggggaagggactcattttctcatcccgtgggtacagaaaccaattatctttgactgccgttctcgaccacgtaatgtgccagtcatcactggtagcaaagatttacagaatgtcaacatcacactgcgcatcctcttccggcctgtcgccagccagcttcctcgcatcttcaccagcatcggagaggactatgatgagcgtgtgctgccgtccatcacaactgagatcctcaagtcagtggtggctcgctttgatgctggagaactaatcacccagagagagctggtctccaggcaggtgagcgacgaccttacagagcgagccgccacctttgggctcatcctggatgacgtgtccttgacacatctgaccttcgggaaggagttcacagaagcggtggaagccaaacaggtggctcagcaggaagcagagagggccagatttgtggtggaaaaggctgagcaacagaaaaaggcggccatcatctctgctgagggcgactccaaggcagctgagctgattgccaactcactggccactgcaggggatggcctgatcgagctgcgcaagctggaagctgcagaggac

SEQ ID NO: 130411 - DNA, 732 bp, Artificial Sequence
  derived and/or modified sequence
cagagtggaagcaggtgagaatggagggggcggcaaaggctcgtttctgggcatctctgcagtcctcctctgctccatgatgtgcactttgggcgaggagagtgtgagagggtccagcagaaggaaacatggctgccaaagtgtttgagtccattggcaagtttggcctggccttagctgttgcaggaggcgtggtgaactctgccttatataatgtggatgctgggcacagagctgtcatctttgaccgattccgtggagtgcaggacattgtggtaggggaagggactcattttctcatcccgtgggtacagaaaccaattatctttgactgccgttctcgaccacgtaatgtgccagtcatcactggtagcaaagatttacagaatgtcaacatcacactgcgcatcctcttccggcctgtcgccagccagcttcctcgcatcttcaccagcatcggagaggactatgatgagcgtgtgctgccgtccatcacaactgagatcctcaagtcagtggtggctcgctttgatgctggagaactaatcacccagagagagctggtctccaggcaggtgagcgacgaccttacagagcgagccgccacctttgggctcatcctggatgacgtgtccttgacacatctgaccttcgggaaggagttcacagaagcggtggaagccaaacaggtggctcagcaggaagcagagagggccagatttgtggtggaaa

SEQ ID NO: 130412 - DNA, 796 bp, Artificial Sequence
  derived and/or modified sequence
atgtggaggtcagagtggaagcaggtgagaatggagggggcggcaaaggctcgtttctgggcatctctgcagtcctcctctgctccatgatgtgcactttgggcgaggagagtgcgtgcgtgtgagagggtccagcagaaggaaacatggctgccaaagtgtttgagtccattggcaagtttggcctggccttagctgttgcaggaggcgtggtgaactctgccttatataatgtggatgctgggcacagagctgtcatctttgaccgattccgtggagtgcaggacattgtggtaggggaagggactcattttctcatcccgtgggtacagaaaccaattatctttgactgccgttctcgaccacgtaatgtgccagtcatcactggtagcaaagatttacagaatgtcaacatcacactgcgcatcctcttccggcctgtcgccagccagcttcctcgcatcttcaccagcatcggagaggactatgatgagcgtgtgctgccgtccatcacaactgagatcctcaagtcagtggtggctcgctttgatgctggagaactaatcacccagagagagctggtctccaggcaggtgagcgacgaccttacagagcgagccgccacctttgggctcatcctggatgacgtgtccttgacacatctgaccttcgggaaggagttcacagaagcggtggaagccaaacaggtggctcagcaggaagcagagagggccagatttgtggtggaaaaggctgagcaacagaaaaaggcggccatcatctctgctgagggcga

SEQ ID NO: 130413 - DNA, 700 bp, Artificial Sequence
  derived and/or modified sequence
ctgggcatctctgcagtcctcctctgctccatgatgtgcactttgggcgaggagagtgcgtgtgtgagagggtccagcagaaggaaacatggctgccaaagtgtttgagtccattggcaagtttggcctggccttagctgttgcaggaggcgtggtgaactctgccttatataatgtggatgctgggcacagagctgtcatctttgaccgattccgtggagtgcaggacattgtggtaggggaagggactcattttctcatcccgtgggtacagaaaccaattatctttgactgccgttctcgaccacgtaatgtgccagtcatcactggtagcaaagatttacagaatgtcaacatcacactgcgcatcctcttccggcctgtcgccagccagcttcctcgcatcttcaccagcatcggagaggactatgatgagcgtgtgctgccgtccatcacaactgagatcctcaagtcagtggtggctcgctttgatgctggagaactaatcacccagagagagctggtctccaggcaggtgagcgacgaccttacagagcgagccgccacctttgggctcatcctggatgacgtgtccttgacacatctgaccttcgggaaggagttcacagaagcggtggaagccaaacaggtggctcagcaggaagcagagagggccagatttgtggtggaaaaggtgagc

SEQ ID NO: 130414 - DNA, 819 bp, Artificial Sequence
  derived and/or modified sequence
atggccgccaaggtgttcgagagcatcggcaagttcggcctggccctggccgtggccggcggcgtggtgaacagcgccctgtacaacgtggacgccggccacagagccgtgatcttcgacagattcagaggcgtgcaggacatcgtggtgggcgagggcacccacttcctgatcccctgggtgcagaagcccatcatcttcgactgcagaagcagacccagaaacgtgcccgtgatcaccggcagcaaggacctgcagaacgtgaacatcaccctgagaatcctgttcagacccgtggccagccagctgcccagaatcttcaccagcatcggcgaggactacgacgagagagtgctgcccagcatcaccaccgagatcctgaagagcgtggtggccagattcgacgccggcgagctgatcacccagagagagctggtgagcagacaggtgagcgacgacctgaccgagagagccgccaccttcggcctgatcctggacgacgtgagcctgacccacctgaccttcggcaaggagttcaccgaggccgtggaggccaagcaggtggcccagcaggaggccgagagagccagattcgtggtggagaaggccgagcagcagaagaaggccgccatcatcagcgccgagggcgacagcaaggccgccgagctgatcgccaacagcctggccaccgccggcgacggcctgatcgagctgagaaagctggaggccgccgaggacatcgcctaccagctgagcagaagcagaaacatcacctacctgcccgccggccagagcgtgctgctgcagctgccccagtag

SEQ ID NO: 130415 - DNA, 741 bp, Artificial Sequence
  derived and/or modified sequence
atggccgccaaggtgttcgagagcatcggcaagttcggcctggccctggccgtggccggcggcgtggtgaacagcgccctgtacaacgtggacgccggccacagagccgtgatcttcgacagattcagaggcgtgcaggacatcgtggtgggcgagggcacccacttcctgatcccctgggtgcagaagcccatcatcttcgactgcagaagcagacccagaaacgtgcccgtgatcaccggcagcaaggacctgcagaacgtgaacatcaccctgagaatcctgttcagacccgtggccagccagctgcccagaatcttcaccagcatcggcgaggactacgacgagagagtgctgcccagcatcaccaccgagatcctgaagagcgtggtggccagattcgacgccggcgagctgatcacccagagagagctggtgagcagacaggtgagcgacgacctgaccgagagagccgccaccttcggcctgatcctggacgacgtgagcctgacccacctgaccttcggcaaggagttcaccgaggccgtggaggccaagcaggtggcccagcaggaggccgagagagccagattcgtggtggagaaggccgagcagcagaagaaggccgccatcatcagcgccgagggcgacagcaaggccgccgagctgatcgccaacagcctggccaccgccggcgacggcctgatcgagctgagaaagctggaggccgccgaggactag

SEQ ID NO: 130416 - DNA, 606 bp, Artificial Sequence
  derived and/or modified sequence
atggccgccaaggtgttcgagagcatcggcaagttcggcctggccctggccgtggccggcggcgtggtgaacagcgccctgtacaacgtggacgccggccacagagccgtgatcttcgacagattcagaggcgtgcaggacatcgtggtgggcgagggcacccacttcctgatcccctgggtgcagaagcccatcatcttcgactgcagaagcagacccagaaacgtgcccgtgatcaccggcagcaaggacctgcagaacgtgaacatcaccctgagaatcctgttcagacccgtggccagccagctgcccagaatcttcaccagcatcggcgaggactacgacgagagagtgctgcccagcatcaccaccgagatcctgaagagcgtggtggccagattcgacgccggcgagctgatcacccagagagagctggtgagcagacaggtgagcgacgacctgaccgagagagccgccaccttcggcctgatcctggacgacgtgagcctgacccacctgaccttcggcaaggagttcaccgaggccgtggaggccaagcaggtggcccagcaggaggccgagagagccagattcgtggtggagtag

SEQ ID NO: 130417 - DNA, 645 bp, Artificial Sequence
  derived and/or modified sequence
atggccgccaaggtgttcgagagcatcggcaagttcggcctggccctggccgtggccggcggcgtggtgaacagcgccctgtacaacgtggacgccggccacagagccgtgatcttcgacagattcagaggcgtgcaggacatcgtggtgggcgagggcacccacttcctgatcccctgggtgcagaagcccatcatcttcgactgcagaagcagacccagaaacgtgcccgtgatcaccggcagcaaggacctgcagaacgtgaacatcaccctgagaatcctgttcagacccgtggccagccagctgcccagaatcttcaccagcatcggcgaggactacgacgagagagtgctgcccagcatcaccaccgagatcctgaagagcgtggtggccagattcgacgccggcgagctgatcacccagagagagctggtgagcagacaggtgagcgacgacctgaccgagagagccgccaccttcggcctgatcctggacgacgtgagcctgacccacctgaccttcggcaaggagttcaccgaggccgtggaggccaagcaggtggcccagcaggaggccgagagagccagattcgtggtggagaaggccgagcagcagaagaaggccgccatcatcagcgcctag

SEQ ID NO: 130418 - DNA, 615 bp, Artificial Sequence
  derived and/or modified sequence
atggccgccaaggtgttcgagagcatcggcaagttcggcctggccctggccgtggccggcggcgtggtgaacagcgccctgtacaacgtggacgccggccacagagccgtgatcttcgacagattcagaggcgtgcaggacatcgtggtgggcgagggcacccacttcctgatcccctgggtgcagaagcccatcatcttcgactgcagaagcagacccagaaacgtgcccgtgatcaccggcagcaaggacctgcagaacgtgaacatcaccctgagaatcctgttcagacccgtggccagccagctgcccagaatcttcaccagcatcggcgaggactacgacgagagagtgctgcccagcatcaccaccgagatcctgaagagcgtggtggccagattcgacgccggcgagctgatcacccagagagagctggtgagcagacaggtgagcgacgacctgaccgagagagccgccaccttcggcctgatcctggacgacgtgagcctgacccacctgaccttcggcaaggagttcaccgaggccgtggaggccaagcaggtggcccagcaggaggccgagagagccagattcgtggtggagaaggtgagctag

SEQ ID NO: 130419 - protein, 361 aa, Artificial Sequence
  derived and/or modified sequence
MFSSVAHLARANPFNTPHLQLVHDGLGDLRSSSPGPTGQPRRPRNLAAAAVEEYSCEFGSAKYYALCGFGGVLSCGLTHTAVVPLDLVKCRMQVDPQKYKGIFNGFSVTLKEDGVRGLAKGWAPTFLGYSMQGLCKFGFYEVFKVLYSNMLGEENTYLWRTSLYLAASASAEFFADIALAPMEAAKVRIQTQPGYANTLRDAAPKMYKEEGLKAFYKGVAPLWMRQIPYTMMKFACFERTVEALYKFVVPKPRSECSKPEQLVVTFVAGYIAGVFCAIVSHPADSVVSVLNKEKGSSASLVLKRLGFKGVWKGLFARIIMIGTLTALQWFIYDSVKVYFRLPRPPPPEMPESLKKKLGLTQ

SEQ ID NO: 130420 - DNA, 1086 bp, Artificial Sequence
  derived and/or modified sequence
atgttttcgtccgtcgcccatctggctagggcgaatccctttaatactccccacctgcagttggtgcacgatggtctcggtgatctccggagcagctccccagggcccaccggccaacccagacgtccacgcaatctggctgccgctgcagtcgaagaatactcctgtgagttcggatccgcgaaatactatgcgctttgcggctttggaggggtgctgtcatgtggcctgacacataccgccgtcgtgccattagatctagtcaagtgtcggatgcaggttgatccacagaagtataaaggtatattcaatggattctcagttactttgaaggaggatggcgtgaggggcttggctaagggttgggccccaacatttttaggctactcgatgcaaggactgtgcaagtttggtttctacgaggtctttaaggtcctttactccaacatgctcggagaagaaaacacatacctctggcgcaccagtctgtacttagctgcctctgcttcagccgaattcttcgcagacatagccctggcccccatggaggccgccaaggtgagaatccaaacacagcctgggtatgcgaatacacttcgcgacgccgctcccaagatgtacaaagaggaaggactgaaagcattctataagggcgttgcgccgctttggatgcggcagatcccatacaccatgatgaagttcgcctgcttcgaaagaactgtcgaggctctgtacaagttcgtggtgcccaaacccaggtcagaatgcagtaaacctgagcagttggtggtgacatttgtggccggctacatcgccggcgtgttctgcgcaattgtgtcacaccctgccgacagtgtcgtctccgtgcttaataaggagaagggttcgagtgcatcactcgtcttaaagcgccttggatttaaaggggtctggaaaggactttttgcccgtattattatgattggaacactgacagctctccagtggttcatttacgattccgtgaaggtgtactttagactgcctcgcccgcctccacccgagatgcctgaatctttaaagaaaaaactgggactgacccaatag

SEQ ID NO: 130421 - DNA, 1086 bp, Artificial Sequence
  derived and/or modified sequence
atgttttcttcagtggcccacttagccagggcaaatcccttcaacacaccgcacctccagctggtacatgatgggttgggagacctgcgctctagctctcctgggcctaccgggcagccaagaagaccacgaaaccttgctgccgccgctgtggaagagtacagttgtgagtttgggtcggcaaagtattacgccttatgcggttttggtggcgttctgtcctgcggcctgacccacacggctgtggtcccgcttgatctggtgaaatgcagaatgcaggtcgaccctcagaagtacaagggtattttcaatgggttttccgtgacgttgaaagaggatggggtccgcggactggccaaaggctgggccccgaccttcctgggctatagtatgcagggcctctgtaagtttgggttctatgaagttttcaaggttctctactctaatatgttgggcgaagaaaacacctacctgtggaggacaagcctctacttagccgcctcagcctctgcagagttcttcgccgacatcgcacttgcccccatggaggccgccaaagtcagaattcagacgcaaccaggttacgcaaatactcttagggatgcggcacccaagatgtacaaagaggagggtctcaaagcgttttataaaggggtggctcctctgtggatgcggcagattccctatacaatgatgaaatttgcatgctttgagagaaccgtggaagctctgtacaaatttgtcgtgcccaagccgaggagcgagtgcagtaagccagagcaactggtggtgacttttgtggcagggtatatcgctggagtattttgcgccatcgtgtcgcaccctgccgattcggtggtgtcggtgttgaataaggaaaaaggctcttcggcaagcctggtcctgaagcgacttggattcaaaggtgtgtggaaaggattgtttgcccgcatcattatgatcggcactctgacggctcttcagtggttcatctacgattccgtaaaagtctattttcggttgccgagaccacctccgcccgaaatgccagagtccctgaagaaaaagcttggactcacccaatag

SEQ ID NO: 130422 - DNA, 1086 bp, Artificial Sequence
  derived and/or modified sequence
atgttctcttccgtagcacaccttgcccgggctaacccctttaacacccctcacctacaactggttcacgacgggttgggggaccttagaagttcatccccgggtcccaccggacaaccccggcgccctcggaacttggccgcagctgcagttgaagagtactcatgtgagtttggatccgccaaatactatgcgctgtgcgggttcgggggcgtcttgagctgtggcttgacacacaccgctgttgttcctctcgatctcgtcaaatgtaggatgcaagtcgaccctcagaaatataaagggatcttcaatggtttctctgtgacacttaaggaagatggtgttcgtggcctcgcaaaagggtgggcacccaccttcttaggatattcaatgcagggtctgtgcaagttcggtttttatgaagtcttcaaagtcctttactcaaatatgttgggagaggagaatacatacctgtggaggaccagcctgtatctggccgcgtccgcatctgctgaatttttcgctgatattgcactagctccaatggaggctgccaaggtgcgcatccaaacccagcctggctacgccaacactctccgtgacgccgcacccaagatgtacaaggaggaggggctaaaagccttttacaagggcgttgccccactttggatgagacagatcccctacacaatgatgaagtttgcttgcttcgaacgtaccgtcgaagccttgtacaaattcgtcgtccctaagccacggtcagagtgctctaagcccgagcagctggtggtgacgttcgtggccggatacatcgccggggtgttctgtgcaattgtctcccatcccgcagattctgtggtgtcagtgctgaacaaagaaaaggggagctccgcttcactggtacttaagagactcggctttaaaggggtctggaaaggtctcttcgcccggattattatgatagggacgctgacggccttacagtggtttatttatgattctgtgaaggtgtacttcagactaccccgtccccctccgccagaaatgccagaaagcctgaaaaaaaaactgggcctcacacaatag

SEQ ID NO: 130423 - DNA, 1086 bp, Artificial Sequence
  derived and/or modified sequence
atgttttctagcgtcgcacacctcgccagagccaacccctttaataccccacacctgcagctggtacatgacggccttggagacctccgcagctccagtccaggccctactggacaacctcgcagacctaggaacttggccgccgcagcggtggaagagtattcttgcgagtttggaagcgctaaatattacgccctgtgcgggttcgggggagtgctgagctgcggcctaacccacactgcagtcgtgccgctcgaccttgttaagtgccgcatgcaggttgatccccagaaatataagggcatatttaacggcttctctgtgactctcaaagaggacggcgttagagggctggccaagggttgggcccctaccttcttagggtactcgatgcagggtctatgcaaatttgggttttacgaggtgttcaaggtactatatagtaacatgttgggtgaagagaacacatacctgtggagaaccagcctgtatctggccgcgagtgctagtgcagaattttttgccgacatcgccctggcacccatggaagccgccaaggttcgaatccagacgcagcctgggtacgctaacactctccgcgacgccgcacctaagatgtacaaagaggaggggctcaaagcattctataagggagttgccccgctctggatgagacaaataccctacactatgatgaaattcgcctgctttgaaaggactgtggaggcgctctataagttcgtcgtgcctaaaccacgctcggagtgcagcaagcccgagcagttagtcgtgacctttgtggccggttatatagcaggggtcttctgcgccatcgtctcccatccggcggattctgtggtttctgtgctgaacaaggaaaaggggagctctgcatccctcgtgctaaagagactcggttttaagggagtgtggaaagggcttttcgctcggattatcatgataggcaccctcaccgctctgcagtggttcatctacgattccgtaaaggtgtatttccgcctgccacggcctcctccacctgaaatgccagagtctctgaaaaagaaacttgggctgactcagtag

SEQ ID NO: 130424 - DNA, 1086 bp, Artificial Sequence
  derived and/or modified sequence
atgttcagctctgtggcccacctggcccgggccaaccccttcaacaccccccacctgcagctggtgcatgatggcctgggggacctgcggagcagcagccctggccccaccggccagccccggcggcccaggaacctggccgctgctgctgtggaggagtacagctgtgaatttggcagcgccaagtactatgccctgtgtggctttggaggagtgctgagctgtggcctgacccacacagctgtggtgcccctggacctggtgaagtgcaggatgcaggtggacccccagaagtacaagggcatcttcaacggcttctctgtgaccctgaaggaggatggagtgcggggcctggccaagggctgggcccccaccttcctgggctacagcatgcagggcctgtgcaagtttggcttctatgaggtgttcaaggtgctgtacagcaacatgctgggggaggagaacacctacctgtggaggaccagcctgtacctggccgccagcgccagcgctgagttctttgctgacatcgccctggcccccatggaggccgccaaggtgcgcatccagacccagcccggctacgccaacaccctgagagatgctgcccccaagatgtacaaggaggagggcctgaaggccttctacaagggcgtggcccccctgtggatgaggcagatcccctacaccatgatgaagtttgcctgctttgagaggacagtggaggccctgtacaagtttgtggtgcccaagcccaggagtgaatgttccaagccagagcagctggtggtgacctttgtggccggctacatcgccggggtcttctgtgccatcgtgagccaccctgctgacagcgtggtgtctgtgctgaacaaggagaagggcagcagcgccagcctggtgctgaagaggctgggcttcaagggcgtgtggaagggcctgtttgcccgcatcatcatgattggcaccctgacagccctgcagtggttcatctatgacagcgtgaaggtgtacttccggctgccccggcccccacctcctgagatgcctgagagcctgaagaagaagctgggcctgacccagtag

SEQ ID NO: 130425 - DNA, 1086 bp, Artificial Sequence
  derived and/or modified sequence
atgttcagcagcgtggcccacctggcccgggccaaccccttcaacacgccgcacttgcaattagtccacgacggcctgggggacctccgatctagctcacccggacctacaggccagccgagacgaccacgcaatctggccgctgctgccgtggaggagtatagctgcgagtttgggagcgccaaatactatgccttatgcggcttcggcggcgtattgtcatgcggcttaacacacaccgcagtggtcccattggaccttgtaaagtgccggatgcaggtcgacccacagaaatacaaaggcatttttaacggcttttccgttaccctgaaggaagacggagtgagaggattggccaagggatgggccccaacttttctgggatattcgatgcaggggctctgcaaatttggcttttatgaggtcttcaaggtgctgtacagcaatatgcttggggaggagaatacatacctatggcggacaagtctttacctcgctgcaagcgcctctgctgaattctttgccgacatagcactcgctccgatggaggcagcaaaggttagaatccaaacccagcccgggtacgctaatactttgcgggatgccgccccgaagatgtataaagaagagggactgaaggcattttataagggggttgctcccctgtggatgcggcaaatcccttataccatgatgaaattcgcttgctttgaacggaccgtggaggcgttgtacaagtttgtggtaccaaagccaagaagcgaatgcagtaagccggagcagctggtggtgaccttcgttgctggctatattgccggcgtgttctgcgccatcgtgtcccatccagctgactccgttgtctctgtgctcaataaggagaaagggtccagtgcctccctcgtcttaaagcgcctgggattcaagggggtgtggaagggactgtttgcccggatcatcatgattggcacactgacagctttacaatggttcatttacgatagcgtgaaggtgtactttagactgccaagaccccctcccccagaaatgcctgaatctctgaagaaaaagctggggcttacccagtag

SEQ ID NO: 130426 - DNA, 1086 bp, Artificial Sequence
  derived and/or modified sequence
atgttcagcagcgtggcccacctggcccgggccaaccccttcaacaccccacatttacagctggtgcatgacggtctcggagacctacgcagttccagtcccggtcctactgggcagccccggcgacctaggaacctcgctgccgcagccgtggaagagtacagttgcgaatttggcagcgctaagtactacgccttgtgtggatttggaggtgtactatcttgcgggctgacacataccgccgtagtcccactggatcttgttaaatgcaggatgcaggtcgaccctcagaagtataagggtatcttcaacggcttctcggtaacactgaaggaagatggagtgcgtgggttggccaaggggtgggccccgacctttctggggtactccatgcaggggctatgcaagttcggcttttatgaagtcttcaaggtgctgtatagtaatatgcttggcgaagagaacacctatttgtggcggactagtctgtatttagcagcttcagcctctgccgagttttttgcagacatcgctctggcaccaatggaagctgccaaagtgagaattcagacccagcctggctatgctaatacactgagagacgccgctcccaagatgtacaaagaggaaggattaaaggctttttataagggagtcgcacccctgtggatgaggcagattccttacacaatgatgaagttcgcctgcttcgagagaactgtggaggctctttacaagttcgtggtgcccaagcccaggagcgagtgttccaaaccagaacaactggtcgtgacattcgtcgctggatacatcgcgggcgtattctgtgccatcgtgtcccaccctgccgattccgtcgtctccgtactcaataaggagaagggcagcagcgcttcactggttctgaaaaggctggggtttaaaggggtttggaaaggcctcttcgcaagaatcatcatgatcgggactttgactgcgctacagtggttcatttatgactcagtgaaagtttattttcggttgcccagaccgccacctcccgagatgcccgagagtttaaagaagaagctgggcttaacccaatag

SEQ ID NO: 130427 - DNA, 1086 bp, Artificial Sequence
  derived and/or modified sequence
atgttcagcagcgtggcccacctggcccgggccaaccccttcaacactcctcacttacagttagtgcacgatgggctgggagacctcagaagcagcagtccaggccctaccgggcagcccagaaggcctcgcaacctcgcagcagctgcagtcgaagagtactcttgtgagttcgggtccgcgaaatattacgctctttgcgggttcggcggagtactgtcttgcgggctcacacatacagcagtggtccctctggatctggtgaaatgtaggatgcaggtggaccctcagaaatataaggggatcttcaatggattctcagtcacactgaaggaggatggggtgagaggattggccaaggggtgggcaccaaccttcttgggttatagcatgcaggggctttgcaaatttggcttctacgaagtgttcaaggtcctctactccaacatgctgggagaagagaacacttacctgtggcgcacctcattgtatctggccgcaagcgctagcgcagaatttttcgctgatatcgcattggcccccatggaggcggccaaagttcgaatccagacccaacccgggtacgcaaacactctacgggatgcagcacccaagatgtataaggaggaaggactaaaggccttttacaagggagtcgcccccctgtggatgaggcaaattccctacacaatgatgaagtttgcatgttttgagaggaccgtggaggcgctatacaagttcgtggttccaaaacctcgatctgaatgtagtaagccggagcagctggttgtgacgttcgtagctggatacatagcgggggtgttctgtgcgatagttagccacccggccgactctgtcgtatctgtgttgaacaaagagaaggggagctcagcgtccctggtgctgaagcgactaggatttaagggagtgtggaaaggcctttttgccagaatcattatgataggcaccctcactgctttgcagtggttcatttacgactctgtcaaggtgtacttccggttgcctaggccccctcctcccgagatgccagagtccctgaagaagaagctaggcctcacacagtag

SEQ ID NO: 130428 - DNA, 1086 bp, Artificial Sequence
  derived and/or modified sequence
atgttcagcagcgtggcccacctggcccgggccaaccccttcaacacaccccatttgcaactcgtgcacgatggcctcggcgacttgcggtcaagttcccctggcccaactggccagccacgccggcctaggaacctggccgccgcagcagtggaagaatactcatgcgaattcgggtccgccaaatattatgccctgtgcggtttcggtggagtgctttcatgcgggctgacacacacggccgtcgtgccgttggacctcgtgaaatgtcgcatgcaggttgacccccagaagtataaaggtattttcaatggtttctctgttacactgaaggaggacggcgtccgtgggctcgcgaagggttgggctcctacttttctagggtattccatgcagggtttatgcaaattcggattctatgaggtgtttaaagtgctgtattccaatatgttgggagaggaaaacacctatctgtggcgtacctccctctacctggccgccagtgctagtgcagaattcttcgcggacatcgctctcgccccaatggaagccgccaaagtgagaatccaaactcagccaggctacgcaaacacacttcgcgacgcggccccaaagatgtacaaggaggagggcctgaaagctttttataagggcgtggctccgctgtggatgcgacaaattccgtacaccatgatgaaatttgcttgcttcgaacggacggtggaggcattgtacaaattcgttgtgcctaaaccacggtctgagtgctccaaaccagagcagctggtggtcacattcgttgccggctatattgcgggagttttctgtgctatcgtgagccatccagcggactctgtggtctctgtgctgaataaagaaaagggcagctcggcctccctggttctgaaacggctcgggttcaaaggcgtttggaagggtctgttcgctcggatcataatgattggaacactaacagccctgcagtggtttatttacgactcagtcaaggtgtacttccgattgccccgaccacccccacccgagatgccagaaagcctgaaaaagaagctagggctgacccagtag

SEQ ID NO: 130429 - DNA, 1086 bp, Artificial Sequence
  derived and/or modified sequence
atgtttagttccgtggcccacctggctagggccaatcccttcaacaccccacatctgcagctggtgcatgatgggctaggagatctgagatcgagctctccaggtccaacaggccagcctaggaggcctaggaatctggcggctgcggcagttgaggaatattcctgtgaattcggctccgccaaatattacgctctttgtgggtttggcggagtgttatcttgtggcttaacacataccgccgtggtacctctggacttggtgaagtgccgtatgcaggttgatccccagaaatacaaaggcatcttcaatggctttagtgtcacactcaaagaggacggggtgcgaggactggccaaagggtgggctccgacattcctcggctacagcatgcagggcttatgcaaatttgggttctatgaggtttttaaggtgttgtacagtaatatgttaggtgaagagaatacttacctttggaggacgtcgctgtatctggcagcgagtgctagtgcagagttttttgctgatatcgcactggcgccaatggaggctgccaaggtgaggatccaaacccagcctgggtacgccaacaccttgagggatgcagcccctaaaatgtacaaagaggagggcctgaaggcgttttacaaaggcgtggcacccctgtggatgagacagattccctataccatgatgaagttcgcctgcttcgaacgtacagtggaagcactgtacaagttcgtggtgcctaagccaagaagcgagtgctccaagccagagcagctggtggttacatttgttgccggatatattgctggtgtgttctgcgcaattgtaagtcaccctgccgacagtgtcgtgagtgtgttgaacaaggagaagggttcctccgcttcactcgtcctgaagcgcctcggctttaagggcgtgtggaagggcctgttcgccagaataataatgatcgggacccttacagccctgcagtggttcatatacgatagcgtaaaggtctacttccgtctgcctagacctcctcctccagagatgcctgaaagcctcaagaaaaaacttgggctgacccaatag

SEQ ID NO: 130430 - DNA, 1086 bp, Artificial Sequence
  derived and/or modified sequence
atgttttcttccgtggcccacctagcaagggcaaacccctttaacactcctcaccttcagctagtccatgatggtctcggcgatctgagaagctctagtcctgggccaactggccagcctcgcagacccaggaacctggcggctgctgccgtggaagagtattcttgcgagttcggcagcgcgaagtattacgccctgtgcggttttggaggcgtgctgagctgtggcctgactcacaccgcggtggtccccctggatttggtgaaatgcaggatgcaggtcgacccacagaagtataaagggatatttaacgggttcagcgtgactctgaaagaagatggggtaaggggtctagcaaaagggtgggcgcctacatttctgggttactctatgcaaggcctgtgcaagttcgggttctacgaggtgttcaaggtcctgtacagcaacatgcttggtgaagagaacacatacttgtggagaacatccctttacctggccgctagtgccagtgctgaattttttgccgacattgcattggcccctatggaggctgccaaagtcagaatacagacacaacctggttacgcaaacacacttcgtgacgccgcacccaaaatgtataaggaggagggactgaaggctttttacaaaggtgtcgcgccactgtggatgcgccagataccctatacaatgatgaaatttgcttgcttcgagcgcactgtggaggccctttacaagtttgtggttcctaagccccgttccgagtgttcaaagcctgagcaactggtcgtcacattcgtcgctggttacattgctggagtgttttgcgcaatcgtgagccaccccgctgattctgtggtgtccgtgctcaacaaagaaaagggcagtagcgcaagccttgttctgaaaagattgggctttaaaggtgtctggaaaggactcttcgccaggataattatgattgggacactgacagcactgcagtggtttatttacgactctgtaaaggtctactttcgactgccgcgacccccacccccagaaatgcccgaatctctgaaaaagaagctcggcctgacccagtag

SEQ ID NO: 130431 - DNA, 1086 bp, Artificial Sequence
  derived and/or modified sequence
atgtttagctctgttgctcatctggcacgcgctaaccccttcaataccccgcatcttcaactggtccacgacgggttgggcgacttgaggagcagctctccaggccctactggccagcccagacggccaaggaatcttgctgcggcagcggtggaggaatatagctgcgaattcggatcggctaaatactatgcattatgtggtttcggtggtgttctctcttgcggcctcacacatactgccgtggtccccttagatctggtgaaatgtcgaatgcaggttgacccgcagaaatacaaaggcatttttaatggattctctgtgacccttaaggaggatggtgttagaggcttggccaaggggtgggcccctactttcttggggtactctatgcagggcctgtgcaaattcggcttctacgaggtgttcaaagtgttatacagtaacatgctgggcgaagaaaacacctacctttggagaacctctctttacctcgccgcatcggcgagcgccgaattctttgctgatattgcgctggcgccaatggaagccgctaaggtgcgaattcagacacagcccggatatgcaaacaccttgcgagatgcggctcccaaaatgtacaaagaggaaggactcaaagctttttataagggcgtggctcccctgtggatgagacaaatcccttacacaatgatgaaatttgcatgttttgagaggaccgtggaggctctttacaaatttgtggtgccaaaacccaggagcgagtgtagtaaacccgagcaactcgtcgtaaccttcgtcgcaggatatatcgccggtgtattttgcgctatagtgtctcatccggcagatagtgtagttagtgtcctcaataaagagaaaggcagctccgcgtccctcgtcctgaaacggctgggtttcaaaggggtgtggaagggcttgttcgcccgaatcattatgatcgggactctcacagctctacagtggtttatatatgattcagtgaaggtctattttcgactgccaaggcccccacctcctgaaatgcccgaaagcctcaagaagaagctcggactgacacagtag

SEQ ID NO: 130432 - DNA, 1086 bp, Artificial Sequence
  derived and/or modified sequence
atgttttcctccgtggcccatctcgccagggccaacccatttaataccccacacttgcaattggtgcatgacggtctgggcgatctgcgctcctcctcccctggccctactggccagccacgcagaccaagaaatttggccgcagctgctgtggaggaatattcttgcgaattcgggtcagccaaatattacgcgctgtgcgggttcggaggcgtgctttcatgtggccttacacacaccgccgttgtaccattagacctggtgaagtgcagaatgcaggtcgatccgcagaagtataaaggaatcttcaacggcttcagcgtaactctgaaggaggacggcgtgaggggactggcaaaaggctgggcaccaacctttctcgggtattcaatgcaaggattatgtaagtttgggttttacgaggtgtttaaggtgctgtattccaatatgctgggcgaggaaaatacttacctgtggcgcaccagtttgtatctcgctgctagcgcatctgcggaattctttgccgacatcgccctcgctcctatggaagccgctaaagtacgcattcagacacagcctggttatgctaatacactgcgggatgccgctcccaagatgtataaggaagagggtctaaaggccttttataaaggcgtggcccctctctggatgaggcagataccctatacaatgatgaagtttgcctgcttcgagagaacggtcgaggccctctataaattcgtagtccccaaacccagatcggaatgctctaagccagagcagttagtggtgaccttcgttgccggttacatcgcaggcgtgttttgcgccattgtgtcccatcctgccgattctgttgtgtctgtgcttaataaggaaaagggttcctcggcgtcactcgtgcttaagcgactggggtttaagggagtttggaagggactgtttgccaggattattatgatcggcacactcacagcactgcagtggttcatatatgactccgtgaaagtgtattttcggcttcccagacctcccccaccagaaatgccagaatcgctcaaaaagaagctggggcttacccagtag

SEQ ID NO: 130433 - DNA, 1909 bp, Artificial Sequence
  derived and/or modified sequence
gtgtgcgtcacgccgacgacgcgcgaagggcacacatcttaggacccggaggacgtccggcctctgtgagccgcaacctttccaagggagtggttgtgtgatcgccatcttagggagtgagtgtggccgggccttctcctgtggcgggtgtggggagcggagcccagagctcctgtggggccgctgctttggcggtgggcccagccgggagcagcctctttcgaaggccgccgtgacctcttcaagggcgtggagacgggaaggaaaaggccccggttggggttccagggcgccggtaacgttaaccggcgccttgcctgtcctctaaccgtcgctccctcctcccctagaaagatgttctcgtccgtggcgcacctggcgcgggcgaaccccttcaacacgccacatctgcagctggtgcacgatggtctcggggacctccgcagcagctccccagggcccacgggccagccccgccgccctcgcaacctggcagccgccgccgtggaagagtacagttgtgaatttggctccgcgaagtattatgcactgtgtggctttggtggggtcttaagttgtggtctgacacacactgctgtggttcccctggatttagtgaaatgccgtatgcaggtggacccccaaaagtacaagggcatatttaacggattctcagttacacttaaagaggatggtgttcgtggtttggctaaaggatgggctccgactttccttggctactccatgcagggactctgcaagtttggcttttatgaagtctttaaagtcttgtatagcaatatgcttggagaggagaatacttatctctggcgcacatcactatatttggctgcctctgccagtgctgaattctttgctgacattgccctggctcctatggaagctgctaaggttcgaattcaaacccagccaggttatgccaacactttgagggatgcagctcccaaaatgtataaggaagaaggcctaaaagcattctacaagggggttgctcctctctggatgagacagataccatacaccatgatgaagttcgcctgctttgaacgtactgttgaagcactgtacaagtttgtggttcctaagccccgcagtgaatgttcaaagccagagcagctggttgtaacatttgtagcaggttacatagctggagtcttttgtgcaattgtttctcaccctgctgattctgtggtatctgtgttgaataaagaaaaaggtagcagtgcttctctggtcctcaagagacttggatttaaaggtgtatggaagggactgtttgcccgtatcatcatgattggtaccctgactgcactacagtggtttatctatgactccgtgaaggtctacttcagacttcctcgccctcctccacccgagatgccagagtctctgaagaagaagcttgggttaactcagtagttagatcaaagcaaatgtggactgaatctgcttgttgatcagtgttgaagaaagtgcaaaaggaacttttatatatttgacagtgtaggaaattgtctattcctgatataattactgtagtactcttgcttaaggcaagagtttcagatttactgttgaaataaacccaactcttcatgatttgcctgtgacttatttttaaaacttttttaaaaaagatttagctttaaaatagttggaaagaatgaagtatataagttaaggaaaaaatacaaaactgaccatgaccattgttggttgaatattccagttgctattcagaaattgtcatatgtctcaagttttatcacacaaagttcctgtatttctagggaagcagactttaaatttctaaaaacttgatttaattatagttaaatatgtgtagtcatttgtggttattttggcaagtaaatgtcagtgtatactt

SEQ ID NO: 130434 - DNA, 1415 bp, Artificial Sequence
  derived and/or modified sequence
accaatgggcgacgcgtacttgcagtggcgcgctgtgtgcgtcacgccgacgacgcgcgaagggcacacatcttaggacccggaggacgtccggcctctgtgagccgcaacctttccaagggagtggttgtgtgatcgccatcttagggaatgttctcgtccgtggcgcacctggcgcgggcgaaccccttcaacacgccacatctgcagctggtgcacgatggtctcggggacctccgcagcagctccccagggcccacgggccagccccgccgccctcgcaacctggcagccgccgccgtggaagagtacagttgtgaatttggctccgcgaagtattatgcactgtgtggctttggtggggtcttaagttgtggtctgacacacactgctgtggttcccctggatttagtgaaatgccgtatgcaggtggacccccaaaagtacaagggcatatttaacggattctcagttacacttaaagaggatggtgttcgtggtttggctaaaggatgggctccgactttccttggctactccatgcagggactctgcaagtttggcttttatgaagtctttaaagtcttgtatagcaatatgcttggagaggagaatacttatctctggcgcacatcactatatttggctgcctctgccagtgctgaattctttgctgacattgccctggctcctatggaagctgctaaggttcgaattcaaacccagccaggttatgccaacactttgagggatgcagctcccaaaatgtataaggaagaaggcctaaaagcattctacaagggggttgctcctctctggatgagacagataccatacaccatgatgaagttcgcctgctttgaacgtactgttgaagcactgtacaagtttgtggttcctaagccccgcagtgaatgttcaaagccagagcagctggttgtaacatttgtagcaggttacatagctggagtcttttgtgcaattgtttctcaccctgctgattctgtggtatctgtgttgaataaagaaaaaggtagcagtgcttctctggtcctcaagagacttggatttaaaggtgtatggaagggactgtttgcccgtatcatcatgattggtaccctgactgcactacagtggtttatctatgactccgtgaaggtctacttcagacttcctcgccctcctccacccgagatgccagagtctctgaagaagaagcttgggttaactcagtagttagatcaaagcaaatgtggactgaatctgcttgttgatcagtgttgaagaaagtgcaaaaggaacttttatatatttgacagtgtaggaaattgtctattcctgatataattactgtagtactcttgcttaaggcaagagtttcagatttactgttgaaataaacccaactcttcatg

SEQ ID NO: 130435 - DNA, 1285 bp, Artificial Sequence
  derived and/or modified sequence
cgcaacctttccaagggagtggttgtgtgatcgccatcttagggagtgaaaagatgttctcgtccgtggcgcacctggcgcgggcgaaccccttcaacacgccacatctgcagctggtgcacgatggtctcggggacctccgcagcagctccccagggcccacgggccagccccgccgccctcgcaacctggcagccgccgccgtggaagagtacagttgtgaatttggctccgcgaagtattatgcactgtgtggctttggtggggtcttaagttgtggtctgacacacactgctgtggttcccctggatttagtgaaatgccgtatgcaggtggacccccaaaagtacaagggcatatttaacggattctcagttacacttaaagaggatggtgttcgtggtttggctaaaggatgggctccgactttccttggctactccatgcagggactctgcaagtttggcttttatgaagtctttaaagtcttgtatagcaatatgcttggagaggagaatacttatctctggcgcacatcactatatttggctgcctctgccagtgctgaattctttgctgacattgccctggctcctatggaagctgctaaggttcgaattcaaacccagccaggttatgccaacactttgagggatgcagctcccaaaatgtataaggaagaaggcctaaaagcattctacaagggggttgctcctctctggatgagacagataccatacaccatgatgaagttcgcctgctttgaacgtactgttgaagcactgtacaagtttgtggttcctaagccccgcagtgaatgttcaaagccagagcagctggttgtaacatttgtagcaggttacatagctggagtcttttgtgcaattgtttctcaccctgctgattctgtggtatctgtgttgaataaagaaaaaggtagcagtgcttctctggtcctcaagagacttggatttaaaggtgtatggaagggactgtttgcccgtatcatcatgattggtaccctgactgcactacagtggtttatctatgactccgtgaaggtctacttcagacttcctcgccctcctccacccgagatgccagagtctctgaagaagaagcttgggttaactcagtagttagatcaaagcaaatgtggactgaatctgcttgttgatcagtgttgaagaaagtgcaaaaggaacttttatatatttgacagtgtaggaaattgtctattcctgatataattactgtagtactcttgcttaaggcaagagtttca

SEQ ID NO: 130436 - DNA, 1351 bp, Artificial Sequence
  derived and/or modified sequence
atcttaggacccggaggacgtccggcctctgtgagccgcaacctttccaagggagtggttgtgtgatcgccatcttagggaaaagatgttctcgtccgtggcgcacctggcgcgggcgaaccccttcaacacgccacatctgcagctggtgcacgatggtctcggggacctccgcagcagctccccagggcccacgggccagccccgccgccctcgcaacctggcagccgccgccgtggaagagtacagttgtgaatttggctccgcgaagtattatgcactgtgtggctttggtggggtcttaagttgtggtctgacacacactgctgtggttcccctggatttagtgaaatgccgtatgcaggtggacccccaaaagtacaagggcatatttaacggattctcagttacacttaaagaggatggtgttcgtggtttggctaaaggatgggctccgactttccttggctactccatgcagggactctgcaagtttggcttttatgaagtctttaaagtcttgtatagcaatatgcttggagaggagaatacttatctctggcgcacatcactatatttggctgcctctgccagtgctgaattctttgctgacattgccctggctcctatggaagctgctaaggttcgaattcaaacccagccaggttatgccaacactttgagggatgcagctcccaaaatgtataaggaagaaggcctaaaagcattctacaagggggttgctcctctctggatgagacagataccatacaccatgatgaagttcgcctgctttgaacgtactgttgaagcactgtacaagtttgtggttcctaagccccgcagtgaatgttcaaagccagagcagctggttgtaacatttgtagcaggttacatagctggagtcttttgtgcaattgtttctcaccctgctgattctgtggtatctgtgttgaataaagaaaaaggtagcagtgcttctctggtcctcaagagacttggatttaaaggtgtatggaagggactgtttgcccgtatcatcatgattggtaccctgactgcactacagtggtttatctatgactccgtgaaggtctacttcagacttcctcgccctcctccacccgagatgccagagtctctgaagaagaagcttgggttaactcagtagttagatcaaagcaaatgtggactgaatctgcttgttgatcagtgttgaagaaagtgcaaaaggaacttttatatatttgacagtgtaggaaattgtctattcctgatataattactgtagtactcttgcttaaggcaagagtttcagatttactgttgaaataaacccaactcttcatga

SEQ ID NO: 130437 - DNA, 1086 bp, Artificial Sequence
  derived and/or modified sequence
atgttcagcagcgtggcccacctggccagagccaaccccttcaacaccccccacctgcagctggtgcacgacggcctgggcgacctgagaagcagcagccccggccccaccggccagcccagaagacccagaaacctggccgccgccgccgtggaggagtacagctgcgagttcggcagcgccaagtactacgccctgtgcggcttcggcggcgtgctgagctgcggcctgacccacaccgccgtggtgcccctggacctggtgaagtgcagaatgcaggtggacccccagaagtacaagggcatcttcaacggcttcagcgtgaccctgaaggaggacggcgtgagaggcctggccaagggctgggcccccaccttcctgggctacagcatgcagggcctgtgcaagttcggcttctacgaggtgttcaaggtgctgtacagcaacatgctgggcgaggagaacacctacctgtggagaaccagcctgtacctggccgccagcgccagcgccgagttcttcgccgacatcgccctggcccccatggaggccgccaaggtgagaatccagacccagcccggctacgccaacaccctgagagacgccgcccccaagatgtacaaggaggagggcctgaaggccttctacaagggcgtggcccccctgtggatgagacagatcccctacaccatgatgaagttcgcctgcttcgagagaaccgtggaggccctgtacaagttcgtggtgcccaagcccagaagcgagtgcagcaagcccgagcagctggtggtgaccttcgtggccggctacatcgccggcgtgttctgcgccatcgtgagccaccccgccgacagcgtggtgagcgtgctgaacaaggagaagggcagcagcgccagcctggtgctgaagagactgggcttcaagggcgtgtggaagggcctgttcgccagaatcatcatgatcggcaccctgaccgccctgcagtggttcatctacgacagcgtgaaggtgtacttcagactgcccagaccccccccccccgagatgcccgagagcctgaagaagaagctgggcctgacccagtag

SEQ ID NO: 130438 - protein, 457 aa, Artificial Sequence
  derived and/or modified sequence
MAQPPRLSRSGASSLWDPASPAPTSGPRPRLWEGQDVLARWTDGLLYLGTIKKVDSAREVCLVQFEDDSQFLVLWKDISPAALPGEELLCCVCRSETVVPGNRLVSCEKCRHAYHQDCHVPRAPAPGEGEGTSWVCRQCVFAIATKRGGALKKGPYARAMLGMKLSLPYGLKGLDWDAGHLSNRQQSYCYCGGPGEWNLKMLQCRSCLQWFHEACTQCLSKPLLYGDRFYEFECCVCRGGPEKVRRLQLRWVDVAHLVLYHLSVCCKKKYFDFDREILPFTSENWDSLLLGELSDTPKGERSSRLLSALNSHKDRFISGREIKKRKCLFGLHARMPPPVEPPTGDGALTRAGPWGRGLTSPGEAPEAGARAPEEEAEGESGGAGATLSSAQSARAPGAEGAGSSAEGTAAAPSGCLLPSTLLPAPQGPLGTVDPQTGHPWNFTLVSPQTSLKVPPTR

SEQ ID NO: 130439 - protein, 457 aa, Artificial Sequence
  derived and/or modified sequence
MAQPPRLSRSGASSLWDPASPAPTSGPRPRLWEGQDVLARWTDGLLYLGTIKKVDSAREVCLVQFEDDSQFLVLWKDISPAALPGEELLCCVCRSETVVPGNRLVSCEKCRHAYHQDCHVPRAPAPGEGEGTSWVCRQCVFAIATKRGGALKKGPYARAMLGMKLSLPYGLKGLDWDAGHLSNRQQSYCYCGGPGEWNLKMLQCRSCLQWFHEACTQCLSKPLLYGDRFYEFECCVCRGGPEKVRRLQLRWVDVAHLVLYHLSVCCKKKYFDFDREILPFTSENWDSLLLGELSDTPKGERSSKLLSALNSHKDRFISGREIKKRKCLFGLHARMPPPVEPPTGDGALTRAGPWGRGLTSPGEAPEAGARAPEEEAEGESGGAGATLSSAQSARAPGAEGAGSSAEGTAAAPSGCLLPSTLLPAPQGPLGTVDPQTGHPWNFTLVSPQTSLKVPPTR

SEQ ID NO: 130440 - DNA, 1374 bp, Artificial Sequence
  derived and/or modified sequence
atggcacagcctccaagactctcccggagcggtgcctccagcctgtgggaccccgcaagcccggccccaactagtggccctaggcctagactgtgggaggggcaggatgtgcttgcgcgttggacagacggcctcctgtaccttgggactatcaaaaaagtcgattccgccagagaggtgtgtttagtgcagtttgaggatgacagccagttcctcgtcctatggaaggacataagcccagcagccctaccgggagaagaactgctgtgctgcgtctgcagaagcgagacagtggtaccagggaaccggttggtgagttgcgagaagtgccgacatgcttaccatcaagattgccatgtgccgcgggctcccgctccaggtgaaggggaggggacttcatgggtctgtcgccagtgcgtgtttgccatcgcaacgaagagaggaggtgcgctcaagaagggcccctacgctcgtgctatgcttggaatgaagctcagcctgccctatgggctgaagggcttggattgggatgccgggcaccttagcaacagacagcagagctactgctattgtgggggtccgggtgagtggaatctgaaaatgttgcagtgtaggtcttgtctgcagtggtttcacgaggcatgcacgcagtgcttaagcaaaccactcctctacggggaccgattctacgagttcgaatgttgcgtttgtaggggagggcccgaaaaggttagaagactccagctgcggtgggtcgacgtggcccatctagtgttgtaccatctgtcagtttgctgcaaaaagaagtatttcgactttgatcgcgagattttacctttcacatcagaaaattgggactctttactgctgggagagctctccgacactccgaagggagaacggtcctctagattgctgtccgccttgaacagtcataaggatagatttatctctggccgggagattaagaagcggaaatgcctcttcgggcttcacgctcgcatgcctcctcccgtggagcctcccacaggcgacggcgccctcacacgggcgggaccatggggtcgaggccttacgagccctggtgaggctcccgaggccggtgcacgggcaccggaggaagaggccgaaggtgagagtggtggggccggagctacactcagctctgctcagagtgccagggccccgggtgctgagggggcgggcagtagcgcagaggggacagccgctgccccgtcaggatgcctcctcccctcgacgctgctgccagccccccaaggacccctcggaaccgtcgaccctcagacagggcatccatggaacttcaccctggtgtccccgcagaccagcttaaaagtgcctcccacccggtag

SEQ ID NO: 130441 - DNA, 1374 bp, Artificial Sequence
  derived and/or modified sequence
atggcacaacccccccgtctgtccaggtccggggcatcctccctgtgggatccagcctcaccagcacctacctcgggacctagaccccgcctctgggagggtcaggacgtcctggcgaggtggactgacggtctgctctacttgggaactatcaaaaaggtagattccgcacgcgaggtctgtcttgttcagtttgaagacgatagccagttcctggtgctgtggaaggatatatcccctgcagccctcccaggcgaagaattgctgtgttgtgtgtgccgaagcgagaccgtcgtgcctggcaacaggctggtttcgtgcgagaagtgccgacatgcctaccatcaagattgtcacgttccgcgtgcccctgcccctggtgagggggagggcacttcgtgggtctgccgccagtgcgtattcgcgattgctactaaacggggcggagctcttaaaaagggcccctacgcgagagccatgttgggcatgaagctctcactgccgtacgggctgaaaggactggattgggatgccggccacttgagtaaccggcaacagtcctactgttactgtgggggccccggcgaatggaacctaaagatgctacaatgccgttcgtgtctgcaatggtttcatgaagcctgcacccagtgtttaagtaaaccgctgctctatggcgacaggttctatgagttcgagtgctgcgtctgcaggggaggcccagaaaaagttagacggctgcagctgaggtgggtggacgtggcacatctagtactataccacctgtcagtctgttgtaagaaaaagtacttcgattttgatagagagattttgccttttactagtgagaactgggactcattattgctgggtgagctcagcgatactcctaagggcgagagaagctctaagcttttgagcgccttgaactctcacaaggaccgattcatttcaggacgggagattaagaaaaggaaatgtctatttggcctgcatgctaggatgcctcctccagtcgaaccccctaccggagatggtgcgttaacccgcgccggaccatgggggcgagggctgacctcgccaggcgaggctcctgaagctggcgcgagggcccctgaagaggaggcggagggagagtccggaggagcaggggccaccttgtctagcgcccaaagcgcccgcgctccaggagcagagggcgccggatcatcagcagaagggaccgcagcggcccccagcggatgtctcctgccctcgactttgctgcctgcaccacagggccctttaggcaccgtcgatccccagacggggcacccatggaattttaccctcgttagtcctcagacttctctgaaggtccctcctaccaggtag

SEQ ID NO: 130442 - DNA, 1374 bp, Artificial Sequence
  derived and/or modified sequence
atggcccagcccccccggctgagccgcagcggggccagcagcctgtgggaccctgccagccctgcccccaccagcggcccccggccccggctgtgggagggccaggatgtgctggcccgctggacagatggcctgctgtacctgggcaccatcaagaaggtggacagcgcccgggaggtgtgcctggtgcagtttgaagatgacagccagttcctggtgctgtggaaggacatcagccctgctgccctgcccggggaggagctgctgtgctgcgtgtgccgctcagaaacagtggtgcccggcaaccggctggtgtcctgtgagaagtgcagacatgcctaccaccaggactgccacgtgccccgggccccagcccctggagagggggagggcacctcctgggtgtgccggcagtgtgtgtttgccatcgccaccaagaggggcggggccctgaagaagggcccctatgcccgggccatgctgggcatgaagctgagcctgccctacggcctgaagggcctggactgggatgctggccacctgagcaaccggcagcagagctactgctactgcggcggccctggagagtggaacctgaagatgctgcagtgccgcagctgcctgcagtggttccacgaggcctgcacccagtgcctgagcaagcccctgctgtatggagaccgcttctatgaatttgagtgctgcgtgtgccggggcggccctgagaaggtgcggcggctgcagctgcgctgggtggatgtggcccacctggtgctgtaccacctgtctgtgtgctgcaagaagaagtactttgattttgaccgggagatcctgcccttcaccagcgagaactgggacagcctgctgctgggggagctgagtgacacccccaagggggagaggagcagccggctgctgagcgccctgaacagccacaaggaccgcttcatcagcggccgggagatcaagaagaggaagtgcctgtttggcctgcacgccaggatgcctcctcctgtggagcccccaactggagatggagccctgaccagggctggcccctggggccggggcctgaccagccctggagaggcccctgaggccggggcccgggcccctgaggaggaggccgagggggagagcggcggggccggggccaccctgagcagcgcccagagcgcccgggcccctggagctgagggcgccggcagcagcgctgagggcacagctgctgcccccagcggctgcctgctgcccagcaccctgctgcctgccccccagggccccctgggcaccgtggacccccagacaggccacccctggaacttcaccctggtgagcccccagaccagcctgaaggtgccccccaccaggtag

SEQ ID NO: 130443 - DNA, 1374 bp, Artificial Sequence
  derived and/or modified sequence
atggcccagcccccccggctgagccgcagcggggccagcagcctgtgggaccctgccagccctgcccccaccagcggcccccggccccggctgtgggagggccaggatgtgctggcccgctggacagatggcctgctgtacctgggcaccatcaagaaggtggacagcgcccgggaggtgtgcctggtgcagtttgaagatgacagccagttcctggtgctgtggaaggacatcagccctgctgccctgcccggggaggagctgctgtgctgcgtgtgccgctcagaaacagtggtgcccggcaaccggctggtgtcctgtgagaagtgcagacatgcctaccaccaggactgccacgtgccccgggccccagcccctggagagggggagggcacctcctgggtgtgccggcagtgtgtgtttgccatcgccaccaagaggggcggggccctgaagaagggcccctatgcccgggccatgctgggcatgaagctgagcctgccctacggcctgaagggcctggactgggatgctggccacctgagcaaccggcagcagagctactgctactgcggcggccctggagagtggaacctgaagatgctgcagtgccgcagctgcctgcagtggttccacgaggcctgcacccagtgcctgagcaagcccctgctgtatggagaccgcttctatgaatttgagtgctgcgtgtgccggggcggccctgagaaggtgcggcggctgcagctgcgctgggtggatgtggcccacctggtgctgtaccacctgtctgtgtgctgcaagaagaagtactttgattttgaccgggagatcctgcccttcaccagcgagaactgggacagcctgctgctgggggagctgagtgacacccccaagggggagaggagcagcaagctgctgagcgccctgaacagccacaaggaccgcttcatcagcggccgggagatcaagaagaggaagtgcctgtttggcctgcacgccaggatgcctcctcctgtggagcccccaactggagatggagccctgaccagggctggcccctggggccggggcctgaccagccctggagaggcccctgaggccggggcccgggcccctgaggaggaggccgagggggagagcggcggggccggggccaccctgagcagcgcccagagcgcccgggcccctggagctgagggcgccggcagcagcgctgagggcacagctgctgcccccagcggctgcctgctgcccagcaccctgctgcctgccccccagggccccctgggcaccgtggacccccagacaggccacccctggaacttcaccctggtgagcccccagaccagcctgaaggtgccccccaccaggtag

SEQ ID NO: 130444 - DNA, 1374 bp, Artificial Sequence
  derived and/or modified sequence
atggcccagcccccccggctgagccggagcggcgccagcagcctgtgggaccccgcctcccccgcccccacttctggcccccggccacgactatgggaggggcaagacgtgctggccagatggaccgatggattgttatacttgggcaccatcaaaaaggtggactcggcacgcgaggtgtgcttggtgcaatttgaagatgatagtcaattcctcgtgctgtggaaagacattagccccgctgcgttgcccggagaagagctgttatgctgtgtgtgccgaagtgagacagttgttccgggtaataggctggtttcctgcgaaaaatgtagacatgcttatcaccaggactgccatgtgcctcgcgccccagctcccggggagggagagggcacttcctgggtatgcaggcagtgtgtttttgctatcgctactaagcgaggcggggccctcaagaagggcccatatgccagagccatgctcggcatgaagctgtccctaccttatggactgaaaggcctagattgggatgcaggacaccttagcaatcggcagcagtcttactgttattgtggaggtcctggcgagtggaatctcaagatgctccaatgtagaagctgtctgcaatggttccacgaggcttgcacccagtgtctttcaaagcctttactgtacggcgaccggttctacgaatttgagtgctgtgtgtgccggggagggcccgagaaggtgagacgcctccagctgagatgggtggacgtggcccacctcgtgctgtatcacctctcagtgtgctgcaaaaagaagtatttcgactttgatagagaaatcctgccattcacatcagagaattgggacagcctgctgcttggggagctctccgataccccaaagggtgaacgaagctcaaggttgcttagcgctttaaactcacataaggacagattcatttctgggcgagaaatcaagaagaggaaatgcttattcggtctgcacgccaggatgccccccccagttgaaccaccaaccggggatggtgccctgacaagagccggcccatggggccgggggctaacatcacccggagaggcacccgaggctggggcccgagcccccgaggaggaagccgagggcgaaagtgggggagccggggccactctgtcctccgcgcagagcgcccgagcacctggcgccgagggggcaggttcttctgccgaaggcacagcagcagcccctagcggatgcctcctgcctagcacgctgctgcccgcccctcagggccccctcgggacagtggacccgcagactggacatccgtggaacttcactcttgtatcaccccagaccagccttaaggttccccccacccgctag

SEQ ID NO: 130445 - DNA, 1374 bp, Artificial Sequence
  derived and/or modified sequence
atggcccagcccccccggctgagccggagcggcgccagcagcctgtgggatcccgccagtccggcgcccacatccggtccccggcctaggctttgggagggtcaggacgtgttggccaggtggaccgacgggctgttgtacctggggaccatcaagaaagtagactctgcccgggaagtgtgtctcgttcagttcgaagacgattctcagttccttgtgctttggaaggatatctcgcctgctgccctccctggagaagagcttttatgttgcgtatgtcggtccgagactgttgtgccaggtaatcggctcgtatcctgcgagaagtgtcggcacgcttaccaccaggattgccacgtccctcgggcccctgcgcctggggagggagaagggacttcttgggtatgcagacagtgtgtgttcgcgatcgccaccaaacgagggggcgcgctgaaaaagggtccctatgcgcgagctatgctggggatgaagctgtcactgccctatgggttaaagggattggactgggatgcaggacacctctccaataggcagcagtcatattgttattgtgggggcccgggcgagtggaacttaaaaatgctgcagtgccgtagctgcctgcaatggtttcacgaggcttgcacccagtgtttgagtaagcccctgttgtatggagacaggttttacgaatttgagtgctgtgtgtgcagaggtggcccagagaaggtacggcgactgcagctccggtgggtggatgtggcccacctggtgctctatcatctatctgtgtgttgtaaaaaaaagtattttgacttcgatcgagaaatccttccgttcacctctgagaactgggattcattactgttgggcgaactttctgacacacccaaaggcgagagaagcagcaagttgctgtcagctctgaactcacataaagacaggttcatcagcggcagagagattaaaaagaggaaatgtctttttggactgcatgccagaatgcctccacctgtggaaccgccaaccggagacggagccctcacaagagccggaccctgggggcggggactgacatccccaggagaagcgcccgaggccggagcacgggctccagaggaagaagcagagggagaaagcggcggcgcaggggcaactctgtcctctgcccagagtgctagagcacctggcgctgaaggtgctgggagtagcgctgaagggactgcggccgcaccctctggctgcctgctaccttcgaccctcctgcccgctccacagggaccgctcggaacagttgatccccagactgggcatccctggaatttcacgctggtgtccccgcagacgtccctcaaagttcctccaaccaggtag

SEQ ID NO: 130446 - DNA, 2224 bp, Artificial Sequence
  derived and/or modified sequence
caccctcccccccaaccggtccgtccctcccctccctccctcccccccgccgcctcctcctcctgccgctgccgctgctttggctgctgcgtcatacgccccagagccgccgggacggaggggctgggcctggggaccccccggcctccgcctgcacgcccccccacgcccggacgtgccctctccgcgcgggggactcgcctaggtctcctacgtctgcccctgcccggctcccggcggccccagctgtcaccggcccccccaggatgcaatggcgcagcccccccggctgagccgctctggtgcctcctcactttgggacccagcttctcctgctcccacctctggccccaggcctcggctttgggagggtcaagatgtgctggccagatggactgatgggctgctatacttgggtaccatcaaaaaggtggacagtgctagggaggtgtgtctggtccagtttgaggatgattcgcagtttctggttctatggaaagacattagccctgctgccctccctggagaggaactcctctgttgtgtctgtcgctctgagactgtggtccctgggaaccggctggtcagctgtgagaagtgtcgccatgcttatcaccaggactgccatgttcccagggctccagcccctggagagggagagggcacatcctgggtatgccgccagtgtgtctttgcgatcgccaccaagaggggaggtgccctgaagaagggcccctatgcccgggccatgctgggtatgaagctttctctgccatatggactgaaggggctggactgggatgctggacatctgagcaaccgacagcagagttactgttactgtggtggccctggggagtggaacctgaaaatgctgcagtgccggagctgcctgcagtggttccatgaggcctgcacccagtgtctgagcaagcccctcctctatggggacaggttctatgaatttgaatgctgtgtgtgtcgcgggggccctgagaaagtccggagactacagcttcgctgggtggatgtggcccatcttgtcctgtatcacctcagtgtttgctgtaagaagaaatactttgattttgatcgtgagatcctccccttcacttctgagaattgggacagtttgctcctgggggagctttcagacacccccaaaggagaacgttcttccaggctcctctctgctcttaacagccacaaggaccgtttcatttcagggagagagattaagaagaggaaatgtttgtttggtctccatgctcggatgcctccccctgtggagccccctactggagatggagcactcaccagggcagggccctgggggaggggtctcacgtcccctggggaagcgccggaggccggagccagagcccctgaggaggaggcagaaggggaaagtggaggagctggggccaccctcagcagtgcgcaatcagcccgagccccaggagcagagggagcgggctcatctgcagagggcactgcagcagccccatccggatgtttgcttccttccacccttctgccagcaccgcagggacctctggggacagtggacccccagacaggtcacccctggaacttcacattggtttccccacagacatccctaaaagtgccccccactcgatgactgcctcatcttcctcagtttcatccccatccccaggtcttcctagacgctcagcacccccttctcccctgtgccgtagtttgtctcctgggactgggggaggagtccgaggtggggttggttacctgtcccgaggggaccctgtccgggtccttgctcggagagtacggcctgatggctctgtgcagtacctggttgagtggggaggagggggcatcttctgaacagcctgcctctgcccagctccccattcacacacaccggcactttcataccctgacctctgacctcacctacagctgggatgtacctggagagatagggggtagttctccctactgcccaggctggaatccaagagtggggagtggggaagaggccctcttctctaccctccttcatgattcctgacccctcccatccttcccatttcctttgatgttattttgttacagctttttaaatattttttaaaattatttaacccctgggggcagagactgaggagggaggatgataagggatcccggactctgtatgattgaaataaagagaaataaacaaatctagcagctctga

SEQ ID NO: 130447 - DNA, 2224 bp, Artificial Sequence
  derived and/or modified sequence
caccctcccccccaaccggtccgtccctcccctccctccctcccccccgccgcctcctcctcctgccgctgccgctgctttggctgctgcgtcatacgccccagagccgccgggacggaggggctgggcctggggaccccccggcctccgcctgcacgcccccccacgcccggacgtgccctctccgcgcgggggactcgcctaggtctcctacgtctgcccctgcccggctcccggcggccccagctgtcaccggcccccccaggatgcaatggcgcagcccccccggctgagccgctctggtgcctcctcactttgggacccagcttctcctgctcccacctctggccccaggcctcggctttgggagggtcaagatgtgctggccagatggactgatgggctgctatacttgggtaccatcaaaaaggtggacagtgctagggaggtgtgtctggtccagtttgaggatgattcgcagtttctggttctatggaaagacattagccctgctgccctccctggagaggaactcctctgttgtgtctgtcgctctgagactgtggtccctgggaaccggctggtcagctgtgagaagtgtcgccatgcttatcaccaggactgccatgttcccagggctccagcccctggagagggagagggcacatcctgggtatgccgccagtgtgtctttgcgatcgccaccaagaggggaggtgccctgaagaagggcccctatgcccgggccatgctgggtatgaagctttctctgccatatggactgaaggggctggactgggatgctggacatctgagcaaccgacagcagagttactgttactgtggtggccctggggagtggaacctgaaaatgctgcagtgccggagctgcctgcagtggttccatgaggcctgcacccagtgtctgagcaagcccctcctctatggggacaggttctatgaatttgaatgctgtgtgtgtcgcgggggccctgagaaagtccggagactacagcttcgctgggtggatgtggcccatcttgtcctgtatcacctcagtgtttgctgtaagaagaaatactttgattttgatcgtgagatcctccccttcacttctgagaattgggacagtttgctcctgggggagctttcagacacccccaaaggagaacgttcttccaagctcctctctgctcttaacagccacaaggaccgtttcatttcagggagagagattaagaagaggaaatgtttgtttggtctccatgctcggatgcctccccctgtggagccccctactggagatggagcactcaccagggcagggccctgggggaggggtctcacgtcccctggggaagcgccggaggccggagccagagcccctgaggaggaggcagaaggggaaagtggaggagctggggccaccctcagcagtgcgcaatcagcccgagccccaggagcagagggagcgggctcatctgcagagggcactgcagcagccccatccggatgtttgcttccttccacccttctgccagcaccgcagggacctctggggacagtggacccccagacaggtcacccctggaacttcacattggtttccccacagacatccctaaaagtgccccccactcgatgactgcctcatcttcctcagtttcatccccatccccaggtcttcctagacgctcagcacccccttctcccctgtgccgtagtttgtctcctgggactgggggaggagtccgaggtggggttggttacctgtcccgaggggaccctgtccgggtccttgctcggagagtacggcctgatggctctgtgcagtacctggttgagtggggaggagggggcatcttctgaacagcctgcctctgcccagctccccattcacacacaccggcactttcataccctgacctctgacctcacctacagctgggatgtacctggagagatagggggtagttctccctactgcccaggctggaatccaagagtggggagtggggaagaggccctcttctctaccctccttcatgattcctgacccctcccatccttcccatttcctttgatgttattttgttacagctttttaaatattttttaaaattatttaacccctgggggcagagactgaggagggaggatgataagggatcccggactctgtatgattgaaataaagagaaataaacaaatctagcagctctga

SEQ ID NO: 130448 - DNA, 1374 bp, Artificial Sequence
  derived and/or modified sequence
atggctcagccacccaggctttcgagaagcggagcaagtagcctctgggacccagccagtcccgctcctaccagcggccctcgccctcggctctgggaaggccaggacgtgttggccagatggacagatggactgctttatctaggcacaattaaaaaggtggattcagccagggaagtttgtctagtgcagtttgaagacgacagtcagtttctggtgctgtggaaggacatctctcctgcagctctgccaggcgaagaacttttatgctgtgtatgccgtagtgagaccgtggtccctgggaaccggcttgtgtcatgcgagaagtgcaggcacgcataccaccaggattgccacgttcccagagcacccgctcctggcgaaggtgaggggacgagctgggtctgtagacaatgtgttttcgccattgccaccaagcgcggaggcgcactgaaaaaagggccatacgcaagagctatgctgggcatgaagctcagtctgccatacgggcttaaggggcttgattgggatgccggtcacctgtctaatcgacaacagtcttactgctactgcgggggtccgggtgaatggaacctgaagatgcttcagtgcaggagttgcctccagtggttccacgaggcatgtacccagtgcttgtccaagcctttgctgtacggggaccggttttacgaattcgaatgctgcgtctgccgaggtggacccgagaaagtccggaggttacagttgcgttgggttgatgtcgctcacttggtactgtaccacttatctgtgtgctgtaagaaaaagtattttgattttgaccgcgagatccttccttttacctcagagaattgggactcattactgttgggagaactcagcgacacgcctaaaggagagcgctcatcacggctcctgtcagctctgaactctcataaagacagatttatctccggtcgggagattaagaagcgcaagtgcctttttgggctccacgccaggatgccccctccggttgagccacccaccggagatggggctctgaccagggctggcccttggggcagggggctcacttcccccggagaggcacctgaggccggtgcgcgagctcccgaggaggaggccgagggagagtctgggggtgccggtgctacactttccagcgcacagtcagcacgggcacccggtgctgagggagcagggtcaagcgcagaaggcactgctgcagctccatcaggctgtctactgccctccactctcctgcctgccccacaaggacccttgggtacagtggacccccagacaggccacccttggaactttacactggtgtctcctcagacctcactcaaggtgcctcccactcgctag

SEQ ID NO: 130449 - DNA, 1374 bp, Artificial Sequence
  derived and/or modified sequence
atggcacaacctccccgactgtctaggagcggtgcctcctcactgtgggatcccgctagccctgcccctactagcggacctcggccaaggctgtgggaagggcaggatgtgctggcccgttggacagatggcctcctatacctcggcacaatcaagaaggtggacagtgctagagaggtgtgcttggtacagttcgaggacgattcccagtttctggttctctggaaggacatttcccccgctgcactccctggcgaggagctgctatgttgcgtgtgcagatcggaaacggtcgtgcccggtaaccggctagtcagttgcgagaaatgtcgccatgcataccaccaggactgccacgttcctagggcacctgcccctggtgaaggagagggcactagctgggtgtgcagacagtgtgtgttcgctatagctaccaagcgaggcggagcactcaaaaagggaccctacgctcgcgcaatgctcggcatgaagttgagtctgccctatggcttgaaaggattagattgggacgctgggcacctgagtaatcggcaacaaagctattgttattgtgggggacctggggaatggaacctgaagatgctccaatgccggagctgtttacagtggttccatgaagcatgcactcagtgtctgagtaaacctctgttgtacggagacagattttacgaattcgagtgttgcgtgtgcagaggagggccagaaaaagtcagacggcttcaactgagatgggtcgatgtggcccatctcgtgttgtaccacttgagcgtgtgttgtaaaaagaaatactttgatttcgaccgggagattctaccgttcacctcagagaattgggactccctgctcctcggggagcttagcgacaccccaaagggcgagcgttcatctaagctcctcagcgccttgaattcgcataaagataggtttatttcaggtcgagaaattaagaagcggaagtgcctgttcgggcttcacgcacggatgccgcctcctgtcgaacctcccaccggtgatggcgctttgacccgcgctgggccttgggggagggggttgacttctccgggagaggcccctgaagcaggagcccgagcacccgaggaagaagctgaaggggaatccgggggagcaggcgctaccctgtcatcggctcagtccgctcgcgctcccggagctgagggagcaggctcatcggccgaagggaccgcagctgcaccgtcgggatgtctgctgcctagcacccttctgccagcccctcagggtccgctaggtacggtggatcctcaaacagggcacccatggaactttacgctagttagcccacagacaagcttgaaagtgcctcccacacggtag

SEQ ID NO: 130450 - DNA, 1374 bp, Artificial Sequence
  derived and/or modified sequence
atggcccagccccccagactgagcagaagcggcgccagcagcctgtgggaccccgccagccccgcccccaccagcggccccagacccagactgtgggagggccaggacgtgctggccagatggaccgacggcctgctgtacctgggcaccatcaagaaggtggacagcgccagagaggtgtgcctggtgcagttcgaggacgacagccagttcctggtgctgtggaaggacatcagccccgccgccctgcccggcgaggagctgctgtgctgcgtgtgcagaagcgagaccgtggtgcccggcaacagactggtgagctgcgagaagtgcagacacgcctaccaccaggactgccacgtgcccagagcccccgcccccggcgagggcgagggcaccagctgggtgtgcagacagtgcgtgttcgccatcgccaccaagagaggcggcgccctgaagaagggcccctacgccagagccatgctgggcatgaagctgagcctgccctacggcctgaagggcctggactgggacgccggccacctgagcaacagacagcagagctactgctactgcggcggccccggcgagtggaacctgaagatgctgcagtgcagaagctgcctgcagtggttccacgaggcctgcacccagtgcctgagcaagcccctgctgtacggcgacagattctacgagttcgagtgctgcgtgtgcagaggcggccccgagaaggtgagaagactgcagctgagatgggtggacgtggcccacctggtgctgtaccacctgagcgtgtgctgcaagaagaagtacttcgacttcgacagagagatcctgcccttcaccagcgagaactgggacagcctgctgctgggcgagctgagcgacacccccaagggcgagagaagcagcagactgctgagcgccctgaacagccacaaggacagattcatcagcggcagagagatcaagaagagaaagtgcctgttcggcctgcacgccagaatgcccccccccgtggagccccccaccggcgacggcgccctgaccagagccggcccctggggcagaggcctgaccagccccggcgaggcccccgaggccggcgccagagcccccgaggaggaggccgagggcgagagcggcggcgccggcgccaccctgagcagcgcccagagcgccagagcccccggcgccgagggcgccggcagcagcgccgagggcaccgccgccgcccccagcggctgcctgctgcccagcaccctgctgcccgccccccagggccccctgggcaccgtggacccccagaccggccacccctggaacttcaccctggtgagcccccagaccagcctgaaggtgccccccaccagatag

SEQ ID NO: 130451 - DNA, 1374 bp, Artificial Sequence
  derived and/or modified sequence
atggcccagccccccagactgagcagaagcggcgccagcagcctgtgggaccccgccagccccgcccccaccagcggccccagacccagactgtgggagggccaggacgtgctggccagatggaccgacggcctgctgtacctgggcaccatcaagaaggtggacagcgccagagaggtgtgcctggtgcagttcgaggacgacagccagttcctggtgctgtggaaggacatcagccccgccgccctgcccggcgaggagctgctgtgctgcgtgtgcagaagcgagaccgtggtgcccggcaacagactggtgagctgcgagaagtgcagacacgcctaccaccaggactgccacgtgcccagagcccccgcccccggcgagggcgagggcaccagctgggtgtgcagacagtgcgtgttcgccatcgccaccaagagaggcggcgccctgaagaagggcccctacgccagagccatgctgggcatgaagctgagcctgccctacggcctgaagggcctggactgggacgccggccacctgagcaacagacagcagagctactgctactgcggcggccccggcgagtggaacctgaagatgctgcagtgcagaagctgcctgcagtggttccacgaggcctgcacccagtgcctgagcaagcccctgctgtacggcgacagattctacgagttcgagtgctgcgtgtgcagaggcggccccgagaaggtgagaagactgcagctgagatgggtggacgtggcccacctggtgctgtaccacctgagcgtgtgctgcaagaagaagtacttcgacttcgacagagagatcctgcccttcaccagcgagaactgggacagcctgctgctgggcgagctgagcgacacccccaagggcgagagaagcagcaagctgctgagcgccctgaacagccacaaggacagattcatcagcggcagagagatcaagaagagaaagtgcctgttcggcctgcacgccagaatgcccccccccgtggagccccccaccggcgacggcgccctgaccagagccggcccctggggcagaggcctgaccagccccggcgaggcccccgaggccggcgccagagcccccgaggaggaggccgagggcgagagcggcggcgccggcgccaccctgagcagcgcccagagcgccagagcccccggcgccgagggcgccggcagcagcgccgagggcaccgccgccgcccccagcggctgcctgctgcccagcaccctgctgcccgccccccagggccccctgggcaccgtggacccccagaccggccacccctggaacttcaccctggtgagcccccagaccagcctgaaggtgccccccaccagatag

SEQ ID NO: 130452 - protein, 1240 aa, Artificial Sequence
  derived and/or modified sequence
MRSRSNSGVRLDGYARLVQQTILCHQNPVTGLLPASYDQKDAWVRDNVYSILAVWGLGLAYRKNADRDEDKAKAYELEQSVVKLMRGLLHCMIRQVDKVESFKYSQSTKDSLHAKYNTKTCATVVGDDQWGHLQLDATSVYLLFLAQMTASGLHIIHSLDEVNFIQNLVFYIEAAYKTADFGIWERGDKTNQGISELNASSVGMAKAALEALDELDLFGVKGGPQSVIHVLADEVQHCQSILNSLLPRASTSKEVDASLLSVVSFPAFAVEDSQLVELTKQEIITKLQGRYGCCRFLRDGYKTPKEDPNRLYYEPAELKLFENIECEWPLFWTYFILDGVFSGNAEQVQEYKEALEAVLIKGKNGVPLLPELYSVPPDRVDEEYQNPHTVDRVPMGKLPHMWGQSLYILGSLMAEGFLAPGEIDPLNRRFSTVPKPDVVVQVSILAETEEIKTILKDKGIYVETIAEVYPIRVQPARILSHIYSSLGCNNRMKLSGRPYRHMGVLGTSKLYDIRKTIFTFTPQFIDQQQFYLALDNKMIVEMLRTDLSYLCSRWRMTGQPTITFPISHSMLDEDGTSLNSSILAALRKMQDGYFGGARVQTGKLSEFLTTSCCTHLSFMDPGPEGKLYSEDYDDNYDYLESGNWMNDYDSTSHARCGDEVARYLDHLLAHTAPHPKLAPTSQKGGLDRFQAAVQTTCDLMSLVTKAKELHVQNVHMYLPTKLFQASRPSFNLLDSPHPRQENQVPSVRVEIHLPRDQSGEVDFKALVLQLKETSSLQEQADILYMLYTMKGPDWNTELYNERSATVRELLTELYGKVGEIRHWGLIRYISGILRKKVEALDEACTDLLSHQKHLTVGLPPEPREKTISAPLPYEALTQLIDEASEGDMSISILTQEIMVYLAMYMRTQPGLFAEMFRLRIGLIIQVMATELAHSLRCSAEEATEGLMNLSPSAMKNLLHHILSGKEFGVERSVRPTDSNVSPAISIHEIGAVGATKTERTGIMQLKSEIKQVEFRRLSISAESQSNGGHPLGIDLMSPSFMSPGTSMTPSSGSFPSAYDQQSSKDSRQGQWQRRRRLDGALNRVPVGFYQKVWKVLQKCHGLSVEGFVLPSSTTREMTPGEIKFSVHVESVLNRVPQPEYRQLLVEAILVLTMLADIEIHSIGSIIAVEKIVHIANDLFLQEQKTLGADDTMLAKDPASGICTLLYDSAPSGRFGTMTYLSKAAATYVQEFLPHSICAMQ

SEQ ID NO: 130453 - protein, 1223 aa, Artificial Sequence
  derived and/or modified sequence
MRSRSNSGVRLDGYARLVQQTILCHQNPVTGLLPASYDQKDAWVRDNVYSILAVWGLGLAYRKNADRDEDKAKAYELEQSVVKLMRGLLHCMIRQVDKVESFKYSQSTKDSLHAKYNTKTCATVVGDDQWGHLQLDATSVYLLFLAQMTASGLHIIHSLDEVNFIQNLVFYIEAAYKTADFGIWERGDKTNQGISELNASSVGMAKAALEALDELDLFGVKGGPQSVIHVLADEVQHCQSILNSLLPRASTSKEVDASLLSVVSFPAFAVEDSQLVELTKQEIITKLQGRYGCCRFLRDGYKTPKEDPNRLYYEPAELKLFENIECEWPLFWTYFILDGVFSGNAEQVQEYKEALEAVLIKGKNGVPLLPELYSVPPDRVDEEYQNPHTVDRVPMGKLPHMWGQSLYILGSLMAEGFLAPGEIDPLNRRFSTVPKPDVVVQVSILAETEEIKTILKDKGIYVETIAEVYPIRVQPARILSHIYSSLGCNNRMKLSGRPYRHMGVLGTSKLYDIRKTIFTFTPQFIDQQQFYLALDNKMIVEMLRTDLSYLCSRWRMTGQPTITFPISHSMLDEDGTSLNSSILAALRKMQDGYFGGARVQTGKLSEFLTTSCCTHLSFMDPGPEGKLYSEDYDDNYDYLESGNWMNDYDSTSHARCGDEVARYLDHLLAHTAPHPKLAPTSQKGGLDRFQAAVQTTCDLMSLVTKAKELHVQNVHMYLPTKLFQASRPSFNLLDSPHPRQENQVPSVRVEIHLPRDQSGEVDFKALVLQLKETSSLQEQADILYMLYTMKGPDWNTELYNERSATVRELLTELYGKVGEIRHWGLIRYISGILRKKVEALDEACTDLLSHQKHLTVGLPPEPREKTISAPLPYEALTQLIDEASEGDMSISILTQEIMVYLAMYMRTQPGLFAEMFRLRIGLIIQVMATELAHSLRCSAEEATEGLMNLSPSAMKNLLHHILSGKEFGVERSVRPTDSNVSPAISIHEIGAVGATKTERTGIMQLKSEIKQVEFRRLSISAESQSPGTSMTPSSGSFPSAYDQQSSKDSRQGQWQRRRRLDGALNRVPVGFYQKVWKVLQKCHGLSVEGFVLPSSTTREMTPGEIKFSVHVESVLNRVPQPEYRQLLVEAILVLTMLADIEIHSIGSIIAVEKIVHIANDLFLQEQKTLGADDTMLAKDPASGICTLLYDSAPSGRFGTMTYLSKAAATYVQEFLPHSICAMQ

SEQ ID NO: 130454 - DNA, 3723 bp, Artificial Sequence
  derived and/or modified sequence
atgcggagtcgttctaactccggcgtccgcctggatggttacgcacgcttggtacagcaaacaatcctatgtcaccagaatcctgtcactggactcctgccagcctcctatgaccagaaggacgcctgggtcagggataacgtgtatagcatcctggccgtgtggggactcgggctagcatataggaagaacgcggatcgagacgaggataaggcaaaagcctatgagctcgagcagtccgtagtaaaactcatgagggggcttttgcactgcatgatcaggcaagtggataaagtggagtcgttcaagtatagccaatcaacaaaggatagtctgcacgctaagtacaataccaagacctgtgctacagtggtgggggatgaccagtgggggcacctacagcttgatgcaacctcagtttacctcctgttcctcgctcagatgacagcaagtgggctccacatcatccatagcttggacgaagtcaactttatccagaaccttgtgttttatatcgaggccgcttacaagaccgccgatttcggaatatgggaaagaggcgacaagaccaatcagggtattagcgagctgaatgcttcttcagtggggatggcaaaggccgctttagaagctctcgatgagcttgacttgttcggcgtaaagggtggcccacagtcagtgattcatgtgcttgccgacgaggttcagcactgccagtcaatccttaattccctgttgccacgagccagtacctcaaaagaagtcgatgcctctttgctgtcagtggtctcttttccagcttttgcagtagaagatagtcagcttgtagagctgacgaaacaggaaattatcaccaagctgcagggaagatacgggtgttgtcggtttctgcgagatggctacaaaaccccaaaagaggatcctaatagattatactacgagcccgcagaactgaagctattcgaaaacatcgaatgcgagtggcctttattttggacatatttcatattggacggtgtcttcagtgggaacgccgaacaggtgcaagagtacaaggaagccctggaggccgtgctcattaaggggaagaatggagtccccctgcttccagagctgtattcagtacccccggaccgggtagatgaagagtatcagaacccccatacagtagaccgtgtccctatggggaaactgcctcatatgtgggggcagtctttatacatcttaggtagtttgatggccgagggcttcctagccccaggcgaaatcgaccccctcaacaggaggttcagtacagtcccaaaaccagacgtggtggtacaggttagcatcctcgctgaaactgaagagattaaaacaatccttaaggacaaggggatctacgttgaaacaatcgctgaggtatatccaatccgggtgcaaccagctagaattctttcccatatctatagttccctagggtgtaataatcggatgaaactgagtggcaggccctacaggcacatgggtgtgctggggaccagcaagctttacgacatccgcaaaactatatttacctttacaccccagttcatcgatcagcagcaattttatctcgccctggacaacaagatgatcgtagaaatgcttaggactgatttgtcttacctctgcagcaggtggaggatgacaggccagcccaccattacattccctatcagtcacagtatgctagatgaggacggcacaagtctcaattcttctattctggcggctcttcgtaagatgcaggacggatacttcggcggtgctagggttcagacaggtaagctgtctgaattcttgacaacatcttgctgcacacacctgagctttatggatcctggccctgaagggaagctgtattctgaggactacgacgacaattatgactatctggaatctggaaattggatgaacgactacgattcgacaagtcacgcccggtgtggcgacgaagtggccagatatctagatcacctactggcacacacagctccccatccgaaattggcccctaccagccaaaagggcggtctggatcgcttccaggccgctgtgcaaaccacatgtgacctgatgagtctcgtaaccaaagccaaagagctacacgtacagaatgtccacatgtacctccccacaaagttattccaggcctctcggccaagctttaacctgttggactctccgcacccgcgccaagagaatcaggtcccctctgttcgggttgaaatccatctgcccagagatcagagcggagaggtggactttaaggccctggtgttgcaactgaaagaaacatccagtctgcaggagcaggctgacatcctgtacatgctatatactatgaagggaccagattggaacacagaattgtataatgagcggtcagcaacagtaagagaattgctaacggagttgtatggtaaggtaggcgagatccggcattggggcctcattcggtatatcagcggtattctgcgtaagaaggtagaggccttggatgaagcatgtacagacctcctaagccatcagaagcacctgacagtcggactgcccccagaaccaagggagaaaacaatctccgcaccattgccctacgaagccttgactcagcttatcgacgaggcctccgaaggtgacatgagtatcagcattctgacacaggaaattatggtctatctcgccatgtatatgaggacccagcccggcctctttgcagaaatgttccgcttgcgaatcgggcttattatccaagtcatggccaccgagctggctcacagccttagatgttccgcagaggaggccactgaaggccttatgaatctgtctccgtcggctatgaagaacttactgcatcatattctgagcgggaaagagttcggtgtagaaagatcagtccgaccgactgatagtaacgtctccccagccattagtatccatgagattggtgcagtcggggccaccaagactgagcgaacgggaattatgcagttgaaatctgagatcaaacaagtggagttcaggaggctatccatttctgcagagagccagtctaacggcggtcacccactaggcatcgacttaatgagtccttctttcatgtcaccgggtactagcatgacgcccagcagcggcagtttcccttccgcctacgatcagcaatcaagcaaggattccagacagggccagtggcagcgaagaagaaggctcgacggggccttgaatcgagtccccgtgggattctaccagaaggtctggaaggtcctacagaaatgccacggactctccgttgagggattcgtgctcccctcttcgaccactcgagaaatgacgcctggggagatcaagttttccgtccacgtcgagtcagtcttgaacagggtgccccagcccgaatataggcagctgcttgtcgaggcgattttggtgctcactatgctggcagacatagagatacactcaatcggcagcatcattgccgtggagaagatcgtgcacatcgctaacgacctgtttctgcaagaacagaagaccctcggcgctgatgacactatgctcgctaaagatccagcctccggaatatgtacactactttatgattctgctccttccggcagattcgggaccatgacatacttatcgaaagccgcggccacctacgtccaggagttcctaccccattccatctgcgccatgcagtag

SEQ ID NO: 130455 - DNA, 3672 bp, Artificial Sequence
  derived and/or modified sequence
atgcgttcccgcagtaactcaggagttcgcctggacgggtacgccagacttgttcagcagaccattctttgtcaccaaaaccccgtaaccggacttcttcccgcctcttatgaccaaaaggacgcctgggtgagggataatgtctactccattttagctgtgtgggggttagggctggcttaccgcaagaatgctgaccgcgatgaggataaggctaaagcctacgaactggagcaatcagtggtaaaactcatgaggggcctacttcattgtatgattcggcaggttgacaaggtcgagagttttaagtactcccagagcacaaaagatagtctgcatgctaagtacaacaccaagacatgtgcgacggtggtgggggacgatcagtggggccacctccagttagatgcgacttccgtgtatctgctgtttctcgcacagatgaccgcgtcaggtctgcacattattcactccctggacgaggtgaacttcattcaaaacctcgtgttctacatcgaggctgcctacaagacagcagattttggcatctgggagcgtggagataagaccaaccaggggatctcagagctgaacgccagctcagtgggaatggcaaaggccgctctggaggccctcgatgagctcgacctgtttggagtgaaggggggccctcagtctgtgatacatgtgcttgccgacgaagttcagcactgccagtccatcctgaacagtctccttcccagagcttctacgtccaaggaagtcgacgcctctctgctctcagtcgttagctttcccgctttcgctgtcgaagactctcagctggttgagctcacaaagcaggagatcatcaccaagctccagggacggtatgggtgttgccggttcctccgtgatggctacaagaccccaaaagaagatccaaatagactatactatgagcccgctgagctgaagctgttcgaaaacatcgagtgcgagtggcccttgttctggacatatttcatcctggatggagtgttttccggtaacgctgagcaggtacaggaatacaaggaagctttggaggcagtgctcattaaaggaaagaatggagtgcccttgctaccggagctttactccgtgcctccggaccgagtggacgaggaataccagaatcctcatacagtggaccgagtgcctatggggaaattgcctcatatgtggggtcaaagcctctacatactgggatcgctgatggccgaaggatttctggctcctggagagattgacccactgaatcgcaggttttcgacggtgcccaagcccgatgtcgtagtgcaagttagcatactggcggagacagaagagatcaaaacaatcctcaaagataaggggatctacgtggaaacaattgctgaggtgtatcccatcagggtacagcccgctagaatcttgagccatatttactcttctctggggtgtaacaacagaatgaaactgtctgggcgtccttaccggcacatgggggtactcgggacttcaaagctttacgacatcaggaaaactattttcactttcacccctcagttcatcgaccaacagcagttctatctggcactggacaataaaatgatcgtcgaaatgcttcgtactgatctctcctacctgtgtagtaggtggaggatgacggggcagccaacgatcacatttcccatcagccactccatgctggatgaggatggcacttccctgaactcctccatcctggctgcattgcgcaagatgcaggacggttatttcggcggagccagagtgcagaccggaaaactgagtgaattcctgactacatcatgttgtactcacctcagttttatggatcccgggcctgagggcaagctatatagcgaggattatgatgacaactatgactatctagagagcggcaattggatgaatgactatgattctacgtcccatgcccggtgtggagatgaagtcgcccgatatcttgatcacctgctggcccacacagctccccatcccaagctggcgcctacttctcagaaaggcggactggacagattccaggctgcagtgcaaaccacctgcgacctcatgtcactggtaaccaaagccaaagaactacacgtgcaaaatgtccacatgtacctacctaccaagctgttccaagcctctcggccgtctttcaaccttctggattcacctcatccaagacaggagaaccaggttccaagcgtgcgtgtcgaaatccatctcccacgggaccagagcggagaggtggatttcaaggccctcgttcttcaattgaaagagacgtcaagcctgcaggaacaagccgacatactgtatatgctgtacaccatgaagggccctgattggaacacggaactttacaacgaacgctcggccacggtgcgcgaactcttgacagagctgtatggaaaggtgggtgagatacgtcattggggcctgattcgatatatttctggtattctcagaaagaaagtggaggccctggatgaggcttgcaccgacctcctgtcccaccagaaacacctgacagtcgggctcccgccagagccaagggaaaagactatctcggcacctctgccttacgaggctctgacccagctgattgatgaggcttcggagggtgacatgtctatctcaattttgactcaggaaatcatggtctatctcgccatgtacatgaggacacagcccgggctgttcgccgagatgttccggctgcgcatcgggctaataatccaggtaatggctaccgaactggctcacagcctgcgctgtagtgccgaggaagcaaccgagggtttaatgaacttaagccctagcgcgatgaagaatcttttacatcatatcctgagcggaaaagaattcggcgtcgaacggtctgtccgcccaaccgactcaaacgtttcccctgctattagcatccacgagatcggggccgtgggagctacaaagacggagaggactggaattatgcagcttaagtctgagataaaacaggtggaattcaggagactctctatcagcgccgagtcccagagcccgggcacctcaatgaccccatccagcggttcctttccatccgcttatgaccagcagagttcaaaggactctagacagggccagtggcagcgtaggcggcgcctcgacggagcactgaatagagttcccgtgggtttctaccagaaggtgtggaaagtgctgcagaagtgccatggactctcagtggagggattcgttttgccaagctcaaccacacgcgaaatgacacccggcgagattaaatttagcgtccacgtggagagtgtgctgaatagagtgccgcagccagaatacagacaactcctggtcgaagccattcttgtcctgacaatgttggctgatattgagattcactctatcggatcaatcatagccgttgagaagattgtccacatcgccaatgatttgttccttcaggaacagaaaactcttggcgccgatgacaccatgctggccaaggatcccgctagcgggatttgcacgctcctctacgacagtgcgcctagcggtaggttcggcaccatgacttaccttagtaaggctgccgccacctatgtgcaagagtttctccctcactccatctgtgctatgcaatag

SEQ ID NO: 130456 - DNA, 3723 bp, Artificial Sequence
  derived and/or modified sequence
atgaggagccgcagcaacagcggcgtgcggctggatggctacgcccggctggtgcagcagaccatcctgtgccaccagaaccctgtgacaggcctgctgcctgccagctatgaccagaaggatgcctgggtgcgggacaacgtgtacagcatcctggccgtgtggggcctgggcctggcctacaggaagaatgctgacagagatgaggacaaggccaaggcctatgagctggagcagagcgtggtgaagctgatgaggggcctgctgcactgcatgatccggcaggtggacaaggtggagagcttcaagtacagccagagcaccaaggacagcctgcacgccaagtacaacaccaagacctgtgccaccgtggtgggagatgaccagtggggccacctgcagctggatgccacctctgtgtacctgctcttcctggcccagatgacagccagcggcctgcacatcatccacagcctggatgaggtgaacttcatccagaacctggtgttctacatcgaggccgcctacaagacagctgactttggcatctgggagcggggggacaagaccaaccagggcatcagcgagctgaatgccagctctgtgggcatggccaaggccgccctggaggccctggatgagctggacctgtttggagtgaagggcggcccccagagcgtcatccacgtgctggctgatgaggtgcagcactgccagagcatcctgaacagcctgctgccccgggccagcaccagcaaggaggtggatgccagcctgctgtctgtggtgtccttccctgcctttgctgtggaggacagccagctggtggagctgaccaagcaggagatcatcaccaagctgcagggccgctatggctgctgccgcttcctgagagatggctacaagacccccaaggaggaccccaacagactctactatgagcctgctgagctgaagctgtttgagaacattgaatgtgagtggcccctcttctggacctacttcatcctggatggagtcttctctggaaatgctgagcaggtgcaggagtacaaggaggccctggaggccgtgctgatcaagggcaagaatggagtgcccctgctgcctgagctgtacagcgtgcccccagacagagtggatgaggagtaccagaacccccacacagtggacagagtgcccatgggcaagctgccccacatgtggggccagagcctgtacatcctgggcagcctgatggccgagggcttcctggcccctggagaaattgaccccctgaacagacgcttcagcacagtgcccaagccagatgtggtggtgcaggtgtccatcctggccgagacagaggagatcaagaccatcctgaaggacaagggcatctacgtggagaccatcgccgaggtgtaccccatccgggtgcagcctgcccgcatcctgagccacatctacagcagcctgggctgcaacaacaggatgaagctgagcggccggccctaccgccacatgggcgtgctgggcaccagcaagctgtatgacatcaggaagaccatcttcaccttcaccccccagttcatcgaccagcagcagttctacctggccctggacaacaagatgattgtggagatgctgaggacagacctgagctacctgtgcagccgctggaggatgacaggccagcccaccatcaccttccccatcagccacagcatgctggatgaagatggcaccagcctgaacagcagcatcctggccgccctgaggaagatgcaggacggctactttggaggagcccgggtgcagacaggcaagctgtctgagttcctgaccaccagctgctgcacccacctgtccttcatggaccccggccctgagggcaagctgtacagcgaggactatgatgacaactatgactacctggagagcggcaactggatgaatgactatgacagcaccagccacgcccgctgtggagatgaggtggcccgctacctggaccacctgctggcccacacagccccccaccccaagctggcccccaccagccagaagggcggcctggaccgcttccaggccgctgtgcagaccacctgtgacctgatgagcctggtgaccaaggccaaggagctgcacgtgcagaatgtgcacatgtacctgcccaccaagctgttccaggccagccggcccagcttcaacctgctggacagcccccacccccggcaggagaaccaggtgcccagcgtgcgggtggagatccacctgccccgggaccagagcggggaggtggacttcaaggccctggtgctgcagctgaaggagaccagcagcctgcaggagcaggccgacatcctgtacatgctgtacaccatgaagggccctgactggaacacagagctgtacaatgaaagaagtgccaccgtgcgggagctgctgacagagctgtatggcaaggtgggggagatccgccactggggcctcatccgctacatcagcggcatcctgaggaagaaggtggaggccctggatgaggcctgcacagacctgctgagccaccagaagcacctgactgtgggcctgcccccagagccccgggagaagaccatcagcgcccccctgccctatgaggccctgacccagctgattgatgaggccagcgagggggacatgagcatcagcatcctgacccaggagatcatggtgtacctggccatgtacatgaggacccagcccggcctgtttgctgagatgttccggctgcgcatcggcctcatcatccaggtgatggccacagagctggcccacagcctgcgctgcagcgctgaggaggccacagagggcctgatgaacctgagccccagcgccatgaagaacctgctgcaccacatcctgagcggcaaggagtttggagtggagaggtctgtgcggcccacagacagcaatgtgtccccagccatcagcatccatgaaattggagctgtgggcgccaccaagacagagaggacaggcatcatgcagctgaagtctgagatcaagcaggtggagttccggcggctgagcatctctgctgagagccagagcaatggaggccaccccctgggcatcgacctgatgagccccagcttcatgagccctggcacctccatgacccccagcagcggcagcttccccagcgcctatgaccagcagagcagcaaggacagccggcagggccagtggcagaggagaagaaggctggatggagccctgaacagagtgcctgtgggcttctaccagaaggtgtggaaggtgctgcagaagtgccacggcctgtctgtggagggctttgtgctgcccagcagcaccacccgggagatgaccccaggagagatcaagttctctgtgcacgtggagagcgtgctgaacagagtgccccagcctgagtaccggcagctgctggtggaggccatcctggtgctgaccatgctggccgacatcgagatccacagcatcggcagcatcatcgctgtggagaagatcgtgcacatcgccaatgacctcttcctgcaggagcagaagaccctgggcgcagatgacaccatgctggccaaggaccctgccagcggcatctgcaccctgctgtatgacagcgcccccagcggccgcttcggcaccatgacctacctgagcaaggccgccgccacctacgtgcaggagttcctgccccacagcatctgtgccatgcagtag

SEQ ID NO: 130457 - DNA, 3672 bp, Artificial Sequence
  derived and/or modified sequence
atgaggagccgcagcaacagcggcgtgcggctggatggctacgcccggctggtgcagcagaccatcctgtgccaccagaaccctgtgacaggcctgctgcctgccagctatgaccagaaggatgcctgggtgcgggacaacgtgtacagcatcctggccgtgtggggcctgggcctggcctacaggaagaatgctgacagagatgaggacaaggccaaggcctatgagctggagcagagcgtggtgaagctgatgaggggcctgctgcactgcatgatccggcaggtggacaaggtggagagcttcaagtacagccagagcaccaaggacagcctgcacgccaagtacaacaccaagacctgtgccaccgtggtgggagatgaccagtggggccacctgcagctggatgccacctctgtgtacctgctcttcctggcccagatgacagccagcggcctgcacatcatccacagcctggatgaggtgaacttcatccagaacctggtgttctacatcgaggccgcctacaagacagctgactttggcatctgggagcggggggacaagaccaaccagggcatcagcgagctgaatgccagctctgtgggcatggccaaggccgccctggaggccctggatgagctggacctgtttggagtgaagggcggcccccagagcgtcatccacgtgctggctgatgaggtgcagcactgccagagcatcctgaacagcctgctgccccgggccagcaccagcaaggaggtggatgccagcctgctgtctgtggtgtccttccctgcctttgctgtggaggacagccagctggtggagctgaccaagcaggagatcatcaccaagctgcagggccgctatggctgctgccgcttcctgagagatggctacaagacccccaaggaggaccccaacagactctactatgagcctgctgagctgaagctgtttgagaacattgaatgtgagtggcccctcttctggacctacttcatcctggatggagtcttctctggaaatgctgagcaggtgcaggagtacaaggaggccctggaggccgtgctgatcaagggcaagaatggagtgcccctgctgcctgagctgtacagcgtgcccccagacagagtggatgaggagtaccagaacccccacacagtggacagagtgcccatgggcaagctgccccacatgtggggccagagcctgtacatcctgggcagcctgatggccgagggcttcctggcccctggagaaattgaccccctgaacagacgcttcagcacagtgcccaagccagatgtggtggtgcaggtgtccatcctggccgagacagaggagatcaagaccatcctgaaggacaagggcatctacgtggagaccatcgccgaggtgtaccccatccgggtgcagcctgcccgcatcctgagccacatctacagcagcctgggctgcaacaacaggatgaagctgagcggccggccctaccgccacatgggcgtgctgggcaccagcaagctgtatgacatcaggaagaccatcttcaccttcaccccccagttcatcgaccagcagcagttctacctggccctggacaacaagatgattgtggagatgctgaggacagacctgagctacctgtgcagccgctggaggatgacaggccagcccaccatcaccttccccatcagccacagcatgctggatgaagatggcaccagcctgaacagcagcatcctggccgccctgaggaagatgcaggacggctactttggaggagcccgggtgcagacaggcaagctgtctgagttcctgaccaccagctgctgcacccacctgtccttcatggaccccggccctgagggcaagctgtacagcgaggactatgatgacaactatgactacctggagagcggcaactggatgaatgactatgacagcaccagccacgcccgctgtggagatgaggtggcccgctacctggaccacctgctggcccacacagccccccaccccaagctggcccccaccagccagaagggcggcctggaccgcttccaggccgctgtgcagaccacctgtgacctgatgagcctggtgaccaaggccaaggagctgcacgtgcagaatgtgcacatgtacctgcccaccaagctgttccaggccagccggcccagcttcaacctgctggacagcccccacccccggcaggagaaccaggtgcccagcgtgcgggtggagatccacctgccccgggaccagagcggggaggtggacttcaaggccctggtgctgcagctgaaggagaccagcagcctgcaggagcaggccgacatcctgtacatgctgtacaccatgaagggccctgactggaacacagagctgtacaatgaaagaagtgccaccgtgcgggagctgctgacagagctgtatggcaaggtgggggagatccgccactggggcctcatccgctacatcagcggcatcctgaggaagaaggtggaggccctggatgaggcctgcacagacctgctgagccaccagaagcacctgactgtgggcctgcccccagagccccgggagaagaccatcagcgcccccctgccctatgaggccctgacccagctgattgatgaggccagcgagggggacatgagcatcagcatcctgacccaggagatcatggtgtacctggccatgtacatgaggacccagcccggcctgtttgctgagatgttccggctgcgcatcggcctcatcatccaggtgatggccacagagctggcccacagcctgcgctgcagcgctgaggaggccacagagggcctgatgaacctgagccccagcgccatgaagaacctgctgcaccacatcctgagcggcaaggagtttggagtggagaggtctgtgcggcccacagacagcaatgtgtccccagccatcagcatccatgaaattggagctgtgggcgccaccaagacagagaggacaggcatcatgcagctgaagtctgagatcaagcaggtggagttccggcggctgagcatctctgctgagagccagagccctggcacctccatgacccccagcagcggcagcttccccagcgcctatgaccagcagagcagcaaggacagccggcagggccagtggcagaggagaagaaggctggatggagccctgaacagagtgcctgtgggcttctaccagaaggtgtggaaggtgctgcagaagtgccacggcctgtctgtggagggctttgtgctgcccagcagcaccacccgggagatgaccccaggagagatcaagttctctgtgcacgtggagagcgtgctgaacagagtgccccagcctgagtaccggcagctgctggtggaggccatcctggtgctgaccatgctggccgacatcgagatccacagcatcggcagcatcatcgctgtggagaagatcgtgcacatcgccaatgacctcttcctgcaggagcagaagaccctgggcgcagatgacaccatgctggccaaggaccctgccagcggcatctgcaccctgctgtatgattctgcccccagcggccgcttcggcaccatgacctacctgagcaaggctgctgccacctacgtgcaggagttcctgccccacagcatctgtgccatgcagtag

SEQ ID NO: 130458 - DNA, 3723 bp, Artificial Sequence
  derived and/or modified sequence
atgcggagccggagcaacagcggcgtgcggctggacggctacgccagactcgtgcagcaaacgattctgtgtcaccagaacccggtcacagggcttctgcccgccagttatgaccagaaggatgcttgggtgagagataatgtgtacagcatactggccgtctggggattggggctggcctaccgcaagaatgccgatagggatgaggataaggccaaagcatatgagctcgagcaatcagtggtcaagttgatgcgtgggctgctgcactgtatgatccgccaggtggacaaggtcgagtcatttaagtacagtcagtcaaccaaggactctcttcacgcaaaatacaatactaagacatgtgcaacggtggtgggagatgaccagtggggacatttacagcttgacgccacgtccgtatatctactgttcctggcccaaatgacggcttcagggctgcatattatccacagcctcgatgaggttaacttcatccagaaccttgtgttctatatcgaggctgcatacaagactgccgactttggcatttgggagcgaggggacaagaccaaccagggtatctctgagctgaacgcaagttcagtgggcatggccaaggcagccctggaagctctggacgagctggatctgttcggggtgaagggcggtccccaatccgtgatccacgtcctcgcagatgaagtccaacattgccagtccatcctgaacagtctgctgcctcgtgcctcaacttctaaggaagttgatgcaagtcttcttagtgtggtgagcttccccgccttcgcggtagaagacagtcaactagtggagctgactaagcaggagattatcactaaactgcagggacgctacggctgttgcaggtttttgcgagacggctataagacccctaaggaagacccaaacaggctgtactatgaacctgccgaactcaaactattcgaaaatatcgagtgcgagtggccactcttttggacttacttcattctcgacggggtctttagcggcaatgctgagcaggtgcaggagtataaagaggcacttgaagctgtgctaatcaagggaaagaatggagtaccactcctacccgaactctacagcgttccccccgatagggtcgatgaggagtaccagaacccccacaccgtggatagggtgccaatgggaaagctgccacacatgtggggacaaagtctttatatcttgggctcactgatggctgaggggtttctggcaccaggcgagatcgaccccctgaaccggcggttcagcactgtccctaagcccgacgtcgtggtgcaggtgtcaatcctagccgaaaccgaagaaataaaaaccattttgaaggacaaggggatctatgtggagacaatcgcagaagtgtatcccatccgcgtgcagcctgccaggatattaagtcatatttacagctccctcggctgcaataacaggatgaaactgagtgggcgaccctaccgccacatgggcgtgttagggactagcaagctgtatgacatccgaaagaccattttcacattcacccctcagtttatagatcagcaacagttctacttagcattagataataagatgattgtggaaatgcttcgaaccgatttaagttacctgtgtagccgatggagaatgacaggccagcccacgattacgttcccaattagccattctatgctggatgaggatggcaccagcttgaactcctccattctggcagccttacgcaagatgcaagatgggtacttcgggggcgctcgcgtgcaaactggcaagctaagcgagttccttacaacatcttgttgtacacacctctctttcatggatcccggtcctgaggggaagctttactccgaagattacgatgataattatgactacctggagagcggcaactggatgaatgactacgatagcactagccatgctaggtgtggagatgaggtggctcgttacctggatcatttgctggcccacaccgcccctcaccccaagctggctcccaccagtcagaaaggcggcttagaccgatttcaggctgcagtgcaaacaacttgcgaccttatgagcttggtgaccaaggctaaggaactgcacgttcagaacgttcatatgtatctgccaacaaaactctttcaggcttcccgtccatcatttaatctgctcgactcaccgcatccacggcaggagaaccaggtccctagtgtgcgggtagaaatccatcttccaagagatcagagcggggaggttgattttaaggccctggtgctccagctgaaagaaacctcttcccttcaagaacaggctgatattctctacatgttgtatacgatgaagggccctgattggaacacggagctttacaatgaacgcagcgcgaccgttagagaactgctgacggaattgtatggcaaagtgggggaaatccggcattgggggttgatccgatacatctcaggtatcctcaggaaaaaggtcgaggcgctggatgaggcttgtacagatcttttgagccaccagaagcacctaaccgtggggttgccccctgaacctagagaaaaaacaattagcgcaccattaccctacgaggccttaactcaactcattgatgaagcatctgaaggagatatgtcaatttccatattgacacaggagatcatggtttacctagccatgtatatgcggacgcagccgggactgttcgccgagatgttccgcttgcggattggtctgattatccaggttatggcgaccgagttagcccatagtttgcggtgcagcgcagaagaagccaccgaaggactcatgaacctctccccctcggcgatgaaaaatcttctccaccacattctgtccggaaaggagtttggcgtggagaggtctgtaaggcctacggactctaacgtatcacctgccataagtatccacgagatcggggctgtgggcgctactaaaaccgagcggacaggcattatgcagctaaaatctgaaatcaagcaggtggaatttaggcggcttagcatttccgccgagagccagagtaatggaggacaccccctggggattgatctcatgtctcctagctttatgagccccggaacttcaatgacccctagctctggtagcttcccttcagcctacgaccagcaatcctctaaagatagtcggcagggacagtggcagcgcagacgaagattggacggagccttaaatcgggtgcctgttggcttctaccaaaaggtttggaaggtgctgcaaaagtgccacggtctgagcgtggaagggttcgtgctcccttccagtactacccgcgaaatgactccaggtgagatcaaattctcagttcatgttgagagcgtcctcaacagggtgccacaacccgaataccgacagctactggttgaggccattttagtgcttacgatgttggcagacatcgaaatccactccatcgggtctattatcgctgtggagaagatcgtccacatcgccaatgacctgtttctgcaggaacagaaaacgctgggggcagacgacacgatgttagctaaagatcctgcttcaggtatatgcaccttgctgtatgacagcgcccctagcggccggttcggtaccatgacatatctaagtaaggccgccgcaacgtacgttcaggagttcctcccccactcaatctgcgcaatgcagtag

SEQ ID NO: 130459 - DNA, 3672 bp, Artificial Sequence
  derived and/or modified sequence
atgcggagccggagcaacagcggcgtgcggctggacggctacgcccgcttagtccagcagacaatactttgtcaccagaacccagtcaccggccttctgcccgcatcttatgatcagaaggacgcttgggttcgtgataatgtgtactctatactggcagtctggggactgggcctggcctacaggaagaacgctgacagggacgaggataaggccaaagcctacgagttggagcaatcagtggtgaagcttatgcggggactccttcactgcatgatccgtcaggtcgacaaagtcgaatcatttaaatatagtcaatctacaaaagactctctgcacgccaaatacaacacaaaaacgtgcgcgactgtggtcggcgacgatcagtggggccacctacagctcgacgccacaagcgtgtacctgctttttctggctcaaatgaccgccagtggactacacattatccatagtctggatgaggtgaattttatccagaaccttgtgttctacatcgaggccgcttataagacagcggatttcggtatctgggagcggggcgataaaacaaaccaggggatttcggagctgaatgcttcctccgtcgggatggctaaagccgcacttgaagcattggatgaactggacctatttggcgtaaagggcggaccacagtctgtcattcatgtcctggctgatgaggtgcagcactgtcagtctattctgaatagcctactccccagagctagtactagcaaggaggtcgacgcctcccttctatccgtcgtatcatttcccgcgttcgccgtcgaggactcacagctggtagaattgacaaagcaagagatcattacaaaactgcagggcagatacggctgctgcaggtttctgagagatggatataagaccccaaaggaagatccaaatcgcctgtattacgagccggcagaactgaagttatttgaaaatatagaatgtgagtggccacttttctggacctacttcatcctggatggcgtatttagtggcaatgccgaacaagtacaggagtacaaagaggccctagaagccgtactgattaaaggaaagaacggtgtgccgctgcttcctgaattatattcagtgcctccggatcgcgtggatgaagaataccagaacccccacaccgttgacagggtaccgatgggaaagctgcctcacatgtggggtcaatcattatacatacttggctccctgatggctgaaggtttcctggctccaggcgaaatcgaccccctaaataggaggttctctactgtgccaaagcctgacgttgtggttcaggtctcaatccttgccgaaacagaggaaattaagacgatcctgaaggataaggggatctatgtggagaccatcgccgaggtgtatcccattagagtccaaccagcccgcattctgtcgcatatatactctagtctgggctgtaacaacagaatgaagctcagcggtagaccctacaggcacatgggcgtcctcggcacaagtaaactgtatgacattaggaagacaatctttacctttaccccccagttcattgatcaacagcagttctacctcgcgctggataataagatgattgtggagatgctcagaactgacctctcgtatctgtgtagtaggtggaggatgacaggacagcccaccatcacctttcctatctcccattctatgctcgatgaggacgggacttccttaaactcaagtattcttgcagccctgagaaagatgcaggatgggtactttggaggcgcccgggtgcagactgggaagctgtcagagttcctgactacaagttgctgtacccatctgtcttttatggaccccggacctgaggggaagttgtatagcgaggattacgacgataactacgattacctagagtccggtaactggatgaacgactatgattctacatcacatgctcgctgtggcgacgaggtagccaggtacttagaccacctgctggcgcataccgccccacaccctaagttagcacccacctctcagaaagggggattggatcgctttcaggctgccgtccagacaacgtgcgatctgatgagccttgtcacaaaagcgaaggagctccacgtgcagaacgtgcacatgtacctacccacgaagctctttcaggcatcgcgacctagctttaacttactcgatagtccccatcctaggcaggaaaatcaagtgcccagtgtcagggtcgagattcacctcccaagagatcaaagcggagaagtggattttaaggctctggtgttgcagttgaaggagacctcttcattgcaggagcaagccgatatactgtacatgctctatacaatgaaaggcccagattggaatactgagctgtacaatgagcgctctgctacagtccgggagcttttaaccgagctgtatggtaaggttggagaaattcgacactggggactgattagatatatctccgggattcttagaaagaaagttgaggctctggatgaggcctgtacagatcttctgagccaccagaagcacttaacagttggattgccaccggagcctagggagaaaacaatctctgcgccactgccatacgaggcattaacccaacttatcgatgaggcatccgaaggagacatgagtatctcgattctgacacaggaaatcatggtgtacctagccatgtatatgcgcacccagcctgggctgtttgccgaaatgtttagactgaggattggtctcattatccaggtcatggccaccgagctggcgcactccttacgatgtagtgccgaggaggctacagaaggacttatgaatctctcaccttccgctatgaaaaatctgttgcaccacatcctctcaggtaaggaattcggggtggagagatcggttcggcccaccgactcgaacgtgtcccccgctattagcatccacgagattggcgctgtaggcgctaccaagacagagcgcaccggcatcatgcagctcaagagtgagattaagcaggtagagttccgaaggctgtccatatctgccgaaagccaaagccctggtacatctatgacaccatcttccggctcattcccatcagcgtacgatcagcagagcagcaaagactcaagacaggggcagtggcaaaggaggcgccggttggatggagccttgaaccgggtcccagtgggtttttaccagaaggtatggaaagtgttgcagaagtgccatgggctctccgtagaaggctttgtgctgccaagctcaactactcgcgaaatgacccctggtgagattaaatttagtgttcacgtggaatccgttctgaatagggttccacagcccgagtaccggcaactgttggtggaggccatcctagttctgactatgctggccgatatcgagatccactcaatcggatcaataattgccgttgaaaagatcgtacatattgccaatgacctcttcctgcaggagcaaaaaactttgggcgccgacgataccatgctagctaaagaccccgcctccgggatttgtactttactctacgattctgcaccgtcaggtcgtttcggtacaatgacttacctcagcaaagctgccgccacctacgtccaagaattcctgcctcattcgatctgtgctatgcaatag

SEQ ID NO: 130460 - DNA, 4476 bp, Artificial Sequence
  derived and/or modified sequence
gacctgttggcggcggccgggcgggaggctgtgggccgcggcggtctcccggggttgaggggaggatgcaggagtcacacgcggaggccggactggactaagggggcaggagcggcgcctggggcgctgcggcggggctctagaccgcgggaagccagtgctagcgctggcgcgtggtgggcccctgaggccgccggagtccggagaggtacgcggaatccgcggcgccaggcctgagcggtgggagggctctgcggggcctggtgttcaggcgtcccaccacgagggtggagcagcgttggatacttgttccttagggaccgaaggctccggtggcacccgggctatttctcagaggacaattagtaacgtgtcgccatgaggagccggagtaactccggggtccggctggacggctacgctcgactggtgcaacagaccatcctgtgccatcagaatccagtgactggcttgcttccagccagctatgatcagaaagatgcttgggtccgagataatgtgtacagcatcttggctgtgtggggtttgggcctggcctatcggaagaatgcagaccgggatgaggataaggcaaaggcctatgaattggagcagagtgtagtgaagctgatgagaggactactgcactgcatgatcagacaggtggataaagtagaatccttcaaatatagtcagagtactaaggatagcctccatgcaaagtacaacaccaaaacctgtgccactgtagtgggtgatgatcaatggggacacctgcagttggatgctacctctgtgtacctgctcttcttagcccaaatgactgcctcaggactccatatcatccacagcctagatgaagtcaatttcatacagaaccttgtgttttacattgaagctgcatataaaactgctgacttcgggatatgggaacgtggagacaagaccaaccaagggatctcagagttgaatgccagttcagttggaatggcaaaggcagccctggaagcattagatgaactggatctgtttggtgtgaaaggtgggcctcaatcagttatccatgtcctggctgatgaagtacagcactgccagtctatcctaaattcactactgccccgtgcttcaacatcaaaagaggttgatgctagtctactctcagtggtttccttccctgcctttgcagtagaggatagccagttggtggagctcacaaaacaggaaatcatcaccaagcttcagggtcgttatggttgctgtcgctttctacgagatggatataaaactcctaaagaggatcccaatcgtctgtactatgaaccagctgagctgaagctatttgaaaacattgagtgtgaatggccattgttctggacatactttattcttgatggggtcttcagtggcaatgcagaacaggttcaagaatataaagaggctcttgaagcagtcctcatcaagggcaaaaatggagtcccacttctgccagagctgtacagtgttcctcctgacagggtcgatgaagaatatcagaatcctcacactgtggaccgagtccccatggggaaattgcctcacatgtggggtcagtctctatacattttaggaagcttgatggcagagggatttttagcccctggagaaattgatcccctgaatcgcaggttttctactgtaccgaagcccgatgttgtggttcaagtctccattctagctgaaacagaagaaatcaagaccattttgaaggacaagggaatttacgtggagaccattgctgaggtataccccatcagagtacaaccagctcgtattctcagccacatttattccagcctaggatgcaacaatagaatgaaactcagtggacgaccctacagacacatgggagtgcttggaacttcaaaactctatgacattcggaaaactatctttactttcactccacagtttatagaccagcaacagttctacctggctctggacaacaagatgatagtggaaatgcttagaacagacctctcctacctctgtagccgctggcggatgacaggccagcccaccatcaccttccccatctcacacagcatgcttgatgaagatggaacaagcttgaattcaagtatcctggcagcactccgaaaaatgcaagatgggtattttggtggggcaagggttcaaacaggtaaattgtcagagtttttgacaacatcttgttgcacacacttgagcttcatggaccctggacctgagggtaagctgtacagtgaagattatgatgacaactatgattacctggaatctggcaactggatgaatgattatgattcaaccagtcatgctcgctgtggtgatgaagttgctcgttatttagatcaccttttggcgcacactgctccccatcctaaactagcccctacctcacagaagggagggctagatcggttccaagctgctgtgcaaacaacctgcgacttaatgtccttggtgaccaaggccaaggaactgcatgtacagaatgttcacatgtatcttcctacgaagttatttcaggcttcccggccttcattcaacttacttgattcacctcatccccgacaggagaaccaggttccctctgttcgtgtagaaatacatcttcctagagaccagtctggggaggtggactttaaagcactggttttacagttgaaggagacctcaagcttacaggaacaagctgatatcctctatatgctgtatactatgaaaggacctgactggaacactgaattgtataatgaacggagtgctacagtgagagagcttcttaccgagctgtatggcaaagtgggagaaattcgtcactggggcctgatccgatacatttctgggatcttaaggaagaaagtggaagcacttgatgaggcctgcacagaccttctctcccaccagaaacatttgacagtaggacttcctccagaacctcgagaaaagactatctctgcacctctgccctatgaggcgctcactcagctgatagatgaagccagtgaaggggatatgagcatttcaatccttacacaggaaataatggtatatctagccatgtatatgcgaacccagcctggcctctttgctgaaatgtttcgacttcgaattggtctgatcatacaagttatggcaacagaactggcccactcccttcgatgctcagctgaggaagccacagagggcctgatgaatctcagtccttcggccatgaagaatctcctgcatcacattctcagcggcaaggagtttggagtggaacgaagcgttcgtcccactgattcaaatgtcagtcctgctatttctatccacgagattggtgctgttggagcaaccaaaacagaacgaactgggatcatgcagttaaaaagtgagataaagcaggtggaatttcgtagactgtcaatctcagctgagagtcagtccaatggtggtcatcccctgggtatagatttgatgtcaccgtcttttatgtcacctggaacctctatgactccaagtagtgggtcctttcctagtgcatatgatcagcagtcatctaaagatagtcgtcaaggtcaatggcaacgccgaagaaggctggatggggcactgaatagagttccagttggattttatcagaaagtatggaaagttttgcagaagtgtcacggactttctgttgaagggtttgtccttccttcctctaccactagagagatgactccaggtgagattaaattctctgttcatgtggagtctgtcctgaatcgtgtacctcagccagagtaccgtcagctgctggttgaagccatccttgtcctcaccatgctggcagatattgaaattcatagcatcggaagcatcattgctgtggaaaaaatagtgcatattgccaatgacttgttccttcaagaacagaaaacccttggcgcagatgataccatgttggcaaaggatcccgcatctggcatctgtactcttctgtatgacagtgcacccagtggcaggtttggcaccatgacctacctctccaaggcagccgccacctacgtgcaggagttcctgccccacagcatctgtgccatgcaatgagggctttggttcctggcttctgggagccttttgacagctggtccctgcctcggttgattgtgcatggaactaaaatgttattgcctaatcactccaaccctgcccctttctgtcccatccttcccaagaagagagaactttttcgataaactaactactgtagaagaagtgaacacttacctggaggctcaccttgcagaaccagtgacaatcttatgagtataatgaacactcagccaggcctgtcatgattggctttatttctttcatcattcataaaagtttgcatgtgtttttattctctagatctgttaccaatatagttttctaactcctgtttggggagcaagtgttaataataacttattcctaaag

SEQ ID NO: 130461 - DNA, 6020 bp, Artificial Sequence
  derived and/or modified sequence
tccgcggcgccaggcctgagcggtgggagggctctgcggggcctggtgttcaggcgtcccaccacgagggtggagcagcgttggatacttgttccttagggaccgaaggctccggtggcacccgggctatttctcagaggacaattagtaacgtgtcgccatgaggagccggagtaactccggggtccggctggacggctacgctcgactggtgcaacagaccatcctgtgccatcagaatccagtgactggcttgcttccagccagctatgatcagaaagatgcttgggtccgagataatgtgtacagcatcttggctgtgtggggtttgggcctggcctatcggaagaatgcagaccgggatgaggataaggcaaaggcctatgaattggagcagagtgtagtgaagctgatgagaggactactgcactgcatgatcagacaggtggataaagtagaatccttcaaatatagtcagagtactaaggatagcctccatgcaaagtacaacaccaaaacctgtgccactgtagtgggtgatgatcaatggggacacctgcagttggatgctacctctgtgtacctgctcttcttagcccaaatgactgcctcaggactccatatcatccacagcctagatgaagtcaatttcatacagaaccttgtgttttacattgaagctgcatataaaactgctgacttcgggatatgggaacgtggagacaagaccaaccaagggatctcagagttgaatgccagttcagttggaatggcaaaggcagccctggaagcattagatgaactggatctgtttggtgtgaaaggtgggcctcaatcagttatccatgtcctggctgatgaagtacagcactgccagtctatcctaaattcactactgccccgtgcttcaacatcaaaagaggttgatgctagtctactctcagtggtttccttccctgcctttgcagtagaggatagccagttggtggagctcacaaaacaggaaatcatcaccaagcttcagggtcgttatggttgctgtcgctttctacgagatggatataaaactcctaaagaggatcccaatcgtctgtactatgaaccagctgagctgaagctatttgaaaacattgagtgtgaatggccattgttctggacatactttattcttgatggggtcttcagtggcaatgcagaacaggttcaagaatataaagaggctcttgaagcagtcctcatcaagggcaaaaatggagtcccacttctgccagagctgtacagtgttcctcctgacagggtcgatgaagaatatcagaatcctcacactgtggaccgagtccccatggggaaattgcctcacatgtggggtcagtctctatacattttaggaagcttgatggcagagggatttttagcccctggagaaattgatcccctgaatcgcaggttttctactgtaccgaagcccgatgttgtggttcaagtctccattctagctgaaacagaagaaatcaagaccattttgaaggacaagggaatttacgtggagaccattgctgaggtataccccatcagagtacaaccagctcgtattctcagccacatttattccagcctaggatgcaacaatagaatgaaactcagtggacgaccctacagacacatgggagtgcttggaacttcaaaactctatgacattcggaaaactatctttactttcactccacagtttatagaccagcaacagttctacctggctctggacaacaagatgatagtggaaatgcttagaacagacctctcctacctctgtagccgctggcggatgacaggccagcccaccatcaccttccccatctcacacagcatgcttgatgaagatggaacaagcttgaattcaagtatcctggcagcactccgaaaaatgcaagatgggtattttggtggggcaagggttcaaacaggtaaattgtcagagtttttgacaacatcttgttgcacacacttgagcttcatggaccctggacctgagggtaagctgtacagtgaagattatgatgacaactatgattacctggaatctggcaactggatgaatgattatgattcaaccagtcatgctcgctgtggtgatgaagttgctcgttatttagatcaccttttggcgcacactgctccccatcctaaactagcccctacctcacagaagggagggctagatcggttccaagctgctgtgcaaacaacctgcgacttaatgtccttggtgaccaaggccaaggaactgcatgtacagaatgttcacatgtatcttcctacgaagttatttcaggcttcccggccttcattcaacttacttgattcacctcatccccgacaggagaaccaggttccctctgttcgtgtagaaatacatcttcctagagaccagtctggggaggtggactttaaagcactggttttacagttgaaggagacctcaagcttacaggaacaagctgatatcctctatatgctgtatactatgaaaggacctgactggaacactgaattgtataatgaacggagtgctacagtgagagagcttcttaccgagctgtatggcaaagtgggagaaattcgtcactggggcctgatccgatacatttctgggatcttaaggaagaaagtggaagcacttgatgaggcctgcacagaccttctctcccaccagaaacatttgacagtaggacttcctccagaacctcgagaaaagactatctctgcacctctgccctatgaggcgctcactcagctgatagatgaagccagtgaaggggatatgagcatttcaatccttacacaggaaataatggtatatctagccatgtatatgcgaacccagcctggcctctttgctgaaatgtttcgacttcgaattggtctgatcatacaagttatggcaacagaactggcccactcccttcgatgctcagctgaggaagccacagagggcctgatgaatctcagtccttcggccatgaagaatctcctgcatcacattctcagcggcaaggagtttggagtggaacgaagcgttcgtcccactgattcaaatgtcagtcctgctatttctatccacgagattggtgctgttggagcaaccaaaacagaacgaactgggatcatgcagttaaaaagtgagataaagcaggtggaatttcgtagactgtcaatctcagctgagagtcagtcacctggaacctctatgactccaagtagtgggtcctttcctagtgcatatgatcagcagtcatctaaagatagtcgtcaaggtcaatggcaacgccgaagaaggctggatggggcactgaatagagttccagttggattttatcagaaagtatggaaagttttgcagaagtgtcacggactttctgttgaagggtttgtccttccttcctctaccactagagagatgactccaggtgagattaaattctctgttcatgtggagtctgtcctgaatcgtgtacctcagccagagtaccgtcagctgctggttgaagccatccttgtcctcaccatgctggcagatattgaaattcatagcatcggaagcatcattgctgtggaaaaaatagtgcatattgccaatgacttgttccttcaagaacagaaaacccttggcgcagatgataccatgttggcaaaggatcccgcatctggcatctgtactcttctgtatgacagtgcacccagtggcaggtttggcaccatgacctacctctccaaggcagccgccacctacgtgcaggagttcctgccccacagcatctgtgccatgcaatgagggctttggttcctggcttctgggagccttttgacagctggtccctgcctcggttgattgtgcatggaactaaaatgttattgcctaatcactccaaccctgcccctttctgtcccatccttcccaagaagagagaactttttcgataaactaactactgtagaagaagtgaacacttacctggaggctcaccttgcagaaccagtgacaatcttatgagtataatgaacactcagccaggcctgtcatgattggctttatttctttcatcattcataaaagtttgcatgtgtttttattctctagatctgttaccaatatagttttctaactcctgtttggggagcaagtgttaataataacttattcctaaagcttggtttttcttttttgtgattttattgtgtatatgagtggtgggtactttgggacattatttcaaatgagtaaactctaaattgttaaatatttatgctgctataaattagaattacctattctacgtgccttttcttaggaaaagagagtactggatcatggttttcttccttacttacaggttgcttcacactgagtgataatttaaaattgtttctatgtagaatcattgtctctactgttgccctctctgtgtctgcacacataatgcctctctcactttggtgaaatatcaaaaaaatgcaagtacagcatgcatatttaagaatttctgaactaacacttgaaatcacattttataaagattgttggtactcagagttgtatttgcagcagaaaatgcagaataacccagaaatggagcccggagcccaattccagagaggaagggaaagaagagacgatgcctggacaatgtcttatacatagggaacagagagggaatcagaggtggcttagttccctgaagacagccttatgcgcttaatccctgcctttgaaaaatgggccaatacacaacacagacaataatttgaagcgtctgtattcagcaaagataaatacagcagtccagtctataggtgctctacttagcattcttttcatgtgctcctggtctctgtctcactcacctactttctactacatccaactcaactccctgacaccctatccccccatctattcttaaactctttcatatatattttcacttcctaattctagtgtacatatccctgtatatcatggtatctgtgggcatatgtctgtttcttataaagacacatatttgtgtgtgtatgtgtgtgtgtgtgtgtgtgtgtgtataagcatacatgggaatttttctgaatgtaagcagttttgatgtgtctgtatatcaatctgtatctacatttgatggactgagtaagaatgttgcatgtgagagaagggatgtgactgtggactcagattgacacacacagattggtggaagaatagcttcagtcctcttccttcatcccatatgtaggtagccttgcttgacaaatgtttcttctaactctccttcttctgaattgtgcagagactctgttaacttccctttttgcacttagataacttcctacttcaaccccctcctttatcttggatttctaaagtttttccccaatattgggaatggtgagggtggggatgagagactctctgaacaattcttgcagaaccagtgacaatcttatgaatataatgaataagtaagcatatagtagggtgatagaatacagatagtagaaacaaagagaggacagcaaaccttttcagcacttctctcagagcaaatggaaacacacagtaagtagctttctgactacattattttctggtcacttttaaagaaagtttacaacctgttctgaaactatttgtcttttcactggttgtaagtgtaccccaatctcagggagtatatctgtagtgccacaggcaaaagatccactccttcccacactcatttgcctgaacttactcgaagggctgcatttctctgagtttacgaaattgtgtcattatggtccccatacagtggtatttaacttttaaagcaacttttaagaaaactcgacttgttttttgttcattttaagtgtgtggtactaaaaagacatgttagactttttttaaaaaagcacttatgttttgaaaatagaataaataataagaatttccaattaaatcatgtctggtgccaatgtgcaaaacttca

SEQ ID NO: 130462 - DNA, 3723 bp, Artificial Sequence
  derived and/or modified sequence
atgcggtcacggagtaactcaggggtgcggctggatggatatgcacggctggtgcaacaaacgatactgtgccatcaaaatccagtgactggcctgctcccagccagttatgatcagaaggatgcctgggtacgcgataatgtgtatagcattctggctgtctggggtctgggcctcgcttaccggaagaacgctgatagggatgaggataaggccaaggcttacgagttggaacaatccgtggtgaagctcatgaggggtctgctccactgcatgattagacaggtcgacaaggtggaaagctttaagtactcacagagtaccaaggatagtttgcacgccaaatataatacaaagacctgcgccactgttgttggcgacgatcagtggggccacctacagctcgatgcaacgtccgtgtatctgctgtttctggcccagatgacggcttctggcctacacataatccatagtctagacgaggtgaatttcatacagaatctggtgttctacatagaagcggcatacaagacggccgattttgggatctgggaaaggggcgacaagaccaaccaaggaatcagcgagcttaatgctagctctgtgggcatggctaaggccgcactggaggctctggacgaactcgatctctttggggtgaaggggggtccacagtctgttattcatgttttagcagacgaagttcagcactgtcagagcattctaaattccctcctgccacgtgccagtacttccaaagaggtagacgcttccttgctgagcgttgtatccttccccgcatttgctgtggaggattctcaactggtggaactcaccaagcaggagatcattacaaagcttcagggtcgctatgggtgctgccggtttctgagggacggttataagacgccaaaggaagatcctaaccggctttattatgaaccagccgaacttaagctgttcgagaatattgagtgcgaatggccgctattttggacgtactttatcctcgatggcgtgttcagcggaaatgctgagcaggttcaggagtacaaggaggcgctggaagctgtactgatcaaaggaaagaatggggtacccctgcttccggaactctattcagtgcctccagatcgcgtggatgaggaatatcagaatccccacaccgtggaccgggtgcccatggggaagttaccccatatgtggggacagagtttgtacatattgggctctcttatggctgaaggatttttggcgcctggcgagatcgaccctctgaaccggagattcagcaccgtgcccaagcctgatgttgtggtgcaggtgagtattctcgcggagaccgaggaaataaaaactatcctcaaggataagggcatctatgtggagactattgcagaggtgtaccccatccgcgtccagccggctcggatcctctcccacatttactcatcactgggatgcaacaatcgaatgaaactgtccggaagaccctacagacatatgggcgtgctgggcacttccaaattatacgatatacgcaaaaccattttcactttcaccccacagttcatcgaccaacagcaattctatctggccctggataacaagatgatagtcgaaatgctcagaactgacctttcctacctgtgctccagatggcgaatgactgggcagccaacaatcacattcccaattagccacagcatgctggacgaagacggaacatccctgaatagctctatccttgctgctttgcgcaaaatgcaggatggctattttggaggagctagggtacagactggcaaattgtccgagttcctcactacatcctgttgcactcatcttagcttcatggatcctggaccagagggaaaactttacagtgaggactatgatgacaattatgattaccttgaaagcgggaactggatgaatgactatgatagcacctcacatgcacgatgtggagatgaagtagccaggtacctcgaccacctactggcccacaccgccccacacccgaagctggcccctacttcccagaagggtgggctcgacagattccaagccgcagtccagactacatgtgatctcatgagcctggttacaaaggccaaagaactacacgtgcagaacgtgcatatgtatctgcccactaagctcttccaagcgagtagaccttcttttaacttgcttgacagtccacaccccagacaggagaatcaagtgcctagtgttcgtgtagagatccatctccctagagatcagagtggcgaggtcgactttaaggccctggtcttacagttgaaggaaaccagttcccttcaggagcaggccgacattctctatatgctttataccatgaaaggacccgactggaacactgagctgtacaacgaaagatccgccaccgtgcgggaactgctcacggagctctacgggaaggttggggagatccggcactggggtcttattcgttacatatccggaatcctgagaaaaaaggtcgaggctctcgacgaagcctgtacagaccttctcagccatcagaagcaccttaccgtgggactccctcctgagccccgagagaagaccatctcggccccactgccatacgaggctctcacccagcttattgacgaggcatctgagggcgacatgtcaatcagcatcttgacccaggagatcatggtttatctggctatgtacatgcgaacccagcccggattgtttgcagagatgtttcggctccggattgggttaatcatccaggtgatggccaccgagctcgcccacagcctgcggtgtagtgctgaggaagctacagaaggattgatgaatttgtccccctcagcaatgaagaatttgctccaccatattctgtccggtaaagagttcggtgttgagagatcagtcaggcctacggattccaatgtgtctcccgcaatcagtatccacgaaattggggcagttggcgctaccaagacagagcgcacagggattatgcagcttaagtcagaaatcaaacaagttgagttccggagactctcaatttcggccgaaagccagagcaatggcggtcatcccttaggaatcgacctgatgagccctagcttcatgagccctggaacatccatgactccttcctccggatcatttcccagcgcatatgatcagcagtcaagcaaggactcccgccaaggccaatggcagcgacgcaggaggttagacggggcactgaaccgcgtaccggtaggattctaccagaaggtctggaaagtacttcaaaagtgtcacggtctgtccgtggagggctttgtgcttcctagtagcaccacccgggaaatgacgcccggtgaaataaagttttccgttcatgtggagagcgtgttgaacagagtgccacagcccgagtacaggcagctgttggtagaggcaatactggtcctaaccatgctggccgacatcgagattcacagcattggcagcatcatcgctgtggaaaagattgtccacatcgctaacgatctgtttctccaagagcagaagacattgggcgctgatgatacaatgctggctaaagacccagcatcaggtatctgtacacttctctatgactcagcgccatctggcagattcgggaccatgacatacttatctaaagccgctgctacgtatgtgcaggagttcctaccacacagcatctgtgctatgcagtag

SEQ ID NO: 130463 - DNA, 3672 bp, Artificial Sequence
  derived and/or modified sequence
atgcgctcgcgtagcaacagtggggtgcgcctggacgggtacgcccgtttagtgcagcaaacgattctctgccaccagaaccccgtcaccggcctgctccccgcttcctacgaccaaaaggacgcttgggtcagggataatgtctactctatactggctgtgtgggggcttgggcttgcctacagaaaaaacgccgacagggatgaagacaaagctaaggcctatgaattggaacagtccgttgtcaaattgatgagaggactcctccattgcatgatccgtcaggtcgacaaggtcgaaagcttcaaatactctcagagtacaaaagactctctccatgccaaatacaacactaaaacctgtgcaacagtggtcggtgacgatcaatggggccatctgcaactagacgcgacgagcgtttatcttctgtttctcgcgcagatgacagcctctggcctccacatcattcatagtttagacgaggtcaacttcatccaaaacctggtcttttatattgaggcagcatataaaaccgctgatttcggcatctgggaacgaggggacaagactaatcaggggatatcagagctgaacgccagcagtgttgggatggccaaagcagccctggaagctctggatgaactggacctttttggagtgaaagggggaccacagtcggtgatccatgtgctagcggacgaagtccaacactgccaatcaattctcaactctttgctgccaagagcaagcacaagtaaggaggtcgacgcttccctgctgagcgtggtttcctttcccgcattcgcagtagaggatagccagctggtcgagctcaccaaacaagagatcataacaaagcttcagggtcgctacgggtgttgtcgttttctgagagatggttataagaccccaaaggaggaccccaatcgtctgtactatgagcccgctgaactcaagttgtttgaaaatattgagtgtgagtggcccctgttttggacatatttcatcctcgacggggtgttcagtggcaatgccgagcaggtgcaggaatacaaggaagctctcgaggctgtcctcatcaaagggaagaacggggtgccactcctgccggaactgtactccgtcccccctgatagggtggacgaagaataccagaatccccacactgtcgaccgggttcctatgggcaaactgccccacatgtggggccaatccttatacattctgggctcacttatggctgagggcttcctggcaccgggagagatcgacccgctcaacagaagattcagcaccgtgcctaaacccgatgtagtagtgcaggtctccatcctggcagaaaccgaggagattaagactattctgaaggacaagggaatttatgttgagaccatcgcagaggtgtatcccatcagagtgcaacccgctaggatcctttcccacatctattctagtttgggctgtaataacagaatgaagctcagcggaaggccttacaggcacatgggggtgctcggtaccagtaaactctatgacattaggaaaacgatctttacttttactccgcagttcatcgaccagcaacaattctatttggctctggataataagatgatcgtggagatgcttcgcacagacctgagttacctatgttcacgctggaggatgaccggccagcctacgatcacattccctataagccattcgatgcttgacgaagacggaacttcacttaacagtagtattctggctgccctgcgcaagatgcaagacggctacttcgggggagcacgagtacagacaggcaagctgtctgaattcttgacgacaagctgttgcacccacctaagcttcatggatccaggacccgagggtaagctgtactccgaggactatgacgacaactacgattaccttgagtccggcaattggatgaacgattacgactcgacctcccacgccaggtgcggcgatgaggtggcgagatatctggatcatcttctggctcacactgccccacaccccaagttggctcccaccagtcagaaagggggactggatcggtttcaggcagctgtgcagactacttgcgatctgatgagtctggtcacgaaggcgaaagaactccatgtccagaatgtccacatgtacctgccaacaaagctttttcaggcatccaggcccagcttcaatttactcgattccccgcatcctcggcaggaaaaccaagtgccaagcgttcgggtagagatccatctgcctagagatcaatcaggcgaggtcgattttaaggcactagtcctccagctaaaggagacctcgtctctgcaagaacaggccgacattctttacatgctgtatactatgaaaggacccgattggaacaccgagctgtataacgagcggtccgccaccgtccgtgaacttctcacagaactttacggaaaggtaggcgaaattcggcattggggcctgataagatatatatctggcattcttaggaaaaaggtggaagccctggacgaggcttgcacggatcttctatcccaccagaagcacctcacagtgggtttgcctccagaaccgagggagaagaccatatccgctccacttccttacgaggccctgacacagttgattgacgaagcgtcagagggtgatatgtctatttcaatacttacccaggagatcatggtttatctggctatgtacatgcggactcagcctggcctcttcgccgaaatgttccgtctgcggataggactgattattcaagtaatggctaccgagctggcccatagcctgcggtgtagcgctgaggaagctacggagggtcttatgaatctcagtccttcagctatgaaaaacctcctgcaccatattctgtctggcaaagagttcggggtcgaacgctcagtgaggcccactgacagcaatgttagtccagccatctccatacatgagattggcgctgtgggcgctacaaaaacagaaaggacaggaatcatgcagctgaaaagcgaaatcaagcaggtggaatttcgacgactgagcatctccgccgaatcgcagtctccgggaacctcaatgaccccaagctccggaagtttcccatctgcctacgatcagcagtcatccaaggactcacgccaagggcagtggcagcggaggagaaggcttgatggggctctaaacagagtgccagtcggattttaccaaaaagtgtggaaggtacttcagaaatgccatgggctgtcggtggaaggctttgtgctaccttcaagtacaactcgggaaatgacacccggagagatcaaattctctgtgcacgtagagtcagtcctaaacagagttcctcagccagagtatagacaactgctggtcgaggcaattctggtcttgaccatgctagccgacatcgagattcacagtatagggtccatcatagccgttgaaaagattgtccatatagccaacgatcttttcttgcaggaacagaaaactctaggcgcagatgacaccatgctggctaaggaccccgctagcggtatctgtactctgctgtatgacagtgccccatctggcagattcggcaccatgacgtacctaagtaaggccgctgcaacgtatgtacaagagtttctgccacactcgatttgtgctatgcagtag

SEQ ID NO: 130464 - DNA, 3723 bp, Artificial Sequence
  derived and/or modified sequence
atgagaagcagaagcaacagcggcgtgagactggacggctacgccagactggtgcagcagaccatcctgtgccaccagaaccccgtgaccggcctgctgcccgccagctacgaccagaaggacgcctgggtgagagacaacgtgtacagcatcctggccgtgtggggcctgggcctggcctacagaaagaacgccgacagagacgaggacaaggccaaggcctacgagctggagcagagcgtggtgaagctgatgagaggcctgctgcactgcatgatcagacaggtggacaaggtggagagcttcaagtacagccagagcaccaaggacagcctgcacgccaagtacaacaccaagacctgcgccaccgtggtgggcgacgaccagtggggccacctgcagctggacgccaccagcgtgtacctgctgttcctggcccagatgaccgccagcggcctgcacatcatccacagcctggacgaggtgaacttcatccagaacctggtgttctacatcgaggccgcctacaagaccgccgacttcggcatctgggagagaggcgacaagaccaaccagggcatcagcgagctgaacgccagcagcgtgggcatggccaaggccgccctggaggccctggacgagctggacctgttcggcgtgaagggcggcccccagagcgtgatccacgtgctggccgacgaggtgcagcactgccagagcatcctgaacagcctgctgcccagagccagcaccagcaaggaggtggacgccagcctgctgagcgtggtgagcttccccgccttcgccgtggaggacagccagctggtggagctgaccaagcaggagatcatcaccaagctgcagggcagatacggctgctgcagattcctgagagacggctacaagacccccaaggaggaccccaacagactgtactacgagcccgccgagctgaagctgttcgagaacatcgagtgcgagtggcccctgttctggacctacttcatcctggacggcgtgttcagcggcaacgccgagcaggtgcaggagtacaaggaggccctggaggccgtgctgatcaagggcaagaacggcgtgcccctgctgcccgagctgtacagcgtgccccccgacagagtggacgaggagtaccagaacccccacaccgtggacagagtgcccatgggcaagctgccccacatgtggggccagagcctgtacatcctgggcagcctgatggccgagggcttcctggcccccggcgagatcgaccccctgaacagaagattcagcaccgtgcccaagcccgacgtggtggtgcaggtgagcatcctggccgagaccgaggagatcaagaccatcctgaaggacaagggcatctacgtggagaccatcgccgaggtgtaccccatcagagtgcagcccgccagaatcctgagccacatctacagcagcctgggctgcaacaacagaatgaagctgagcggcagaccctacagacacatgggcgtgctgggcaccagcaagctgtacgacatcagaaagaccatcttcaccttcaccccccagttcatcgaccagcagcagttctacctggccctggacaacaagatgatcgtggagatgctgagaaccgacctgagctacctgtgcagcagatggagaatgaccggccagcccaccatcaccttccccatcagccacagcatgctggacgaggacggcaccagcctgaacagcagcatcctggccgccctgagaaagatgcaggacggctacttcggcggcgccagagtgcagaccggcaagctgagcgagttcctgaccaccagctgctgcacccacctgagcttcatggaccccggccccgagggcaagctgtacagcgaggactacgacgacaactacgactacctggagagcggcaactggatgaacgactacgacagcaccagccacgccagatgcggcgacgaggtggccagatacctggaccacctgctggcccacaccgccccccaccccaagctggcccccaccagccagaagggcggcctggacagattccaggccgccgtgcagaccacctgcgacctgatgagcctggtgaccaaggccaaggagctgcacgtgcagaacgtgcacatgtacctgcccaccaagctgttccaggccagcagacccagcttcaacctgctggacagcccccaccccagacaggagaaccaggtgcccagcgtgagagtggagatccacctgcccagagaccagagcggcgaggtggacttcaaggccctggtgctgcagctgaaggagaccagcagcctgcaggagcaggccgacatcctgtacatgctgtacaccatgaagggccccgactggaacaccgagctgtacaacgagagaagcgccaccgtgagagagctgctgaccgagctgtacggcaaggtgggcgagatcagacactggggcctgatcagatacatcagcggcatcctgagaaagaaggtggaggccctggacgaggcctgcaccgacctgctgagccaccagaagcacctgaccgtgggcctgccccccgagcccagagagaagaccatcagcgcccccctgccctacgaggccctgacccagctgatcgacgaggccagcgagggcgacatgagcatcagcatcctgacccaggagatcatggtgtacctggccatgtacatgagaacccagcccggcctgttcgccgagatgttcagactgagaatcggcctgatcatccaggtgatggccaccgagctggcccacagcctgagatgcagcgccgaggaggccaccgagggcctgatgaacctgagccccagcgccatgaagaacctgctgcaccacatcctgagcggcaaggagttcggcgtggagagaagcgtgagacccaccgacagcaacgtgagccccgccatcagcatccacgagatcggcgccgtgggcgccaccaagaccgagagaaccggcatcatgcagctgaagagcgagatcaagcaggtggagttcagaagactgagcatcagcgccgagagccagagcaacggcggccaccccctgggcatcgacctgatgagccccagcttcatgagccccggcaccagcatgacccccagcagcggcagcttccccagcgcctacgaccagcagagcagcaaggacagcagacagggccagtggcagagaagaagaagactggacggcgccctgaacagagtgcccgtgggcttctaccagaaggtgtggaaggtgctgcagaagtgccacggcctgagcgtggagggcttcgtgctgcccagcagcaccaccagagagatgacccccggcgagatcaagttcagcgtgcacgtggagagcgtgctgaacagagtgccccagcccgagtacagacagctgctggtggaggccatcctggtgctgaccatgctggccgacatcgagatccacagcatcggcagcatcatcgccgtggagaagatcgtgcacatcgccaacgacctgttcctgcaggagcagaagaccctgggcgccgacgacaccatgctggccaaggaccccgccagcggcatctgcaccctgctgtacgacagcgcccccagcggcagattcggcaccatgacctacctgagcaaggccgccgccacctacgtgcaggagttcctgccccacagcatctgcgccatgcagtag

SEQ ID NO: 130465 - DNA, 3672 bp, Artificial Sequence
  derived and/or modified sequence
atgagaagcagaagcaacagcggcgtgagactggacggctacgccagactggtgcagcagaccatcctgtgccaccagaaccccgtgaccggcctgctgcccgccagctacgaccagaaggacgcctgggtgagagacaacgtgtacagcatcctggccgtgtggggcctgggcctggcctacagaaagaacgccgacagagacgaggacaaggccaaggcctacgagctggagcagagcgtggtgaagctgatgagaggcctgctgcactgcatgatcagacaggtggacaaggtggagagcttcaagtacagccagagcaccaaggacagcctgcacgccaagtacaacaccaagacctgcgccaccgtggtgggcgacgaccagtggggccacctgcagctggacgccaccagcgtgtacctgctgttcctggcccagatgaccgccagcggcctgcacatcatccacagcctggacgaggtgaacttcatccagaacctggtgttctacatcgaggccgcctacaagaccgccgacttcggcatctgggagagaggcgacaagaccaaccagggcatcagcgagctgaacgccagcagcgtgggcatggccaaggccgccctggaggccctggacgagctggacctgttcggcgtgaagggcggcccccagagcgtgatccacgtgctggccgacgaggtgcagcactgccagagcatcctgaacagcctgctgcccagagccagcaccagcaaggaggtggacgccagcctgctgagcgtggtgagcttccccgccttcgccgtggaggacagccagctggtggagctgaccaagcaggagatcatcaccaagctgcagggcagatacggctgctgcagattcctgagagacggctacaagacccccaaggaggaccccaacagactgtactacgagcccgccgagctgaagctgttcgagaacatcgagtgcgagtggcccctgttctggacctacttcatcctggacggcgtgttcagcggcaacgccgagcaggtgcaggagtacaaggaggccctggaggccgtgctgatcaagggcaagaacggcgtgcccctgctgcccgagctgtacagcgtgccccccgacagagtggacgaggagtaccagaacccccacaccgtggacagagtgcccatgggcaagctgccccacatgtggggccagagcctgtacatcctgggcagcctgatggccgagggcttcctggcccccggcgagatcgaccccctgaacagaagattcagcaccgtgcccaagcccgacgtggtggtgcaggtgagcatcctggccgagaccgaggagatcaagaccatcctgaaggacaagggcatctacgtggagaccatcgccgaggtgtaccccatcagagtgcagcccgccagaatcctgagccacatctacagcagcctgggctgcaacaacagaatgaagctgagcggcagaccctacagacacatgggcgtgctgggcaccagcaagctgtacgacatcagaaagaccatcttcaccttcaccccccagttcatcgaccagcagcagttctacctggccctggacaacaagatgatcgtggagatgctgagaaccgacctgagctacctgtgcagcagatggagaatgaccggccagcccaccatcaccttccccatcagccacagcatgctggacgaggacggcaccagcctgaacagcagcatcctggccgccctgagaaagatgcaggacggctacttcggcggcgccagagtgcagaccggcaagctgagcgagttcctgaccaccagctgctgcacccacctgagcttcatggaccccggccccgagggcaagctgtacagcgaggactacgacgacaactacgactacctggagagcggcaactggatgaacgactacgacagcaccagccacgccagatgcggcgacgaggtggccagatacctggaccacctgctggcccacaccgccccccaccccaagctggcccccaccagccagaagggcggcctggacagattccaggccgccgtgcagaccacctgcgacctgatgagcctggtgaccaaggccaaggagctgcacgtgcagaacgtgcacatgtacctgcccaccaagctgttccaggccagcagacccagcttcaacctgctggacagcccccaccccagacaggagaaccaggtgcccagcgtgagagtggagatccacctgcccagagaccagagcggcgaggtggacttcaaggccctggtgctgcagctgaaggagaccagcagcctgcaggagcaggccgacatcctgtacatgctgtacaccatgaagggccccgactggaacaccgagctgtacaacgagagaagcgccaccgtgagagagctgctgaccgagctgtacggcaaggtgggcgagatcagacactggggcctgatcagatacatcagcggcatcctgagaaagaaggtggaggccctggacgaggcctgcaccgacctgctgagccaccagaagcacctgaccgtgggcctgccccccgagcccagagagaagaccatcagcgcccccctgccctacgaggccctgacccagctgatcgacgaggccagcgagggcgacatgagcatcagcatcctgacccaggagatcatggtgtacctggccatgtacatgagaacccagcccggcctgttcgccgagatgttcagactgagaatcggcctgatcatccaggtgatggccaccgagctggcccacagcctgagatgcagcgccgaggaggccaccgagggcctgatgaacctgagccccagcgccatgaagaacctgctgcaccacatcctgagcggcaaggagttcggcgtggagagaagcgtgagacccaccgacagcaacgtgagccccgccatcagcatccacgagatcggcgccgtgggcgccaccaagaccgagagaaccggcatcatgcagctgaagagcgagatcaagcaggtggagttcagaagactgagcatcagcgccgagagccagagccccggcaccagcatgacccccagcagcggcagcttccccagcgcctacgaccagcagagcagcaaggacagcagacagggccagtggcagagaagaagaagactggacggcgccctgaacagagtgcccgtgggcttctaccagaaggtgtggaaggtgctgcagaagtgccacggcctgagcgtggagggcttcgtgctgcccagcagcaccaccagagagatgacccccggcgagatcaagttcagcgtgcacgtggagagcgtgctgaacagagtgccccagcccgagtacagacagctgctggtggaggccatcctggtgctgaccatgctggccgacatcgagatccacagcatcggcagcatcatcgccgtggagaagatcgtgcacatcgccaacgacctgttcctgcaggagcagaagaccctgggcgccgacgacaccatgctggccaaggaccccgccagcggcatctgcaccctgctgtacgacagcgcccccagcggcagattcggcaccatgacctacctgagcaaggccgccgccacctacgtgcaggagttcctgccccacagcatctgcgccatgcagtag

SEQ ID NO: 130466 - protein, 117 aa, Artificial Sequence
  derived and/or modified sequence
MLKFVVLSVVAVAVVQSQEDTRFLGVSGGVAGGGFVPGVPGHGGIAPGFECNYCRTRYGYVCCKPGRCPPVRDTCPGIRNRPPICRQDTECFGSDKCCYDTCLNDTVCKPIVLGSEG

SEQ ID NO: 130467 - protein, 141 aa, Artificial Sequence
  derived and/or modified sequence
MLKFVVLSVVAVAVVHAQDKGNADTRFLGGVGVPGGGVPGVGVPGVGGGFLPGVPGHGGVVPGGGGLLPGGQFECNYCRTRYGYVCCKPGRCPQIRETCPGLRKGIPICRQDTDCFGSDKCCFDTCLNDTVCKPIVLGSEG

SEQ ID NO: 130468 - protein, 57 aa, Artificial Sequence
  derived and/or modified sequence
AQEPVKGPVSTKPGSCPIILIRCAMLNPPNRCLKDTDCPGIKKCCEGSCGMACFVPQ

SEQ ID NO: 130469 - protein, 117 aa, Artificial Sequence
  derived and/or modified sequence
MRASSFLIVVVFLIAGTLVLEAAVTGVPVKGQDTVKGRVPFNGQDPVKGQVSVKGQDKVKAQEPVKGPVSTKPGSCPIILIRCAMLNPPNRCLKDTDCPGIKKCCEGSCGMACFVPQ

SEQ ID NO: 130470 - DNA, 354 bp, Artificial Sequence
  derived and/or modified sequence
atgcgcgcgagcagtttcctgatcgtggtcgtgttcctgatcgcaggaactctggtgctggaggctgccgtcactggggtacccgtcaaagggcaagatacagtgaagggaagagtgccctttaatgggcaggatcctgtcaagggtcaggtaagcgtgaagggacaggacaaggtgaaagctcaggaaccagtgaaagggcctgtgtcgaccaagcccggttcatgccctatcatactgattagatgcgctatgttgaatcccccaaaccggtgcctgaaagacactgactgccctggcatcaaaaaatgctgtgaaggcagctgcgggatggcctgcttcgttccccagtag

SEQ ID NO: 130471 - DNA, 354 bp, Artificial Sequence
  derived and/or modified sequence
atgagggccagcagcttcctgattgtggtggtgttcctgattgctggcaccctggtgctggaggccgctgtgactggagtgcctgtgaagggccaggacacagtgaagggccgggtgcccttcaacggccaggaccctgtgaagggccaggtgtctgtgaagggccaggacaaggtgaaggcccaggagcctgtgaagggccctgtgtccaccaagccaggcagctgccccatcatcctgatccgctgtgccatgctgaacccccccaaccgctgcctgaaggacacagactgccccggcatcaagaagtgctgtgagggcagctgtggcatggcctgctttgtgccccagtag

SEQ ID NO: 130472 - DNA, 354 bp, Artificial Sequence
  derived and/or modified sequence
atgcgggccagcagcttcctgatcgtggtggtgttcctgatcgccggaactctggttctcgaagccgctgtgacgggagtccctgttaaagggcaggacactgtcaaaggaagagtgcctttcaacgggcaagaccccgtgaaaggccaggtgagcgtgaaaggtcaggacaaggttaaagcccaggaacccgtgaaagggccagtttccaccaagcctggctcctgtcccattatccttatacgatgcgcaatgcttaatcctcccaatcggtgcctgaaagacaccgattgtccaggtataaagaaatgctgcgagggcagctgcgggatggcttgcttcgtgccccaatag

SEQ ID NO: 130473 - DNA, 577 bp, Artificial Sequence
  derived and/or modified sequence
aaagattggtatggccttagctcttagccaaacaccttcctgacaccatgagggccagcagcttcttgatcgtggtggtgttcctcatcgctgggacgctggttctagaggcagctgtcacgggagttcctgttaaaggtcaagacactgtcaaaggccgtgttccattcaatggacaagatcccgttaaaggacaagtttcagttaaaggtcaagataaagtcaaagcgcaagagccagtcaaaggtccagtctccactaagcctggctcctgccccattatcttgatccggtgcgccatgttgaatccccctaaccgctgcttgaaagatactgactgcccaggaatcaagaagtgctgtgaaggctcttgcgggatggcctgtttcgttccccagtgagagggagccggtccttgctgcacctgtgccgtccccagagctacaggccccatctggtcctaagtccctgctgcccttccccttcccacactgtccattcttcctcccattcaggatgcccacggctggagctgcctctctcatccactttccaataaagagttccttctgctcca

SEQ ID NO: 130474 - DNA, 354 bp, Artificial Sequence
  derived and/or modified sequence
atgcgagccagctccttcctgattgtagttgtatttttgattgctggaacccttgtgctcgaagcggctgtgactggagtccccgtgaaaggacaggataccgttaaaggccgtgtaccattcaatggacaggaccccgtcaagggtcaagtgtctgtgaaaggtcaggataaggtgaaggcgcaggaacccgtcaagggtcccgtgagcaccaagccgggatcatgtcccataattttgattagatgcgctatgcttaaccctcccaataggtgcctcaaagacaccgactgtccaggaatcaaaaaatgttgtgaaggcagttgcgggatggcttgcttcgtccctcagtag

SEQ ID NO: 130475 - DNA, 354 bp, Artificial Sequence
  derived and/or modified sequence
atgagagccagcagcttcctgatcgtggtggtgttcctgatcgccggcaccctggtgctggaggccgccgtgaccggcgtgcccgtgaagggccaggacaccgtgaagggcagagtgcccttcaacggccaggaccccgtgaagggccaggtgagcgtgaagggccaggacaaggtgaaggcccaggagcccgtgaagggccccgtgagcaccaagcccggcagctgccccatcatcctgatcagatgcgccatgctgaacccccccaacagatgcctgaaggacaccgactgccccggcatcaagaagtgctgcgagggcagctgcggcatggcctgcttcgtgccccagtag

SEQ ID NO: 130476 - protein, 375 aa, Artificial Sequence
  derived and/or modified sequence
MDALQLANSAFAVDLFKQLCEKEPLGNVLFSPICLSTSLSLAQVGAKGDTANEIGQVLHFENVKDVPFGFQTVTSDVNKLSSFYSLKLIKRLYVDKSLNLSTEFISSTKRPYAKELETVDFKDKLEETKGQINNSIKDLTDGHFENILADNSVNDQTKILVVNAAYFVGKWMKKFSESETKECPFRVNKTDTKPVQMMNMEATFCMGNIDSINCKIIELPFQNKHLSMFILLPKDVEDESTGLEKIEKQLNSESLSQWTNPSTMANAKVKLSIPKFKVEKMIDPKACLENLGLKHIFSEDTSDFSGMSETKGVALSNVIHKVCLEITEDGGDSIEVPGARILQHKDELNADHPFIYIIRHNKTRNIIFFGKFCSP

SEQ ID NO: 130477 - protein, 129 aa, Artificial Sequence
  derived and/or modified sequence
MDALQLANSAFAVDLFKQLCEKEPLGNVLFSPICLSTSLSLAQVGAKGDTANEIGQVLHFENVKDVPFGFQTVTSDVNKLSSFYSLKLIKRLYVDKSLNLSTEFISSTKRPYAKELETVDFKDKLEETK

SEQ ID NO: 130478 - DNA, 1128 bp, Artificial Sequence
  derived and/or modified sequence
atggacgctcttcagctcgccaattccgcgttcgcagtggatctgttcaaacagctgtgtgagaaagaacctctcggaaacgtgctattctcgcccatatgtctatctacttcactatcactggctcaggtgggagccaagggagacacggctaatgaaattgggcaggttctacattttgagaacgtcaaagatgttccatttggtttccagacagttacctctgacgtcaacaagctcagctcattctatagcctgaaactgattaaacggctgtacgtcgataagagcttaaaccttagtacagaatttatcagcagtacaaagagaccatacgctaaagaactcgagactgtggattttaaagacaagctcgaggaaactaaaggacagatcaacaattccatcaaggatctgaccgacggacatttcgagaatatcctggcggataactctgtgaacgaccaaacaaaaatattagttgtcaacgctgcgtatttcgtcgggaagtggatgaaaaaattctcagaatccgaaaccaaggaatgcccttttagggtcaataagacggatactaaaccggtacagatgatgaatatggaagcaacgttctgtatggggaacatcgattctatcaattgcaagatcattgaactgccttttcaaaacaaacacctttctatgttcatcctgcttccaaaggacgtggaagatgagagtactggcctcgaaaagattgaaaagcagctgaacagcgaatcactgagccagtggacaaacccctccactatggccaatgctaaagttaaactttccatccccaagtttaaggtagagaagatgattgacccaaaagcatgtctggaaaacctaggactcaaacacatctttagcgaagacacatcagacttttctgggatgagcgaaacaaagggagtggcactctctaacgtcatccacaaagtctgcttggagatcaccgaggacggaggagacagcattgaggtgcccggggctcggattttacagcacaaggacgaactcaacgcggatcacccttttatttacattattagacataataaaacgagaaatatcatcttctttggtaaattctgcagtccatag

SEQ ID NO: 130479 - DNA, 390 bp, Artificial Sequence
  derived and/or modified sequence
atggatgccctgcagctggcgaatagcgctttcgccgtggatctgttcaaacaactgtgcgaaaaagagccactggggaacgtattattttccccaatctgcctcagtacctcattgtccctggctcaggtgggcgcaaaaggggacactgctaatgagatcgggcaggtgcttcactttgaaaacgttaaggacgttcctttcggattccagactgtcacctcagatgtaaataaactgtcttccttctatagccttaaactgattaagagactttatgttgataagagcttgaacctcagcaccgagttcattagtagtacaaaaaggccctacgccaaagagcttgagactgtcgacttcaaggataagctggaagaaacaaagtag

SEQ ID NO: 130480 - DNA, 1128 bp, Artificial Sequence
  derived and/or modified sequence
atggatgccctgcagctggccaacagcgcctttgctgtggacctcttcaagcagctgtgtgagaaggagcccctgggcaatgtgctcttcagccccatctgcctgagcaccagcctgagcctggcccaggtgggcgccaagggggacacagccaatgagatcggccaggtgctgcactttgaaaatgtgaaggatgtgcccttcggcttccagacagtgaccagtgatgtgaacaagctgagcagcttctacagcctgaagctgatcaagaggctgtatgtggacaagagcctgaacctgagcacagagttcatcagcagcaccaagaggccctatgccaaggagctggagaccgtggacttcaaggacaagctggaggagaccaagggccagatcaacaacagcatcaaggacctgacagatggccactttgagaacatcctggccgacaacagcgtgaatgaccagaccaagatcctggtggtgaatgctgcctactttgtgggcaagtggatgaagaagttcagcgagagcgagaccaaggagtgccccttccgggtgaacaagacagacaccaagcctgtgcagatgatgaacatggaggccaccttctgcatgggcaacatcgacagcatcaactgcaagatcatcgagctgcccttccagaacaagcacctgtccatgttcatcctgctgcccaaggatgtggaggatgagagcacaggcctggagaagattgagaagcagctgaacagcgagagcctgagccagtggaccaaccccagcaccatggccaatgccaaggtgaagctgagcatccccaagttcaaggtggagaagatgattgaccccaaggcctgcctggagaacctgggcctgaagcacatcttcagcgaggacaccagtgacttcagcggcatgtctgagaccaagggcgtggccctgagcaatgtcatccacaaggtgtgcctggagatcacagaagatggaggagacagcattgaggtgcctggggcccgcatcctgcagcacaaggatgagctgaatgctgaccaccccttcatctacatcatccgccacaacaagaccaggaacatcatcttcttcggcaagttctgcagcccctag

SEQ ID NO: 130481 - DNA, 390 bp, Artificial Sequence
  derived and/or modified sequence
atggatgccctgcagctggccaacagcgcctttgctgtggacctcttcaagcagctgtgtgagaaggagcccctgggcaatgtgctcttcagccccatctgcctgagcaccagcctgagcctggcccaggtgggcgccaagggggacacagccaatgagatcggccaggtgctgcactttgaaaatgtgaaggatgtgcccttcggcttccagacagtgaccagtgatgtgaacaagctgagcagcttctacagcctgaagctgatcaagaggctgtatgtggacaagagcctgaacctgagcacagagttcatcagcagcaccaagaggccctatgccaaggagctggagaccgtggacttcaaggacaagctggaggagaccaagtag

SEQ ID NO: 130482 - DNA, 1128 bp, Artificial Sequence
  derived and/or modified sequence
atggacgccctgcagctggccaacagcgccttcgccgtggacctgttcaaacaactgtgcgagaaagagcccttgggaaacgtactcttttcacctatctgtctttccaccagcttgagcctggcccaggtcggtgcaaagggggacacagcaaacgagatcggccaggtgctccacttcgaaaacgtcaaagacgttccattcggatttcagactgtgacaagtgatgtaaataaactgtctagtttctacagtttgaagcttatcaagaggctgtatgtggacaaaagcctgaacctgtccacagagttcatcagctccacgaaacggccctacgcaaaagagttggaaacggtcgacttcaaggataagttggaggagaccaagggtcagattaacaactccatcaaagatttaactgatgggcactttgaaaacatcttggcagataacagcgtcaatgaccagacaaaaatccttgtagtgaatgcagcttactttgtggggaagtggatgaagaagtttagcgagagtgagaccaaggaatgtccgttccgcgtgaacaagacagacactaagcccgtgcagatgatgaacatggaagctacattctgcatgggcaatatcgattcaataaactgtaagataattgagctgccctttcagaacaaacatctgagtatgtttatccttcttccaaaggatgtcgaggatgagtctaccggcctagagaaaatcgagaagcagctgaacagcgagtcactcagccaatggacaaacccctctactatggcaaacgctaaagtgaaattgtctataccaaagtttaaggtggaaaaaatgatcgaccccaaagcctgcctcgaaaatctgggcctgaagcatatttttagcgaagatacaagcgacttttcgggaatgtcggaaactaaaggagtggccctgagtaacgtaattcataaggtgtgtctggagatcacagaggatgggggggactctatcgaggttcctggggctaggattctgcagcacaaagacgagctcaacgctgatcaccccttcatctacatcatcagacacaataagaccagaaacatcattttttttggcaaattctgcagcccatag

SEQ ID NO: 130483 - DNA, 390 bp, Artificial Sequence
  derived and/or modified sequence
atggacgccctgcagctggccaacagcgccttcgccgtggacctgttcaagcagctgtgtgagaaggaaccgctaggcaatgtgctgttctccccaatttgtctcagcacaagtctctccctggcgcaagtaggtgcaaagggtgataccgccaacgaaatcgggcaggttttgcatttcgaaaatgtaaaggacgtaccgttcggattccagaccgtgacttccgatgtaaataagctctcttctttttattctctgaaactcatcaaacgattatacgtcgataaatctctcaacctcagtacggaattcattagcagtaccaagaggccatacgctaaagagttggaaactgtggactttaaggacaagctggaagagacaaaatag

SEQ ID NO: 130484 - DNA, 1128 bp, Artificial Sequence
  derived and/or modified sequence
atggatgccctgcaattagccaattctgccttcgccgtggacctgttcaaacagctctgcgaaaaggaaccattggggaacgtgttgtttagccctatttgtttgagtacctctttatcactagcacaggtgggggctaagggcgacaccgctaacgaaatcggacaggttctgcacttcgaaaacgttaaggatgtaccatttggatttcagactgtgacctcagacgtgaataagctctcttctttctatagcctgaaactgataaagaggctatatgtggacaaaagtctgaatctttctactgaatttatctctagtactaagaggccatacgccaaagagctggaaactgtcgactttaaggataaactagaggaaaccaaggggcaaatcaataatagcattaaagatctgacggacggacacttcgaaaacatactagccgacaattcggtgaacgatcagactaagattttggtggtgaatgccgcatattttgtgggtaagtggatgaagaagttctcagagtccgagaccaaagaatgtcctttcagggtgaacaagacagacaccaaacctgttcagatgatgaacatggaggccacattttgtatggggaacatcgatagtattaactgtaaaataatcgagctgccgtttcaaaataagcatcttagtatgtttatactgttacccaaggatgtcgaagatgagagtactgggttggagaaaattgagaagcagctcaactctgagtctctctctcaatggactaacccgtctacaatggctaatgctaaggtcaagctgtctataccgaaattcaaagtggaaaaaatgattgatccgaaagcgtgcttggagaatctgggtctgaaacatatcttcagcgaagatactagcgactttagtggcatgtctgaaaccaaaggggttgccctttcaaatgtgattcacaaagtgtgtctggagatcaccgaggacggcggagacagcattgaagtgcctggcgcacgtatactgcagcacaaagacgaactcaacgcagaccacccattcatctatatcattcgccataataaaaccaggaatatcatcttctttggcaagttttgttccccatag

SEQ ID NO: 130485 - DNA, 390 bp, Artificial Sequence
  derived and/or modified sequence
atggacgctctccagctcgctaacagcgcttttgccgtagacctttttaagcagctgtgcgaaaaagagccactggggaatgttttgttctcccctatctgcttatctacaagcttatccctggcccaggtgggtgccaaaggggatactgcgaacgagatcggccaggtgcttcatttcgagaatgtaaaggatgtcccatttggattccaaaccgtcactagcgacgtgaataagctctcttccttttactcactcaagttgattaagcggctgtatgtggacaagtccctcaacctatccaccgagtttatctcatcaaccaagaggccctacgcgaaagaactggagacagttgattttaaagacaagcttgaggaaactaagtag

SEQ ID NO: 130486 - DNA, 2783 bp, Artificial Sequence
  derived and/or modified sequence
gaacatgttggaggccttttggaagctgtgcagacaacagtaacttcagcctgaatcatttctttcaattgtggacaagctgccaagaggcttgagtaggagaggagtgccgccgaggcggggcggggcggggcgtggagctgggctggcagtgggcgtggcggtgctgcccaggtgagccaccgctgcttctgcccagacacggtcgcctccacatccaggtctttgtgctcctcgcttgcctgttccttttccacgcattttccaggataactgtgactccaggcccgcaatggatgccctgcaactagcaaattcggcttttgccgttgatctgttcaaacaactatgtgaaaaggagccactgggcaatgtcctcttctctccaatctgtctctccacctctctgtcacttgctcaagtgggtgctaaaggtgacactgcaaatgaaattggacaggttcttcattttgaaaatgtcaaagatgtaccctttggatttcaaacagtaacatcggatgtaaacaaacttagttccttttactcactgaaactaatcaagcggctctacgtagacaaatctctgaatctttctacagagttcatcagctctacgaagagaccgtatgcaaaggaattggaaactgttgacttcaaagataaattggaagaaacgaaaggtcagatcaacaactcaattaaggatctcacagatggccactttgagaacattttagctgacaacagtgtgaacgaccagaccaaaatccttgtggttaatgctgcctactttgttggcaagtggatgaagaaattttctgaatcagaaacaaaagaatgtcctttcagagtcaacaagacagacaccaaaccagtgcagatgatgaacatggaggccacgttctgtatgggaaacattgacagtatcaattgtaagatcatagagcttccttttcaaaataagcatctcagcatgttcatcctactacccaaggatgtggaggatgagtccacaggcttggagaagattgaaaaacaactcaactcagagtcactgtcacagtggactaatcccagcaccatggccaatgccaaggtcaaactctccattccaaaatttaaggtggaaaagatgattgatcccaaggcttgtctggaaaatctagggctgaaacatatcttcagtgaagacacatctgatttctctggaatgtcagagaccaagggagtggccctatcaaatgttatccacaaagtgtgcttagaaataactgaagatggtggggattccatagaggtgccaggagcacggatcctgcagcacaaggatgaattgaatgctgaccatccctttatttacatcatcaggcacaacaaaactcgaaacattattttctttggcaaattctgttctccttaagtggcatagcccatgttaagtcctccctgacttttctgtggatgccgatttctgtaaactctgcatccagagattcattttctagatacaataaattgctaatgttgctggatcaggaagccgccagtacttgtcatatgtagccttcacacagatagaccttttttttttttccaattctatcttttgtttccttttttcccataagacaatgacatacgcttttaatgaaaaggaatcacgttagaggaaaaatatttattcattatttgtcaaattgtccggggtagttggcagaaatacagtcttccacaaagaaaattcctataaggaagatttggaagctcttcttcccagcactatgctttccttctttgggatagagaatgttccagacattctcgcttccctgaaagactgaagaaagtgtagtgcatgggacccacgaaactgccctggctccagtgaaacttgggcacatgctcaggctactataggtccagaagtccttatgttaagccctggcaggcaggtgtttattaaaattctgaattttggggattttcaaaagataatattttacatacactgtatgttatagaacttcatggatcagatctggggcagcaccctataaatcaacaccttaatatgctgcaacaaaatgtagaatattcagacaaaatggatacataaagactaagtagcccataaggggtcaaaatttgctgccaaatgcgtatgccaccaacttacaaaaacacttcgttcgcagagcttttcagattgtggaatgttggataaggaattatagacctctagtagctgaaatgcaagaccccaagaggaagttcagatcttaatataaattcactttcatttttgatagctgtcccatctggtcatttggttggcactagactggtggcaggggcttctagctgacttgcacagggattctcacaatagccgatatcagaatttgtgttgaaggaacttgtctcttcatctaatatgatagcgggaaaaggagaggaaactactgcctttagaaaatataagtaaagtgattaaagtgctcacgttaccttgacacatagtttttcagtctatgggtttagttactttagatggcaagcatgtaacttatattaatagtaatttgtaaagttggttggataagctatccgtgttgcaggttcatggattacttctctataaaaaatatgtatttaccaaaaattttgtgacattccttctcccatctcttccttgacctgcattgtaaataggttcttcttgttctgagattcaatattgaatttttcctatgctattgacaataaaatattattgaactaca

SEQ ID NO: 130487 - DNA, 560 bp, Artificial Sequence
  derived and/or modified sequence
atggtgaacaaaatggacttaggtccattttggggctgttttcaaagacgggctgttgggttgagtactgtcgcctctcatcccccatgttggcagtatttccagctcccaaccctttgagcaccaggaacactgcagagggagtaaaatcacttaaccatacaaggcccgcaatggatgccctgcaactagcaaattcggcttttgccgttgatctgttcaaacaactatgtgaaaaggagccactgggcaatgtcctcttctctccaatctgtctctccacctctctgtcacttgctcaagtgggtgctaaaggtgacactgcaaatgaaattggacaggttcttcattttgaaaatgtcaaagatgtaccctttggatttcaaacagtaacatcggatgtaaacaaacttagttccttttactcactgaaactaatcaagcggctctacgtagacaaatctctgaatctttctacagagttcatcagctctacgaagagaccgtatgcaaaggaattggaaactgttgacttcaaagataaattggaagaaacgaaa

SEQ ID NO: 130488 - DNA, 1128 bp, Artificial Sequence
  derived and/or modified sequence
atggacgccctgcagctggccaacagcgccttcgccgtggacctgttcaagcagctgtgcgagaaggagcccctgggcaacgtgctgttcagccccatctgcctgagcaccagcctgagcctggcccaggtgggcgccaagggcgacaccgccaacgagatcggccaggtgctgcacttcgagaacgtgaaggacgtgcccttcggcttccagaccgtgaccagcgacgtgaacaagctgagcagcttctacagcctgaagctgatcaagagactgtacgtggacaagagcctgaacctgagcaccgagttcatcagcagcaccaagagaccctacgccaaggagctggagaccgtggacttcaaggacaagctggaggagaccaagggccagatcaacaacagcatcaaggacctgaccgacggccacttcgagaacatcctggccgacaacagcgtgaacgaccagaccaagatcctggtggtgaacgccgcctacttcgtgggcaagtggatgaagaagttcagcgagagcgagaccaaggagtgccccttcagagtgaacaagaccgacaccaagcccgtgcagatgatgaacatggaggccaccttctgcatgggcaacatcgacagcatcaactgcaagatcatcgagctgcccttccagaacaagcacctgagcatgttcatcctgctgcccaaggacgtggaggacgagagcaccggcctggagaagatcgagaagcagctgaacagcgagagcctgagccagtggaccaaccccagcaccatggccaacgccaaggtgaagctgagcatccccaagttcaaggtggagaagatgatcgaccccaaggcctgcctggagaacctgggcctgaagcacatcttcagcgaggacaccagcgacttcagcggcatgagcgagaccaagggcgtggccctgagcaacgtgatccacaaggtgtgcctggagatcaccgaggacggcggcgacagcatcgaggtgcccggcgccagaatcctgcagcacaaggacgagctgaacgccgaccaccccttcatctacatcatcagacacaacaagaccagaaacatcatcttcttcggcaagttctgcagcccctag

SEQ ID NO: 130489 - DNA, 390 bp, Artificial Sequence
  derived and/or modified sequence
atggacgccctgcagctggccaacagcgccttcgccgtggacctgttcaagcagctgtgcgagaaggagcccctgggcaacgtgctgttcagccccatctgcctgagcaccagcctgagcctggcccaggtgggcgccaagggcgacaccgccaacgagatcggccaggtgctgcacttcgagaacgtgaaggacgtgcccttcggcttccagaccgtgaccagcgacgtgaacaagctgagcagcttctacagcctgaagctgatcaagagactgtacgtggacaagagcctgaacctgagcaccgagttcatcagcagcaccaagagaccctacgccaaggagctggagaccgtggacttcaaggacaagctggaggagaccaagtag

SEQ ID NO: 130490 - protein, 484 aa, Artificial Sequence
  derived and/or modified sequence
MACRGGAGNGHRASATLSRVSPGSLYTCRTRTHNICMVSDFFYPNMGGVESHIYQLSQCLIERGHKVIIVTHAYGNRKGIRYLTSGLKVYYLPLKVMYNQSTATTLFHSLPLLRYIFVRERVTIIHSHSSFSAMAHDALFHAKTMGLQTVFTDHSLFGFADVSSVLTNKLLTVSLCDTNHIICVSYTSKENTVLRAALNPEIVSVIPNAVDPTDFTPDPFRRHDSITIVVVSRLVYRKGIDLLSGIIPELCQKYPDLNFIIGGEGPKRIILEEVRERYQLHDRVRLLGALEHKDVRNVLVQGHIFLNTSLTEAFCMAIVEAASCGLQVVSTRVGGIPEVLPENLIILCEPSVKSLCEGLEKAIFQLKSGTLPAPENIHNIVKTFYTWRNVAERTEKVYDRVSVEAVLPMDKRLDRLISHCGPVTGYIFALLAVFNFLFLIFLRWMTPDSIIDVAIDATGPRGAWTNNYSHSKRGGENNEISETR

SEQ ID NO: 130491 - protein, 169 aa, Artificial Sequence
  derived and/or modified sequence
MAIVEAASCGLQVVSTRVGGIPEVLPENLIILCEPSVKSLCEGLEKAIFQLKSGTLPAPENIHNIVKTFYTWRNVAERTEKVYDRVSVEAVLPMDKRLDRLISHCGPVTGYIFALLAVFNFLFLIFLRWMTPDSIIDVAIDATGPRGAWTNNYSHSKRGGENNEISETR

SEQ ID NO: 130492 - DNA, 1455 bp, Artificial Sequence
  derived and/or modified sequence
atggcctgccggggtggcgcaggcaatgggcaccgtgctagcgcaaccctctcacgggtgtcacccgggagcttgtatacctgccgaactcggacccacaacatatgtatggtgtcagatttcttctatcctaatatgggaggagtggaatctcatatttaccagctttcccagtgcctcatcgagcgcggtcataaggtcatcatcgtaacccacgcctacggcaataggaaggggattagataccttacttcaggcctcaaagtatactacttacctctgaaagtcatgtacaaccagagcacagccaccaccttgttccattctcttccattattgcgttacatcttcgtaagggagagggtcaccatcatccactcccatagcagcttcagcgcaatggcccacgatgctctgttccacgccaagactatggggctgcagaccgtgttcacagaccattcactttttggctttgccgatgtgagtagtgttctcaccaataagctgctgacagttagcctctgcgataccaaccatattatttgcgtgagttacacaagcaaagagaatacagtcctgcgcgctgcattaaacccagagattgtgtccgtgattcccaacgcggtagaccccactgatttcacaccagatcccttccgccgacacgattctatcacaattgtggtcgtctctagactcgtatatcgcaaaggaatagacctcttatctggaatcatcccagaactgtgtcagaagtaccccgacttgaactttataatcgggggagagggccccaagcggataattcttgaggaggtccgagaacggtaccagcttcatgaccgcgtccggttgctcggagctctggaacacaaagacgtccggaatgttctggtacagggtcacattttccttaatacatcattgacggaggctttttgcatggccattgtggaagccgcttcctgcggcctgcaggtggtttcaacccgcgtggggggaatcccagaggttttgcctgaaaatctgatcatcctctgtgaacctagcgtcaagtccctgtgcgaaggtctggaaaaggctatctttcagctgaagtcggggacactcccagcgcctgagaacatacataatatagtgaagaccttctacacatggcggaacgtcgccgagaggaccgaaaaggtttacgaccgtgtttctgtggaggctgtgctccccatggataagagactggaccggttgatctcgcactgcgggcctgttaccgggtacatcttcgctttgctcgctgtgttcaacttcctgttcctcatattcctgcggtggatgactcccgatagtattatagatgtcgccatcgacgcaacaggccccaggggcgcatggacgaataactattctcactcaaaacgtggaggggaaaataatgagatttccgagaccaggtag

SEQ ID NO: 130493 - DNA, 1455 bp, Artificial Sequence
  derived and/or modified sequence
atggcctgccggggcggcgctggaaatggccaccgggccagcgccaccctgagccgggtgtccccaggcagcctgtacacctgcaggaccaggacccacaacatctgcatggtgtctgacttcttctaccccaacatgggcggcgtggagagccacatctaccagctgagccagtgcctgattgagcggggccacaaggtgatcatcgtgacccacgcctacggcaacaggaagggcatccgctacctgaccagcggcctgaaggtgtactacctgcccctgaaggtgatgtacaaccagagcacagccaccaccctcttccacagcctgcccctgctgcgctacatctttgtgcgggagcgggtgaccatcatccacagccacagcagcttcagcgccatggcccatgatgccctcttccacgccaagaccatgggcctgcagacagtgttcacagaccacagcctgtttggatttgctgatgtgtcctctgtgctgaccaacaagctgctgactgtgtccctgtgtgacaccaaccacatcatctgtgtgtcctacaccagcaaggagaacacagtgctgcgggccgccctgaaccctgagatcgtgtctgtcatccccaatgctgtggaccccacagacttcaccccagaccccttcagaagacatgacagcatcaccatcgtggtggtgtcccggctggtgtacaggaagggcatcgacctgctgagcggcatcatccctgagctgtgccagaagtacccagacctgaacttcatcattggaggagagggccccaagaggatcatcctggaggaggtgcgggagcgctaccagctgcatgacagagtgcggctgctgggcgccctggagcacaaggatgtgagaaatgtgctggtgcagggccacatcttcctgaacaccagcctgacagaggccttctgcatggccatcgtggaggccgccagctgtggcctgcaggtggtgtccaccagggtgggcggcatccctgaggtgctgcctgagaacctgatcatcctgtgtgagcccagcgtgaagagcctgtgtgagggcctggagaaggccatcttccagctgaagagcggcaccctgcctgcccctgagaacatccacaacatcgtgaagaccttctacacctggagaaatgtggccgagaggacagagaaggtgtatgacagagtgtctgtggaggccgtgctgcccatggacaagaggctggacaggctcatcagccactgcggccctgtgacaggctacatctttgccctgctggccgtgttcaacttcctgttcctgatcttcctgcgctggatgaccccagacagcatcattgatgtggccattgatgccaccggccccaggggggcctggaccaacaactacagccacagcaagaggggcggggagaacaatgagatcagcgagaccaggtag

SEQ ID NO: 130494 - DNA, 1455 bp, Artificial Sequence
  derived and/or modified sequence
atggcctgccggggcggcgccggcaacggccaccgggccagcgccaccctgtcacgtgtgtcccctggttctctgtacacctgccgaacccgaacacataacatttgcatggtgtctgatttcttctatcccaacatgggcggagtcgagtctcacatttaccagctgagtcaatgcctgatagagcgtgggcacaaggtgataattgtgacccatgcatacggcaaccgtaagggcatacggtatctgactagcggtctcaaagtctattacctgccactaaaggtgatgtataatcagtctacagctaccacactcttccatagcctgcccctgctccggtacatatttgtgcgggaacgcgtgacaataatccattcccatagctcgtttagcgcaatggcccatgatgcattattccatgcaaagaccatggggctccaaaccgtatttacagatcactccttgtttggtttcgccgatgttagttctgtcctcactaacaagttgctaactgtctcactttgcgatacgaaccatattatatgcgtgtcatatacctccaaggagaacactgttctcagggccgcccttaacccagagatcgtgtccgtgattcctaacgcagtagatcccactgattttacccctgacccatttagacgccatgactccataacaatcgtggtggtttctcgcctggtgtacaggaaaggaatcgatttactctccggcattataccagaactctgccagaagtatcccgacctaaattttatcatcggtggtgagggcccaaagcgaatcattctggaggaggtgagggagcgttaccagctgcatgatagagttaggctcctgggcgccctcgagcacaaagatgttagaaatgtgctggttcagggccacatcttccttaacacaagcctcaccgaggccttttgtatggcaattgtggaggcagcctcatgcggtctgcaggttgtgagtacaagggtgggagggattccagaggtgctccctgaaaatctaatcatcctgtgtgaaccttccgtcaaaagtctctgcgagggtctggagaaggcaatctttcagctcaaatctggcaccctgccggcgcctgaaaatatacacaatatcgttaaaactttctatacttggcgtaatgtagcggagaggacggaaaaagtatacgaccgagtgagtgtcgaagcagtattgccaatggacaagcggttggaccggctaatatcgcattgcggtcctgtgacgggatatatctttgcgctgttagccgtgtttaattttctgtttctgatttttctccgctggatgacacctgatagcatcatcgatgtcgccattgacgctaccggtcctagaggtgcctggaccaataactattctcacagtaaaagaggaggggaaaacaacgaaatctctgaaaccagatag

SEQ ID NO: 130495 - DNA, 3590 bp, Artificial Sequence
  derived and/or modified sequence
actggcggccatggaactcaccggtaatagaggacacatctcttaactgggttgctctaagaactgatgtctaaaccgtctcagcatggcctgtagaggaggagctgggaatggccaccgtgcctcagctacactctctcgggttagccctggaagtctttacacatgtagaacccgtacccataatatatgcatggtatctgactttttctacccaaatatgggaggcgtggaaagccacatttaccagctctctcagtgcctgattgaaagagggcataaggttataattgtcacccatgcttatggaaatcgaaaaggcatccgttacctcaccagtggcctcaaagtctattacttgcctctgaaagtcatgtacaaccagtctacagccacgaccctctttcacagtctgccattgctcaggtacatatttgttcgggagagagtcacgataatccattcacatagttctttttctgctatggcccatgatgctctcttccacgccaagacaatggggcttcagacagtcttcacggaccattccctttttggatttgctgatgtcagctcggtgcttacaaacaagcttctaaccgtgtctctttgtgatacaaaccacatcatttgtgtgtcttatactagtaaggaaaatactgtactaagagcagcactgaatcctgaaatagtgtccgtcattcctaatgctgtagatcctactgacttcactccagacccatttagaaggcatgatagtataactattgttgttgtcagcagacttgtttacagaaaagggatcgatttgcttagtggtataatacctgaactctgtcagaaatatccagatttaaatttcataattggaggagagggaccaaagagaatcattttggaagaagttcgggaaagataccagctgcatgacagggtgcgtcttttgggagctttagaacacaaggatgttagaaatgtcttagttcaaggacatatttttctgaatacctcccttactgaagcattctgcatggcgatcgtggaagcagccagttgtggtttacaggttgtaagtaccagagttggtggaattcctgaggtgcttccagaaaaccttattattttatgtgagccttcagtaaaatctttgtgtgaaggattggaaaaggctattttccaactgaagtcagggacattgccagctccagaaaacatccataacatagtaaagactttctacacctggaggaatgttgcagaaagaactgaaaaggtatatgaccgggtatcagtggaagctgtgttgccaatggacaaacgactggacagacttatttctcactgcggcccagtaacaggctacatctttgctttgttggcagttttcaacttcctcttcctcattttcttgagatggatgactccagattctatcattgatgttgcaatagatgccactgggccacggggtgcctggactaataactattctcacagtaaaagagggggtgagaataatgagatatctgaaaccaggtagaaggaagcctagattgtaagattttaaacatttgtaatagttctataaagactatggaaaataaccttgcttttggggggtttttgtttttttagagttaatttagtaagttatgctacctctatatcattcaatattttctgttgaggaaagataaaaatgtatgcaattcctgagtgtagaaacttcttgcacttatttaaaatttaggagagaacatttaagccactcaggtatgcaatttttcagactactgaaatccctgtagcagagatgttttaacattatattttgagagctttgggtgctgaagggccaaacgttttctgggcattttttggccagtttttaatgtaacaccattagacactcaccagatgtttacaagttttctttaggggaactacaacaattatatgaactgttttatatcatgttcatatacatttattaggaatctaaatcatgtctttgaacatttattaggttcactcagtaggtgttacatgtaattaacaggttccttgagtaagatagtccatcagttaccagcacattttgaacccctgctctgtgtagaatgttgaactagatgcttcccgccattaaggaccaggggtgcattcactctttgtttaccattcaaatggcttacttcatcataattgtggttgatatgagatcaatatccaacatgccaaaaatgctcatgccagttaatgccaggaaaaaaatcaccgacacactactagtactttgttcctgttgtatgcattctcctaggtagagcctccatcttcagttgtgtttgtgaaggtattttttgctttttaaatactggggaccgatatcactgttgatagtgcagagaaaccctccacatttttcagtgcataattgagttttctataaatgccttcgtgttttctgagcagaatgtacgaggtgtgccatcccaaaaccagctgctaccctgtccttttaatgtaagtcactccccttcactgtggcctcgctgatgtctgataagtattgtcagtgtgcaaaaggctttacttcagaatggtttatttatagcaaactaagttgaaaattttagaaacagtctttgtgggtggatgttattaactgtcattgttgttgcccagagccatgggttttttaaccccaaattatccacatggtgtgtattatgaattctttgaactcttaaggtttttgtgagaaaaggactgtgaattcaaaacaataaggcacttgtgggtgcactacatagattctgacagtgttgtgattctgtataggatttttaaaaatgacaacattcacaaaatttattactttttaaaaaataacatgcctattaactggttgcactgatataaaagaaatatatttgtgttttgtttgtactaaaatgcaaaagcaagagtgcaatttttaaaatctagaagttaggggttttgttggagaaaaatggactgatctttaaactattcagtcttactgggatttttatgcatagaaactcacatataaacatgaaataaacagtgccagtattcataggaaagtgagaaactgtaatatttggccattattctattcaacaggttttagaggcatgccaccattttttccttatatttttgcttaatttttttaaattgtcatttaattcttaaactgtcatttatttgagatggaaataagatctaaagttagttgcctttgcctgtaaaacatgtgatttgcaaattattatttttcttttttttaacaaatggaagtaaatttgtttcacgtaaatcttaattttcaacctttctggataccttaattgtaactgtcagtttgcactggtcggtatatggaaacacattgctctaccctgctacttagttgattttaaagtgaatttacagtgatgagaaatttgtgaaaaatatattgtatttcttttgatgtttcaaaaggttgcctatgaaaaactgatttgttaaaacatgctacatgtccaaaaataaagaccagaatgacattttgataa

SEQ ID NO: 130496 - DNA, 1455 bp, Artificial Sequence
  derived and/or modified sequence
atggcttgtagaggaggcgcaggtaacgggcacagagcatcagccacattatccagagtgtctccgggtagcctgtatacatgtcgaacaagaactcacaatatctgcatggtcagtgactttttttacccgaacatgggcggtgtggaatctcatatctaccagctgagccaatgtctgatagagcgcggtcacaaagtaattatcgtgacccatgcttacggcaatcgcaaggggataaggtacctgaccagcggcctgaaggtgtactacctgccacttaaggttatgtacaaccagagtacggccaccactctctttcactctctgcccctcctgagatacatcttcgttcgggagagggtcactatcattcactcgcacagctctttttccgcaatggcccatgatgctctgtttcatgctaaaactatgggcctccagaccgtattcactgatcattctctgtttgggttcgctgacgtttcctccgtactcaccaataagctccttaccgtgtccctctgcgatactaaccacattatctgtgtctcctacactagcaaagaaaacaccgtcctccgagccgctttgaaccccgaaatcgtaagcgttatcccaaatgcggtggaccccaccgacttcacacctgatccattcaggagacacgactctatcactattgttgtcgtatcgaggctggtgtacagaaagggcatcgaccttttgagcggaatcattccagaattgtgccagaaatatccagatctgaatttcatcatcggtggagagggccctaagcgcatcatcctcgaggaggttcgcgagagatatcagctgcatgaccgcgtgcggttattgggagcattagaacataaggacgtcagaaatgttctggtgcaggggcacatctttctcaatacctctttgactgaggctttttgcatggcaatagttgaagccgcatcttgcggtctccaggtcgtctccacccgtgtgggtggcatccccgaggtgctacctgagaacctgatcattctctgtgagccctccgttaaatctctttgcgagggtctcgaaaaggctatattccagctgaaatcgggcacgctcccagcccctgagaatatccacaacatcgtcaagaccttttacacgtggcgcaacgtagccgagcgcactgagaaagtgtacgatcgcgtctccgtggaggctgtcctccctatggacaaaaggttggaccgactgatttcccattgcgggccagtgacaggctacatctttgccctgcttgcagttttcaatttcctgtttttaatctttctgagatggatgacccccgacagcataatagacgtggccatagatgccacagggcctagaggcgcatggaccaataactactctcattctaagagaggcggagagaataacgaaatctccgagacacgctag

SEQ ID NO: 130497 - DNA, 1452 bp, Artificial Sequence
  derived and/or modified sequence
atggcatgtagagggggggcagggaatggacaccgggcctctgcgacactgtcccgtgtaagcccaggttctctgtatacctgccgcaccagaacgcataatatttgcatggtatccgacttcttctatcccaatatgggaggcgtggaatcccatatctaccagttatcccagtgccttatagaaagaggtcacaaggttatcatagtgacacacgcgtacgggaatcgtaaagggatccgctatcttacttccggactgaaggtgtactatctgccacttaaggtcatgtataatcagtcgaccgctactacgctttttcacagcctgcctctgctccggtatattttcgtccgggagcgggtgacgatcatccacagccatagcagtttctctgccatggcacacgatgccctgtttcatgctaagacaatgggactacagacagtgtttacagaccactctctgtttggttttgccgatgtcagttctgtactgacaaacaagttgctcacggtctccctgtgcgacacgaatcatattatttgtgttagctatactagcaaagaaaatacagttcttcgcgccgctctgaacccagaaattgtaagcgtgattcccaacgctgttgatcccacagacttcacccccgatccttttcggaggcacgactccattactatcgtagtggtgagccggttggtgtaccggaaagggattgacctcctgtcaggaattatccccgagctgtgccagaagtaccccgacttgaattttattattggtggggaggggcctaaaagaattatcctcgaggaagtgagagaaaggtaccagctccacgaccgggtgcgccttctgggcgctctggagcataaagacgtccgtaacgtgctggtgcaaggccacatattcctcaacacgagtctgacagaagcattttgcatggccattgttgaagcagcttcatgtggtttacaggtggtatcaactagggtgggggggataccggaggtgcttccagagaacctgattattctctgcgagccctcagtgaagtctctgtgcgaggggctggagaaggcaatcttccagttgaaatccggtacgttgcccgcccctgagaacatccacaacatcgttaaaaccttctacacgtggagaaatgtggccgagcggactgagaaagtgtatgaccgcgtgagtgtggaggctgtgctgccaatggacaagaggctggacaggctaatcagtcattgcggaccggttaccggctatatcttcgcactgctggccgtgttcaatttcctattcttgatatttctgagatggatgacacctgacagcattattgacgtggctattgatgctacggggcccaggggcgcctggacaaacaattactcccacagcaaacggggcggggagaataatgaaatcagtgaaacacgg

SEQ ID NO: 130498 - DNA, 1452 bp, Artificial Sequence
  derived and/or modified sequence
atggcctgccgtggcggcgctggcaacgggcaccgcgcatccgccaccctgtctcgcgtctcgccgggcagtttgtacacttgcagaacacgtacccacaacatctgtatggtcagtgacttcttttacccgaacatgggtggtgtggagtcccacatctaccagctaagccagtgcctgattgagcgcggccataaggttatcattgtaactcacgcttatggaaaccggaagggcatccgctacctgacgtctggtcttaaggtctactacctgcccctgaaggtcatgtacaaccagtcgacagccaccaccctcttccattcattgcccttgcttcgttacatattcgtccgcgagcgcgtcaccatcattcattctcactccagcttctctgccatggcccacgatgctctttttcatgccaagactatgggcctccagaccgttttcactgaccactcgctgttcggcttcgccgacgtgagttccgtcctgacaaataagctgcttaccgtcagcctctgcgataccaatcacatcatctgcgtctcgtacacgtccaaggagaacactgttctccgcgctgccttgaaccccgagatcgtttcggttatcccaaacgctgttgatccaaccgacttcactcccgatccctttcgtcgccacgactccatcaccatcgtcgtcgtgagtagattggtgtaccgtaaaggtatagacctcctctcggggatcattcccgagctgtgtcaaaagtaccccgatttgaatttcatcatcggaggggagggccccaagcgaatcatcttggaggaggtgcgtgagcgttaccaactgcacgatcgggtcagactgcttggcgccctggagcacaaggatgtccgcaacgtcctcgttcagggtcacatcttcctgaacacgagtctgacagaggccttctgtatggccattgtggaagcggccagctgtggactccaagtcgtttctacgagagtcggtggtatccctgaggtcctacccgaaaatttgatcatcctctgtgagccttccgttaagtccctctgcgagggccttgagaaggccattttccaattgaagtctggcacattgcccgcacctgagaacattcacaacatcgtgaagactttttacacttggcgcaacgtcgccgagcgcaccgagaaagtctatgaccgcgtcagtgtcgaagccgtcctccctatggacaagagacttgatcggctgatttcccactgtggtcctgttactggatacatcttcgccctgctcgctgtcttcaacttcctcttcttgatattcctgcgttggatgacccccgattctatcatcgatgtcgccatcgatgccacaggcccccgtggcgcctggaccaacaactactcccactcaaagagaggtggcgagaacaacgagatctccgagactcgg

SEQ ID NO: 130499 - DNA, 1452 bp, Artificial Sequence
  derived and/or modified sequence
atggcttgtagagggggggccggcaacggacaccgcgcctctgccaccctgtcacgggtttctcctggtagtctgtatacctgcagaacaagaacccataatatatgcatggtgagcgatttcttttacccaaacatgggtggggtggagtcccatatttatcaactgtctcagtgcttgatcgagaggggtcacaaagtaataattgttacacatgcctacggcaaccgaaaggggatccggtacctgacatccggcttaaaagtctactatctgcccctgaaggtgatgtacaaccagtccacagccactacactgtttcactccctgccacttctccggtatatttttgtacgagagcgggtgaccataatccacagccacagttcattctctgcaatggcccacgacgcactgtttcatgctaagacaatgggtctgcagaccgtcttcaccgaccattcactattcgggttcgctgatgtcagcagcgtactgactaataaactcctcactgtaagtctgtgcgacaccaaccacatcatctgtgtaagttacacaagcaaagagaacacagttctgcgtgcagccctgaaccccgagattgtgtctgtaatcccaaatgctgtcgaccccactgattttaccccagatcctttccgaagacatgactccattaccatagtggtggtctctcggctggtgtatcgcaaaggaattgatttactgagtggcatcataccagaattgtgccagaagtaccccgatctgaattttataataggaggagagggccccaaaaggattatcttggaggaggttagagaaagatatcagctccatgacagagtacgtctgttgggagccctagaacataaggacgtgcgtaatgtccttgtccagggacacatctttttgaacacctccctgaccgaagcgttctgtatggcaatcgtggaggctgcatcttgtggtctacaggtggtctctactagggtgggaggaattcccgaggtgcttcccgagaacttaatcatcctatgcgagccgtccgtcaaatctctctgcgagggtctggagaaggccatcttccagctcaaatccggcaccctaccagcgccagagaatatccataatattgtgaagacgttttacacctggcggaacgtggcagagcgcactgagaaggtttatgaccgcgttagtgtcgaggccgtgctacctatggacaaacgcctggacagactgatcagtcactgtggacccgttacggggtatatcttcgccctgctggccgtgttcaattttcttttcctgatcttcctccgctggatgaccccggatagcataatcgacgtggccattgacgctactggcccgcgtggcgcctggactaacaattacagccactccaagcgcgggggggaaaataatgaaatatcggagacgagg

SEQ ID NO: 130500 - DNA, 1452 bp, Artificial Sequence
  derived and/or modified sequence
atggcatgcagggggggggcagggaacggacacagggctagtgcaacactgtcacgggtttcccccgggtctctttatacatgtaggacacgaactcacaacatctgcatggtctctgatttcttttatcccaatatgggaggggtggaatcccatatataccaactcagtcagtgtctaatagagcgaggacataaagtcataatcgtcacacacgcctatgggaacaggaaaggaattcggtatctgacttcagggctcaaagtgtattatctccctctgaaagtaatgtataaccagtcaacagccactacactcttccactccctccccctccttagatatatctttgtaagagagcgggtcacaattatccattcccattcttctttctctgcaatggcccatgacgcactctttcatgccaaaacaatgggactccagacagtctttacagatcactctttgttcggattcgccgatgtgtctagtgtcttgactaataagcttttaacagtgagtctctgcgatacaaaccatatcatatgtgtctcttatacttccaaagaaaacactgtcctccgggccgctctaaaccccgaaatcgtttccgttatacctaacgctgtcgatcccacagattttacacctgatccttttcggcgccatgattcaataactattgttgtcgtgagtcgcctggtttatagaaaggggatcgatctcttatctggaatcatcccagaactgtgccagaaatatcctgacctcaattttataataggaggagaaggacctaaaagaatcatcctggaggaagtccgagagagatatcagctgcacgatagggtacggctcctaggggctctagaacataaagacgtgcgtaatgtactggttcaggggcatatctttctcaatacatccctgacagaggccttctgcatggcaattgtcgaagcagccagttgcggactgcaggtggtctcgacaagggttggagggatccccgaagttttgcccgagaacctgataatcttgtgcgagccctctgtgaagtcactgtgcgagggactagagaaggcaatcttccagctaaaatccgggactcttcctgcccccgaaaatatacacaatatagtgaaaacattttatacttggcgcaatgttgccgaaaggacagagaaagtctatgatagagtctctgtggaagctgtccttcctatggacaagcggctggacaggctcatttcccactgtgggcctgtgacagggtatatcttcgctctgctggcagtattcaactttctatttctcatctttcttcgatggatgactccggactccataatagatgtagccatcgatgctacaggaccccgcggagcatggactaataactactcacattccaaacgcgggggagaaaacaatgaaattagtgagactcga

SEQ ID NO: 130501 - DNA, 1452 bp, Artificial Sequence
  derived and/or modified sequence
atggcctgccgcggaggtgctggaaatggtcatagagcctccgccacgctgagcagggtgtcaccaggcagcttgtacacttgtcgcactcgtacccataacatctgcatggtgtccgactttttctacccaaacatgggaggagtggagagccacatctaccaactgtcgcagtgcctgatcgaacgcgggcataaggtcatcatcgtgactcacgcctacggtaaccgcaagggaatccgctatctgaccagcggattgaaggtttactatctgccactgaaggttatgtacaaccagtcgaccgccaccacccttttccactccctgccgctcctgcggtacatcttcgtgcgggaaagagtgaccatcatccattcccactcgagcttctcggccatggctcatgacgcccttttccacgcgaaaaccatggggctgcagacggtattcactgatcactcgctgttcggcttcgccgatgtgagctccgtgttgactaacaagctgctcaccgtgtccctgtgtgacaccaaccacatcatttgcgtctcatacacttcgaaggagaacactgtgctgcgcgcggcgctgaatcctgagatcgtgtctgtgattcccaacgcggtggacccgaccgacttcaccccagatccgttcagacggcatgattccatcaccattgtcgtggtgagcaggctggtgtacaggaaggggatcgacctcctctctggcatcatcccggaattgtgtcaaaagtaccctgacctcaacttcatcattggcggcgagggaccgaaaagaatcatcttggaagaggtgcgcgagagataccagctgcacgaccgcgtgagactgctcggcgcgcttgagcacaaggatgtccgcaatgtgctggtccagggacacatctttctgaacacttccctgaccgaagccttttgcatggctatcgtggaagccgcgtcctgcggtctgcaagtggtgtccacgagggtgggcggcatcccggaagtcctgcctgaaaacctgatcatcctctgcgagccatcagtgaagtcgctgtgcgaaggactggaaaaggctatcttccaactcaagtcgggtacccttccggccccggagaatatccacaatattgtcaagactttttacacctggaggaatgtggccgagcggaccgaaaaggtgtacgatcgggtgagcgtggaggccgtgttgccgatggataagcgcctcgatagactgatctctcactgcggacctgtcaccggatacatcttcgcgctgctggccgtattcaattttctgttcctcattttcctccgctggatgactccggattcgatcattgacgtggcaattgacgccaccgggccgagaggggcgtggactaacaattactcgcattccaagcgcggaggcgagaacaacgagatctcagagacgagg

SEQ ID NO: 130502 - DNA, 1452 bp, Artificial Sequence
  derived and/or modified sequence
atggcatgtcgcggcggcgccggaaacggccatcgcgcctcggcaactctgtcccgagtgtcgccgggatcactctacacgtgtcggacccggactcacaacatctgcatggtttccgacttcttctacccgaacatggggggagtcgaaagccacatctatcagctgtcccagtgtcttatcgaacgcgggcataaagtgatcatcgtgactcatgcatacggtaatcgcaagggaatccgatacctgacctcgggcctgaaagtctactacctgccactgaaagtgatgtacaaccaatcgaccgccaccacgctgttccacagcctcccgctgctgcggtacatcttcgtgagggagcgggtgaccatcatccactcccattcgtcattcagcgccatggctcacgatgccctgtttcatgctaagaccatgggcctgcagactgtctttaccgaccactccctgttcgggtttgcggacgtttcctcagtcctgacgaacaagctcctcactgtgtccttgtgcgatactaatcatatcatctgtgtctcatacacctctaaggagaatactgtcctgagggcggcgcttaatccggaaatcgtctccgtaatcccaaacgcggtcgatccaactgattttactccagacccgtttcgcagacatgactcaatcacgatcgtggtggtgagcagacttgtgtatcggaaggggatcgatcttctcagcggcatcattccagagttgtgccagaaatacccggacctgaacttcatcatcggaggcgaggggccaaagcggatcatcctggaagaagtcagagaaagataccagttgcatgacagagtcagactgctgggagccctggaacacaaggacgtgagaaacgtgttggtgcaaggtcacatcttcctgaatacttcgcttaccgaggctttttgcatggcgatcgtggaagccgctagctgtggactccaagtcgtctctacgagggtaggtgggatcccggaggtcctcccagaaaacttgatcattctctgcgaacccagtgttaaatcactgtgcgagggactggagaaggctatcttccagctgaagagcggaaccctgcctgcgcctgaaaacatccacaatatcgtgaaaaccttctacacctggaggaatgtcgccgaaaggaccgagaaagtgtacgacagagtcagcgtggaggccgtgctgccgatggacaagcggctcgacagacttattagccactgcggcccggtcaccggatacatcttcgcactgttggccgtgttcaactttttgtttctgatattcctgagatggatgacccctgatagcatcatcgacgtcgctattgacgcgacgggaccgcggggagcctggaccaacaattactcacacagcaagcgtggcggagagaacaatgagatcagcgaaacccgc

SEQ ID NO: 130503 - DNA, 1452 bp, Artificial Sequence
  derived and/or modified sequence
atggcttgtcgaggaggagctggcaatgggcaccgcgcctccgccactctatcgcgagtaagtccggggtccttgtacacatgtcggacccgtacacacaatatttgtatggtttcggactttttctacccaaatatgggtggagtcgagtcccacatctatcagttgtctcaatgcttgatcgaacgtggtcataaggtcattatcgttactcacgcttatggaaatagaaagggaattcgctatttgacttctgggcttaaagtatattatttgccactcaaagttatgtataaccaatccaccgcaactaccttgttccatagtttaccactccttcgctatattttcgtcagggagcgggttacgataattcattcacactcttcgttctctgccatggctcacgatgcgttatttcatgcgaaaacgatgggattacagactgtttttacggaccactctttattcggatttgccgatgtcagtagtgttctgacgaacaaactgctcactgtttcactgtgtgatactaatcatattatttgcgtgtcatatacttctaaggaaaatactgtactccgtgccgctttaaatccggagatcgtatccgtcattccaaacgcagttgacccgactgactttactcctgatccattccgacgtcatgacagtattactattgtagttgtctcacgtctagtctacagaaaggggattgatctccttagcggaattattccggaactttgtcaaaaatatccggatttgaacttcatcataggaggagaaggaccaaagcgtattattctggaagaagttagagagcgttaccaacttcatgatagagttaggctgctcggagcattggagcataaggacgttcgtaatgttctggtgcaggggcatatctttttgaatacatctttgactgaagccttttgcatggcaattgtagaagcagcaagttgtggccttcaagtggtttctacacgagtgggaggaattccagaagtgctaccggagaatttaattattctttgcgaaccatccgttaaatcattgtgcgaaggacttgagaaggcaatattccaacttaaatcaggaacacttccggccccagaaaacattcataatattgttaagacattctacacatggaggaatgtagcagaacgcacggagaaagtatatgaccgggtttccgttgaagctgttttacctatggacaagcgtctggatcgtctcatctcccattgtggaccggtcacaggatatattttcgctttgctcgctgtatttaattttctattcttgatttttcttaggtggatgacccctgactcaataatcgatgtagccattgatgcaactggaccaaggggagcttggactaataattactctcactctaaacgagggggcgagaacaatgaaatttctgagactcga

SEQ ID NO: 130504 - DNA, 1452 bp, Artificial Sequence
  derived and/or modified sequence
atggcctgcaggggcggagcggggaatgggcaccgagcatcggcaaccctgtccagggtgagccccggctccctctacacatgcagaacccgcacccacaatatatgtatggtctctgacttcttttatcctaacatggggggagtggagtcccacatctatcagttgagccagtgcctaatcgagcgaggccacaaggtgataatagttacccacgcctatggtaatcggaagggaatacgttatctgacgagtgggttgaaggtgtactatcttcctctcaaagtgatgtacaaccaaagcactgctaccacactgttccatagtctccccctgctgagatacatattcgtcagggagcgggtgacaataatacactcccacagctctttctccgccatggcacacgacgcattgttccatgccaagaccatgggacttcagaccgtgtttacggaccattcgctgttcggtttcgctgacgtttctagtgtcctgactaataagctccttacggtcagcctgtgtgacaccaatcacataatttgtgtatcttacacaagcaaagagaacaccgtgcttcgagcagcgctgaaccctgaaatcgtgtcagtgattcccaacgctgtggatcccaccgattttacacctgacccttttcggcgtcacgatagtatcactatcgtcgtggtttcccgccttgtgtataggaaaggcattgacttgctatctggaatcatccctgaactgtgccaaaagtaccccgacctgaacttcattattggcggcgagggacccaaacgaattatccttgaggaagttcgcgagaggtatcagctccatgaccgggtgcggcttcttggagcccttgaacacaaggacgtacgaaacgtgctcgtgcagggacatatcttcttgaacacatccctgaccgaagctttttgtatggctattgtcgaagctgcaagctgcggcctccaggtggtttccactagagtgggcgggatcccagaggtcctgccggagaatcttataattctttgcgagccttcagtgaaatctttgtgcgaaggcctggagaaggcaattttccagttgaaatctggcaccctgccagctcccgaaaacattcataacatcgttaagaccttctatacttggcggaacgtggccgaaaggacagagaaagtgtacgatcgcgtttcagtcgaagccgtcctgccgatggataagagactcgaccggctgatctcacactgcgggccggtgacaggctacattttcgctctgttggcggtgttcaattttctcttcctaatcttcctacggtggatgactccagactccattattgatgtagctatagatgcaaccggacctcgtggtgcttggacaaacaactactcccacagcaagagaggcggtgagaataatgagattagtgagacaagg

SEQ ID NO: 130505 - DNA, 1452 bp, Artificial Sequence
  derived and/or modified sequence
atggcctgcagaggaggtgccggcaatggtcaccgcgcatcagcgaccctgtcccgggtatcgcctggatcgctgtacacttgccgcactcgcacccataacatctgcatggtcagcgacttcttctaccctaacatgggcggcgtggaaagccacatctaccagctgtcgcagtgcctgattgagaggggacacaaagtgatcattgtgacccacgcatacggaaacagaaaaggaattcgctacctcacctccggcctgaaagtgtattacctgcctcttaaagtcatgtacaaccagtctacggctaccaccctgtttcacagcctgccactgctgcgctacatcttcgtgcgggagcgagtcactattatccactcgcactcgtcgttctcggcgatggcacacgatgctctgttccacgcaaaaacgatggggctccaaactgtcttcactgatcacagcttgtttgggttcgccgacgtctcatcggtcctcacgaacaagctgctgaccgtctcgctgtgcgacaccaaccatatcatctgcgtctcgtataccagcaaggaaaataccgtgctccgcgctgccctgaatccagagatcgtgtcggtgatcccgaacgctgtggaccctactgacttcactccggacccgttcaggcggcacgactcaatcactatcgtcgtggtgtcccggcttgtttaccgcaaggggattgacttgctgtcgggcatcattccagaactttgccaaaagtacccggacctgaacttcatcatcggaggcgaagggccgaagagaattattctggaggaagtgcgcgaaagataccagcttcacgaccgagtgcgcttgcttggcgctctggagcataaggatgtccggaatgtgctggtgcaaggtcacatcttcctcaatacctccctgaccgaagcgttctgcatggcgatcgtggaggccgcctcatgtggattgcaggtcgtgagcactagagtcggagggattccggaggtgctgccggaaaatctgatcatcttgtgcgaaccgtcggttaagtccttgtgtgaaggcctggagaaagccatcttccaacttaagtccggcactctcccagctccggaaaatatccacaacatcgtgaagactttttacacctggagaaacgtcgccgaacggactgaaaaggtctacgatcgcgtctcggttgaagcggtcctgccgatggataagcgcctggatagactgatcagccactgcggaccggtcacgggttacatcttcgcactgctggccgtgtttaactttctcttcctcattttcttgaggtggatgactccagactcgatcatagacgtggcaattgatgcgaccggaccacggggagcctggaccaacaattactcacactccaaaaggggtggagaaaacaatgagatctccgaaactcgc

SEQ ID NO: 130506 - DNA, 1452 bp, Artificial Sequence
  derived and/or modified sequence
atggcatgtagaggaggtgccggaaatggtcatagggcatctgcgactctttcaagagtgtctcccggaagcctgtacacctgtcgtaccaggactcataacatttgtatggtgtcggacttcttttacccgaacatgggaggagtcgaatcccacatttatcagctttcacaatgtctcatagaaagaggtcacaaagtcataatagtgacccatgcatacggaaaccgaaaaggtattcgttatctgacttccgggctcaaggtgtactacctgccactgaaggtgatgtacaatcaatccaccgccaccaccctttttcactccctgcctcttctcaggtacatttttgtccgagaacgtgtgacgattatacattcgcatagctccttctcggcaatggcacatgacgcactctttcacgcaaagaccatgggactccaaaccgtgttcactgaccattccttgtttggcttcgcagatgtctcgtcagtgctgaccaataagctcctgacggtgtcgctgtgcgacaccaaccatatcatttgcgtgtcatacacgtccaaggagaacaccgtcctccgcgcagcccttaaccctgaaattgtgtcggtcattcctaatgccgtggaccctaccgatttcactccagacccctttcgcaggcatgactccataaccatagtcgtggtgtcccggcttgtgtacagaaaaggaatcgatcttctctccggaatcattcccgaactgtgccaaaagtacccagatctcaacttcataattggtggagaaggaccgaagaggattatactcgaagaagtgagagagcgctaccaacttcatgaccgagtgcgactgctcggcgcactggaacacaaggatgtccgcaacgtgcttgtccaaggtcatatcttccttaacacttcccttactgaggccttttgtatggcaatcgtcgaagccgcttcctgtggtttgcaagttgtctccacgagagtggggggaatcccagaagtgctgccagaaaacctgattatactttgtgagccatcagtcaagtctctttgtgaaggacttgagaaagcaattttccaactcaagtccggtacgcttcctgcacccgagaacattcataacatcgtgaaaaccttttacacttggcggaatgtcgccgaacgcactgaaaaggtgtacgatagagtgtcggtggaagctgttctccctatggataagagacttgatcgcctgatctcccattgcgggcctgtgactgggtacatcttcgcccttctggcggtctttaacttcctgttcttgatatttctgagatggatgacccccgattcgatcatcgatgtggcaattgatgcaaccggaccccggggtgcatggactaacaactactcgcatagcaagcggggtggagagaacaacgagattagcgagactcgt

SEQ ID NO: 130507 - DNA, 1452 bp, Artificial Sequence
  derived and/or modified sequence
atggcgtgtaggggcggggccgggaacgggcacagagcaagcgcaaccctgtctagggtgtccccagggtcgttatacacctgcagaaccagaacccataatatttgcatggtttccgattttttttaccccaatatggggggcgtagaaagccatatctaccagttgtcgcaatgcctaatcgaacgtggtcacaaagtgataatagtaacacacgcttacggcaacaggaaaggaatcaggtatcttactagcggattgaaggtctactacctgcccctgaaggtgatgtacaaccaatccactgcgaccacacttttccactcgttacccctattaaggtatatcttcgtgagagagagggttacaattatacactcacattctagcttctcggcaatggcccacgatgcactcttccacgcgaagacaatgggactgcagaccgtatttacagaccactccctgtttggattcgccgatgtttctagcgtgcttactaacaagctgcttacagtgtccctgtgtgacacgaaccacattatttgcgtatcctacacgtctaaagaaaatacagtccttagggctgcactcaatcccgaaatcgtgtccgttatccctaacgctgtagaccccaccgatttcacccctgatccattccgccgacatgattccattacaattgtggtcgtgagtagattggtctacaggaagggaatagatttgctgtcaggcatcatacctgaactgtgtcagaagtatcccgatctcaatttcatcatcggcggagaagggcccaagagaattattctcgaggaagtgcgagaacgttaccaactacatgacagagtgagactgttaggcgcccttgagcataaggacgtgaggaatgttctcgttcagggccatatctttttaaacaccagcctcactgaggctttttgtatggccatcgtggaagcggcatcctgcgggttgcaagtggtgagcacacgagtcggcggtattcccgaagtacttccggaaaatctgataattttgtgcgaacccagcgtgaagagcctttgtgaagggctggaaaaagctattttccagctgaagagtggtaccctgccagcgccggaaaatatccataatattgttaagacattctatacttggcgaaacgtggccgagcggactgagaaagtgtacgatcgtgttagtgtggaggccgtgttgcccatggacaagcggctcgacaggttaatttcacattgcggccccgtaacaggttatatcttcgcattgcttgccgtctttaactttttatttctcatatttctaagatggatgactcccgatagcatcatcgacgtagctatcgatgcgaccgggcctagaggtgcatggacgaacaattactcccacagcaaacgtggcggcgaaaataatgaaatcagcgagacgagg

SEQ ID NO: 130508 - DNA, 1452 bp, Artificial Sequence
  derived and/or modified sequence
atggcgtgcaggggaggagccggtaatggccaccgcgcttcggccaccctttctcgcgtgtctccgggatccctctacacctgtcggactcgaactcacaacatatgtatggtgtcggatttcttttatccgaacatgggaggtgtggaatcgcacatctaccaactttcacagtgcctgatcgaacgcggacataaggtgatcatcgtcactcacgcatacggaaatagaaagggtatcaggtaccttacgtcgggtttgaaagtgtactacctcccgttgaaggtgatgtacaatcaatccaccgccactactctgttccattcgctgccgctcctgaggtacattttcgtccgcgagagagtgaccatcatccattcccactcctcgttctcagccatggcacacgacgctctcttccatgcaaagactatgggtctgcagactgtgttcaccgaccactccctgttcggatttgcagacgtgagcagcgttctgaccaacaaactgctgaccgtgtcgctttgcgataccaatcacatcatttgcgtttcatacacctcaaaggaaaacacggtcctccgggccgccctgaacccggagatcgtgagcgtaatcccaaatgccgtggacccgactgacttcacccctgacccgtttaggagacacgactcgattactatcgtcgtggtgagccgtctggtgtatcggaagggcatcgacttgctttctggaattatcccggaactgtgtcagaagtaccccgatctgaacttcatcatcggaggggagggacctaaaaggatcatcctcgaagaagtgagagagcggtaccagctccacgatcgtgtgcgcttgctgggagcgctggaacataaggatgtccggaacgtgttggtgcaaggccacattttcctcaacacttccctgactgaggcgttctgcatggccattgtcgaagccgcgagctgcggactgcaggtcgtctccaccagagtggggggcatcccagaggtgttgcccgagaacctcatcatcctctgcgagccaagcgtgaagtctctgtgcgaaggcctggagaaagctatctttcagctcaagtcgggcacgcttccggcacctgaaaacatacataacatcgtaaaaactttctacacctggcgtaatgtggcagaacgaacggagaaggtatacgaccgcgtgtcggtcgaggctgtcctgcccatggataagcgcttggaccgccttatcagccactgcggaccagtgaccgggtacatctttgcgctcctcgccgtgttcaatttcttgttcctcatctttctgcggtggatgacccctgactcaatcatcgatgttgctattgacgcgactggcccacgcggagcctggaccaataactactcccattcgaaacggggaggggaaaacaatgagatctcagaaactcgc

SEQ ID NO: 130509 - DNA, 1452 bp, Artificial Sequence
  derived and/or modified sequence
atggcctgtaggggaggtgctggaaatggccacagggcctccgccacactaagccgggtgagtccggggtcattgtacacgtgccggaccaggacacacaacatttgtatggtttctgatttcttttaccctaacatgggcggagtggaaagccacatataccagctttcacaatgcctgattgagaggggccataaggtaatcatagtgacccacgcttatggtaaccggaagggcatacgttatctgacaagcggtctaaaagtatattatctgcctttaaaagtaatgtacaaccagtccaccgccacaacactgttccacagtctgcctctccttcgctatattttcgtccgtgagcgcgtgacaatcatccattcccactccagcttcagcgctatggcccacgatgcactgttccacgcaaaaaccatgggactacaaactgttttcaccgaccacagtctgttcggcttcgcggacgtgtcaagcgtattgacgaacaagctattgactgtctccttgtgcgacaccaaccacatcatttgcgtgagctatacaagcaaggaaaatactgttctgagagctgcactgaaccccgagattgtctctgtaatccccaacgccgtggatccgacagatttcacacctgatcctttccggcggcatgatagtataacaatcgttgttgtcagccgcctggtgtatagaaaagggatcgatctgctgagcgggatcattcccgagttatgtcagaaatatccggacctgaacttcattataggaggcgagggtccgaaacgaattatccttgaggaagtgagggaacggtaccagcttcacgacagagtgcgcttgctgggcgcgctggagcataaagatgttcggaatgtgttggtacaggggcacatttttctcaataccagcctgacagaggctttctgcatggcgattgtagaagctgcaagttgcggcctccaagtggtctctacgagggtgggcggtatccccgaggtgctgcctgagaatttaatcatactatgcgaaccatctgtgaagagcctctgcgaaggactggagaaggcaatttttcagttgaagtctggaactctgcccgccccagaaaatatccacaacattgttaaaaccttttacacctggcgcaatgtagccgaaaggacagagaaggtgtatgaccgggtgtccgtggaagccgttttgccaatggacaagaggctggatcgcttgatctcccattgtgggcccgttaccgggtatatttttgctctcctggccgtcttcaacttcctgtttctcatttttcttagatggatgacccctgacagcataatcgatgtcgccatagacgcaaccggcccccggggcgcctggaccaataactactcgcacagcaagaggggcggcgagaacaacgaaattagcgagacccgg

SEQ ID NO: 130510 - DNA, 1452 bp, Artificial Sequence
  derived and/or modified sequence
atggcctgccggggaggagcggggaatggacaccgcgcaagcgccaccctgagccgagtctctcctggctcgctctacacgtgccgcactcgcacgcacaatatctgcatggtgagcgacttcttctatcccaacatgggaggagtcgaatcacacatctaccagctgtcccagtgcctgatcgaacggggacacaaagtgatcatcgtcacccatgcctatgggaatcggaagggaatccggtatctgacttcaggactgaaggtctactaccttccgttgaaggtgatgtacaaccagtccaccgcgactactttgttccatagcctgccactgctccggtacatctttgttcgggagcgcgtgactatcattcactcccactcctcgttctcggcaatggcgcatgatgctttgttccatgccaagactatgggactccaaacggtgttcaccgaccattcactctttggctttgcggacgtgtcctcagtcctgaccaataagctgctcaccgtgtcactgtgtgataccaaccatatcatttgtgtgtcatacacctccaaggaaaataccgtgcttcgcgcggctctcaatccagaaatcgtgtcggtcataccgaatgcggtggacccaactgacttcactcccgacccatttaggcggcatgactccatcactattgtggtcgtgtccagattggtctaccgcaaaggcatcgacctcctgagcggcatcatccctgagctgtgtcagaagtacccggatctgaacttcatcatcggaggagaagggccgaagaggatcatactggaggaagttagggaacgttaccaactgcacgatcgcgtgcgcctgctcggcgctcttgagcataaggatgtgcgcaacgtcctggttcagggacacattttcctcaacacttccttgacggaagccttttgcatggctattgtggaggccgcctcctgcggtctgcaagtcgtgtcgaccagagtgggaggtatcccagaggtgctcccagagaatctgatcattctctgcgaaccctcagtgaagtcgctgtgtgaaggtctggagaaggcaattttccagctgaagtcgggaactctgccagcaccagaaaacatccacaacattgtgaaaacgttctacacctggcgcaacgtggccgaacgcactgaaaaggtgtacgaccgggtgtccgtggaggcagtcctgccgatggacaaacggctcgatagattgatatcgcactgtggcccggtgactggatacatctttgcgctgttggccgtgttcaatttcttgtttctgatcttcctgcgttggatgaccccggactccatcatcgatgtggccatcgacgccactggcccgagaggagcgtggaccaacaattacagccactccaaacgaggaggagaaaacaacgaaatctcggaaacccga

SEQ ID NO: 130511 - DNA, 1452 bp, Artificial Sequence
  derived and/or modified sequence
atggcatgccgtggaggagccggcaacggacaccgggcctcggctaccctctccagagtctcaccgggatccctgtacacttgtcgcactagaacccataacatctgtatggtgtcggattttttctacccaaacatgggaggagtcgaatcgcacatctaccagctgagccaatgcctcatcgaaaggggacacaaggtgattatcgtcactcatgcctacggcaaccgcaaaggaatccggtaccttacttcaggactgaaggtgtattacctgccgttgaaagtcatgtacaatcaatcaaccgcgacgacgctcttccacagcctgcctctcctgcgctacatttttgtgcgggaacgcgtgaccatcatccactcccactcctccttcagcgcgatggcccacgatgctctgtttcatgccaagacgatgggcctccagaccgtgttcactgatcattcactcttcggatttgcggatgtgtcgtctgtactcaccaataagctcctgaccgtttccctgtgcgacaccaaccatatcatttgcgtcagctacacctccaaggaaaacaccgtgttgcgcgccgctctgaacccggagatcgtgtccgtgatccccaatgccgtcgatccgactgactttaccccagacccttttcggcggcatgattctattactatcgtggtcgtgtcgcgcttggtgtacaggaaaggaatcgacctcctgtcgggaatcatccccgagctgtgccagaaatacccagacctgaacttcatcatcggcggcgaaggaccgaagcgaattatcttggaggaagtgagggagcggtaccagttgcacgacagagtgaggctcctgggggcactggaacacaaggacgtgcgcaacgtgctggtccagggtcatatcttccttaacaccagtcttactgaggccttctgcatggcaatcgtggaggccgcctcctgcggactccaagtcgtgtcgaccagagtgggtggtatcccagaagtgctccctgagaacctcatcatcctgtgcgaaccgagcgtcaaatcactgtgtgaagggcttgaaaaggcaatcttccagctgaagtccggcactctgccggcgccagaaaacatccataatatcgttaagacgttctacacctggagaaatgtggcggagcggaccgagaaggtgtacgaccgagtcagcgtggaggctgtgctgccgatggacaagcggttggaccggctgataagccactgcggcccggttactgggtacattttcgcgctgctggccgtgttcaatttccttttcctgatcttcctgagatggatgactcccgattcgattatcgatgtcgctatcgacgcaactgggcctcgcggtgcgtggaccaacaattattcacactcgaaacgcggcggggaaaataacgagatcagcgaaactcgc

SEQ ID NO: 130512 - DNA, 1452 bp, Artificial Sequence
  derived and/or modified sequence
atggcatgccgcgggggagccggaaacggccatcgggccagtgctacattgtctcgcgtgagccctgggtcactgtacacctgccgaacacgtacgcataatatttgtatggtgagcgactttttctatccaaatatgggaggcgtggaaagccatatctatcagttgtctcagtgcttgatcgaaagagggcacaaggtcattatcgtgacccacgcatatggaaatcggaagggtatccgttatctgaccagcgggctgaaagtctactacttgccgctgaaagtgatgtataatcagagcaccgccaccaccttatttcacagtctgcccctgttacggtacatctttgtgagggagagagtcaccattatccatagtcattcttctttctctgcaatggcacacgacgccctcttccatgctaaaacaatggggcttcagacagtgttcaccgatcactccttgtttggcttcgcggatgtgtcaagtgtgctgaccaataagctgctaaccgtgtcgctctgcgataccaaccacattatctgcgtgagttacacatcaaaggagaataccgtgctgcgggccgccctgaaccctgagatcgtaagtgtcattcctaacgccgtggatcccactgacttcacaccagacccttttagacgccatgatagcataactatcgtagtcgtctccaggctggtgtaccgcaagggcatcgatttgttatccggcataattcccgagctttgccagaagtatcccgacctgaatttcataattgggggagaagggcctaagagaataatcctggaagaagtgagggaaagataccagcttcacgaccgggtgcggcttctgggagccctcgagcataaggatgtgcgtaacgttttggtgcaggggcatatctttttgaatacatccctcactgaggccttttgcatggccattgtcgaggccgcctcctgcgggctacaggttgtgagcacccgcgtgggcggaatccccgaagtgctcccagagaatctgattatcttgtgtgagccctctgtcaaatctttgtgcgaagggttagaaaaggcaatctttcagctcaaatcagggactctgccagcacccgagaacatccacaatatcgtaaaaaccttttatacttggagaaacgtggctgagcggaccgaaaaggtctacgaccgggtgtccgtagaggccgttctccctatggataagagactggaccgcctgatctcgcactgcgggcctgtgactggatatatatttgccctattagcagtgttcaacttcctgtttctgatttttctccggtggatgacacctgatagtatcatcgacgtcgccatagacgcaacaggccctcgtggcgcctggactaataattactctcacagcaagagaggtggcgaaaacaatgaaatcagtgagacgcgc

SEQ ID NO: 130513 - DNA, 1452 bp, Artificial Sequence
  derived and/or modified sequence
atggcgtgcaggggaggcgctggtaacggacatcgagcttccgctaccctctctcgtgtgtcacctggttccctctacacgtgcagaacccgcactcataacatctgcatggtatccgacttcttctacccgaacatgggtggagtcgagtcgcacatttaccaactgtcgcaatgcctcatcgaacgggggcacaaagtcataatcgtgactcatgcgtacggaaacagaaagggaatccggtaccttacttcggggcttaaggtttactacctccctctgaaggtcatgtacaaccagtccaccgcgaccaccctgttccacagcctccctctgcttcgctacatctttgtgagggaacgggtgaccatcattcatagccactcgtcgttctccgctatggcccatgacgcgctgttccacgctaagaccatgggactccagaccgtgttcactgaccactcactgttcgggttcgccgacgtgtcctccgtcctgacgaataagctgttgactgtgtccctctgcgacaccaaccacatcatctgcgtgagctacacctcgaaggagaatacggtcctgagggcagcgttgaaccctgaaatcgtgtcggtgatccccaacgccgtggaccctaccgatttcaccccggacccgttcagacggcatgattccatcactatcgtggtcgtctcccggctggtgtaccgtaagggcatcgacttgctcagcggaatcatccctgagctctgtcagaaatacccagacctgaacttcattatcggcggagagggcccgaaacgcattatcctcgaagaagtccgtgagcgctaccaattgcacgatcgggtgcgccttctgggtgcactggagcacaaggacgtccggaatgtgttggtgcaaggacatatctttctcaataccagccttactgaagcattctgtatggccatcgtcgaagcggcttcgtgcgggctgcaggtagtctccactagagtgggaggaattcctgaggtcctgccagaaaacctcatcatactgtgtgagccgtcggtgaagtccctgtgcgaaggcctggaaaaagccatcttccaactcaagtccggcaccctcccggcgccagaaaacatccacaacatcgtgaaaactttctacacctggcggaacgtggccgagagaactgagaaggtctacgacagagtgagcgtggaggcggttctgcccatggataagcggctggacaggctcatctcgcactgcggtcctgttaccggttacatcttcgccctcctggcggtgtttaacttcttgtttcttatctttctgaggtggatgactccagactccattatcgatgtggctatcgacgcaaccggaccgcgcggcgcatggaccaacaattactcacattcaaagagaggaggagagaataatgagatcagcgagactcgg

SEQ ID NO: 130514 - DNA, 1452 bp, Artificial Sequence
  derived and/or modified sequence
atggcttgcagaggtggggcgggaaatggccatagagcctccgcgaccctgtcgagagtgtccccgggttccctttacacctgcagaacgcgaacccacaacatttgcatggtcagcgacttcttctacccgaacatgggcggagtggagtcgcatatctaccagttgtcccagtgcctcatcgaacgcggacacaaagtgatcatcgtcactcacgcctacggcaatcgcaaaggcatccgctaccttaccagcggactgaaggtctattaccttccactgaaggtgatgtacaaccagtccacggccacgaccctgtttcattcgctgcctctcctgcggtacatcttcgtccgcgagagagtgaccattatccactcccattcatcattctcagcgatggcccacgacgcattgttccatgcaaaaacgatgggactccagactgtgtttaccgatcattccctgtttggattcgccgatgtgtcaagcgtgcttaccaacaagctgttgactgtttcgctgtgcgataccaaccacatcatctgtgtgtcgtacacctcgaaggagaatacggtcctgcgggccgccctgaaccctgagatcgtgtcggtgatcccaaacgcggttgatccgaccgactttacccccgacccgttcaggcggcacgattccatcactatcgtggtcgtgtctcgcctggtgtacagaaaaggaatcgatctccttagcgggattatccccgaactgtgtcagaagtacccggacctgaatttcatcattggaggagagggcccaaagcgcatcatcctcgaggaggtgagagagcgatatcagctccacgacagggtgcgcctgctgggagccctggagcacaaggatgtccgtaacgttctggtgcaaggacacatcttcctcaatacctcactgactgaagccttttgtatggctatcgttgaggctgcaagctgcggactccaggtcgtgtcgacgagggttggaggaatcccagaagtgctgccggaaaacctgatcatcctgtgcgaaccgagcgtcaagtccctttgcgaagggctcgaaaaagccatattccaactgaagagcggaacgctgcccgccccagagaacattcacaatatagtcaagaccttctacacttggcggaacgtggcggaacggactgaaaaagtgtacgatagggtgtcagtggaagcggttcttcctatggataaacggctggatcgcctgatatcgcactgcgggcccgtgaccggttacatcttcgcgctcctggcagtgttcaacttcctgttcctgatcttcttgagatggatgactcctgactcgatcatcgatgtcgccatcgacgccactggaccgcggggagcgtggaccaacaattactcgcactccaaacggggaggcgaaaacaatgaaatctcggaaactcgc

SEQ ID NO: 130515 - DNA, 1452 bp, Artificial Sequence
  derived and/or modified sequence
atggcctgccgcggcggagccggcaatggccacagggcctccgccactttgtccagagtttcccccgggtcactctatacttgcagaacccggacccacaacatatgcatggtaagcgatttcttctaccccaacatgggcggcgtggagtcacacatataccagctgagtcaatgtcttatagagagaggccataaagtgattatcgtgactcatgcctacggcaaccgaaagggcattcggtatctgaccagcggcctcaaggtctattacctgcccctgaaggtgatgtataaccagtccactgccaccaccctgtttcactctctgccattactccgatatatattcgtgcgcgaacgggtcacaatcattcatagtcatagcagcttctcagccatggcccatgacgccctgttccacgcaaagacaatggggttgcagacagtctttaccgaccattcactattcggattcgccgacgtgagcagtgttttgactaataaactgctgactgtcagtctgtgtgataccaatcacataatctgtgtgagctacacatctaaggaaaatacagtgctgagggccgctctgaaccccgaaatcgtgtccgttattcctaatgccgttgatccaacagactttacacctgaccctttcagaaggcatgattccataactattgttgtggtcagtcgcctcgtttatcgcaaaggcattgacctcctgtctggcattatacctgagctctgccaaaagtaccctgatctaaattttattatcggcggagagggccctaaaaggattatcctggaggaggtgcgtgaaagatatcaactacacgacagagtgagactgctgggggccctggagcacaaagatgtcagaaatgtgctcgtccaaggacatatcttcctgaacacaagcctaactgaagccttttgtatggcaatagtggaggccgccagttgtggcctccaagttgttagcactagggtgggtggcatccccgaggttctgcccgaaaatctgataatactgtgtgaaccctctgtgaagtcactgtgcgagggccttgaaaaggccatattccagctgaaaagtggtacattacctgcccctgagaatattcacaacattgtcaagacattctacacctggaggaacgtggctgaaaggaccgagaaggtatatgatcgggtgtccgtggaggccgtgctgccaatggataaaaggttagatagactgataagccactgcgggcctgtcactgggtatattttcgccctcctggcagtgtttaactttctgttcttaatcttcctgagatggatgaccccagacagtataatagatgtggcaatcgacgcaaccggccctagaggcgcctggaccaataactattcccatagcaagagaggcggcgaaaacaacgaaatttcagaaacccgc

SEQ ID NO: 130516 - DNA, 1452 bp, Artificial Sequence
  derived and/or modified sequence
atggcctgccgcggcggggcaggcaacggccaccgcgcatcagccactctctcgcgcgttagcccaggctcgctgtacacctgccggactaggactcacaatatctgcatggtgagcgactttttctatccaaatatgggaggagtggaaagccacatctaccagctgtcgcaatgcctcattgaaagagggcacaaggtgatcatcgtgacccatgcgtatggcaataggaagggcatccggtacctgacgtccggcctgaaggtctactacctgcctcttaaagtgatgtacaaccagtcgactgcaaccactctgttccattcactgccactcctccggtacatcttcgtgagagagcgtgtgaccatcatccactcgcactcttcgttctccgctatggcccatgatgccctgttccatgccaagaccatgggactgcaaaccgtctttaccgaccattccctctttggatttgcggacgtgtcgtcggtgctcaccaataaactgctcaccgtgtcgttgtgcgacaccaatcacatcatttgcgtctcatacacttcgaaagaaaacactgtgctgcgcgccgcccttaatccggaaattgtgagcgttatcccaaacgccgtcgacccgactgactttaccccggacccgtttcggcgccacgattcgattaccatagtggtggtgtccaggctggtgtacagaaaaggtatcgacctccttagcgggatcatcccagagctctgtcaaaagtaccctgacctgaacttcatcatcggaggagagggaccaaagaggatcatcctcgaggaggtgagagaacgctatcagctccacgaccgcgtgaggctgttgggagccctcgagcacaaggatgtgcggaacgtgctcgtgcagggccatatcttcctcaacacctcccttactgaggccttctgcatggcgatagtggaggctgcatcttgcggattgcaggtcgtgagcacccgcgtcggtggaatccctgaggtgctgccggaaaacctcatcattctgtgcgagccttcggtgaaatcactgtgcgaaggactggaaaaggcgatcttccaactgaagtcaggaactctcccggcccctgaaaacatccataacattgtgaaaacgttctacacgtggagaaacgtggccgagcgcaccgaaaaggtgtacgaccgcgtgtcggtcgaagccgtcctgccgatggacaagcgcctggatcggctcatcagccattgcggacctgtcaccgggtacatctttgcactgctggcggtgtttaacttcctgtttttgatttttcttagatggatgactccagactccatcatcgacgtggctattgacgcgacgggcccgagaggagcttggaccaacaactactcgcattcgaagcggggaggcgaaaacaacgaaatctccgaaacccgt

SEQ ID NO: 130517 - DNA, 1452 bp, Artificial Sequence
  derived and/or modified sequence
atggcctgcagaggaggcgctggtaatggtcatagagcctccgctaccttgtccagagtgagtcccggctctctctacacctgcagaaccagaacccataacatttgtatggtgtccgacttcttctaccctaatatgggcggcgttgagtcccacatttaccagttgtcccaatgcctgatcgaacgtggccataaagtcatcattgtcacacacgcatacggaaataggaagggcatcagataccttacatccggcctgaaagtatattaccttcccttgaaggtcatgtacaaccagtccactgcaactactctgtttcacagtctgcctctgcttcgttatatctttgtgcgcgaaagggttacaatcattcactcccattcctccttctcagcaatggctcatgacgcactgtttcacgccaaaacaatgggtctgcagactgtgtttactgaccattccttgttcggatttgcagacgtcagctctgttctcaccaataaattgttgacagtgtctttgtgcgacactaaccacattatctgcgtatcttacacctccaaggagaacactgtcctgcgcgctgctcttaaccctgagattgtgtctgttattcctaatgccgtggatcccaccgactttacacctgatccattcaggaggcacgactccatcacaatcgtggttgtatccaggctcgtctaccgcaagggtatcgacctcttgtctggtatcatccccgaattgtgccagaaataccccgatctcaactttataattggcggcgaaggtcccaaaaggattatcctggaggaagtgagggagagataccagctccatgaccgcgtgcgtcttttgggcgcactcgagcacaaggacgttagaaacgtcttggtccagggtcatatattcctcaacacttctcttactgaggctttctgcatggctatcgtggaggctgcctcctgtggactccaggttgtgtccactagggtcggaggtatacccgaggtgctgcctgagaatctgatcatattgtgcgagcctagcgttaaatccctttgtgagggtcttgagaaggctatcttccaactcaagagcggcacattgccagctccagagaatattcacaacatcgtaaagaccttctacacctggcgtaacgtcgccgagagaactgagaaggtgtacgaccgcgtgtctgttgaggctgtcctgcctatggacaagagattggacaggcttatctcccattgcggaccagttaccggttacattttcgctctgctggccgtgttcaacttcctgttcttgatctttctcagatggatgacacctgactctataattgatgttgccatagatgctacaggacctcgcggagcatggactaataattatagccacagtaagaggggaggtgagaacaacgaaatcagtgagacacgc

SEQ ID NO: 130518 - DNA, 1452 bp, Artificial Sequence
  derived and/or modified sequence
atggcctgcagaggtggcgcggggaacggccaccgggcatcagcgactctgtcgagagtctccccaggcagcctctacacctgtagaactcgtacccataacatttgcatggtgtccgacttcttttatccgaatatgggtggcgtcgaatcacatatctaccaattgtctcagtgtctgattgaacgtggacataaggtgattattgtgacgcatgcttacggaaacaggaaggggattcgctatctgaccagtggactgaaggtgtactaccttcccctcaaggtcatgtacaaccaatcaactgctactaccctgttccattcacttcctctgctgcggtacatttttgtcagggagcgggttactatcattcattcccactcatctttctcagcaatggctcacgatgctctctttcatgcaaaaaccatggggctccaaaccgtgtttaccgaccacagcttgtttggatttgcagatgtctcatcggtactcacgaacaaacttctcacggtgtcactgtgcgataccaaccacatcatttgtgttagctacacttctaaagaaaacaccgtcctgcgcgcagcccttaaccccgaaattgtgtcagtgatcccaaacgcggtggacccgaccgactttaccccagacccttttcgtagacatgattcgattaccatcgtcgtggtgtcaaggcttgtgtacaggaagggcattgatctcctctccggaatcattccagagttgtgccagaagtatcccgatttgaatttcatcattggtggtgaaggaccaaagcgtatcattctggaggaagtgagagagcggtaccagctgcatgatagagtcagattgctcggtgcacttgaacacaaggatgttagaaacgttctcgtgcaagggcacatattccttaacacttcgctgactgaagcattctgtatggcgatcgtcgaagccgcatcctgtggactgcaggtggtatccacgcgcgtcggaggaatacctgaggtgttgcccgaaaatcttatcatcctctgtgagccgtcggtgaagtccctctgcgagggacttgagaaagcaattttccaactgaaaagcgggactctgcctgcgccagaaaacattcacaacattgtcaagacgttctacacttggagaaatgtcgctgaacggaccgagaaggtgtacgatagagtgtctgtggaagcagtcctgcctatggacaaacgacttgatagactcatctcgcattgtggacctgtcaccggttacatttttgcacttcttgcggtgtttaacttcctgtttttgatttttcttaggtggatgactcctgattccatcatcgacgtggccatagatgcaactgggccaaggggagcctggactaataactactcacattccaagcgaggtggtgagaataatgaaatatctgaaactaga

SEQ ID NO: 130519 - DNA, 1452 bp, Artificial Sequence
  derived and/or modified sequence
atggcatgtcgcggaggtgcaggtaacggacatcgcgcctcagcgaccctttcgcgggtctcgccgggatctttgtatacttgtcgaacgaggacacacaacatctgtatggtctctgactttttctaccctaatatgggtggggtcgagtcgcacatctaccagctcagtcaatgtttgattgagcgtggccataaggtaattattgttacgcacgcttacggaaatcgtaagggcattcgatacctgacgagcggactgaaagtatattacctcccccttaaggttatgtataaccaatcaactgcgactactctgttccactcccttccgctgctgcggtacatcttcgtcagggaacgggtgaccattattcattctcatagttccttttctgctatggcccatgatgcattgttccacgctaaaactatgggcttacaaactgttttcaccgaccactcactttttggttttgccgatgtctcttcagtgctgaccaataaattacttacagtcagcctgtgcgacaccaatcacatcatctgcgtcagctatacctcgaaggaaaacacagtcctgcgtgcagctctcaaccccgaaatcgtttcagtgatccccaatgccgtcgatcctaccgacttcacaccggacccctttaggagacacgactcgatcacgatcgtagtggtctcgcgtcttgtttaccgtaaggggattgatttgttatccggcataatacctgaattgtgccagaaatatcctgacctgaatttcattatcggaggagaagggcccaagcgtatcatcctggaggaagtgcgagagagatatcaactgcatgaccgagttcgactgctgggtgccctcgagcacaaagatgtcaggaacgtcttagtccaaggccatatctttttgaatacatcgctgaccgaggcattttgcatggccattgtcgaggctgcgtcgtgtggattgcaagtcgttagtacgcgtgtggggggaataccggaagttttgcccgaaaacttgatcatcttgtgcgaaccttccgtgaagtctctttgtgagggccttgaaaaggcgatttttcagttgaaatccggtacactcccggctcctgagaacattcataacatcgtcaagacgttctacacttggagaaacgtcgcggagaggaccgaaaaagtttatgatcgcgtctcagttgaagccgttctcccaatggacaagagactcgatcgacttatttcccattgcggaccagtcaccggctacatattcgccctcttggctgtgttcaacttccttttcttgatttttcttagatggatgactcccgactccatcattgatgtggccatcgacgcgaccggcccacggggtgcatggactaataactattcccattcgaagcgtggaggggagaataacgagatctccgaaacccga

SEQ ID NO: 130520 - DNA, 1452 bp, Artificial Sequence
  derived and/or modified sequence
atggcctgtcgcggaggagctgggaacgggcatcgtgcttctgcaaccctgagccgcgtcagcccgggcagtctgtacacctgtaggacaaggacccacaacatttgtatggtcagcgattttttttaccccaacatgggcggcgtggagtctcatatctaccagttatcccagtgtctcatcgagcgcggacataaggtgataattgttactcacgcatatggcaatagaaagggtatccggtacctgactagcggcctgaaggtgtactatcttccgctcaaagtgatgtacaaccagtctacggcaaccactctgtttcatagcctccctctgctgcggtacatcttcgtgcgggaacgtgttacaattattcactctcattcttctttcagtgccatggcgcatgacgcgctcttccacgcaaagaccatgggcttgcagacagtgttcactgatcactcactttttgggtttgccgatgtcagttcagtgttaacaaataaactgctcacagtgagtctgtgtgacaccaatcatatcatttgtgtttcctacacgtctaaagagaacacagtactgcgagcagccctaaatcccgaaattgtgtctgtgatcccaaatgccgtggatcctaccgacttcacgccggatccattccggaggcacgactctatcaccatcgttgtggtgagcagattggtatataggaagggaatcgatctgttgagcgggattattccggagctgtgtcagaagtaccccgatctgaacttcatcattgggggggagggtccaaagcgtattatcctggaagaggtgagagagagataccagctgcatgaccgggtgaggctcctgggggccttggagcataaagacgtccgtaacgttctggtccagggccacatattcctgaacacatcactgacggaagcattttgtatggcgatcgtggaagccgcgtcatgtggtctgcaggtcgtgagtacccgggtgggggggatacctgaagtgctgcccgagaacctcattattttgtgcgaacctagcgtcaagagcctgtgtgagggcctagagaaggctatctttcagctgaagagcgggaccctccctgctccagaaaacattcacaatattgtaaaaacgttctacacatggaggaatgtcgccgagcgaacagaaaaagtgtacgacagggtctctgtcgaagccgttctcccaatggacaagcgcttggatcgtctgatttcccattgcggaccggtgaccggttacatttttgccctgctggctgtcttcaattttctgttcctcatctttctgcgttggatgactccagactcaataatcgacgtagccattgatgccacgggcccacgcggcgcctggactaacaactacagccacagtaaaagagggggagagaataatgagattagcgagacacgg

SEQ ID NO: 130521 - DNA, 1452 bp, Artificial Sequence
  derived and/or modified sequence
atggcgtgtagaggaggtgcaggcaatgggcaccgggcaagtgctaccctctcaagggtctcccccggctctctgtacacatgccgcacacggacgcataatatctgtatggtctccgatttcttctatcccaacatgggcggggtggaatctcatatatatcagctgagtcaatgtctgattgaaaggggtcacaaggtcataatcgtgactcatgcctatggcaaccgcaagggcattcggtatctgactagcggcctgaaggtgtattacttgccactgaaagtcatgtataaccagagcaccgccaccacactcttccactctctccctctcctgcggtacatctttgtgagagagagggtgaccattattcactctcactcatccttctctgcaatggcccatgacgctttgtttcacgcaaagacaatgggactgcagactgttttcaccgaccattccctgttcggctttgcggacgtgagctcagtgctgaccaataagttgctgaccgtgtctctgtgcgatactaaccatattatatgcgtgtcatacacttctaaagagaacaccgtgcttagagcagctctcaatcctgaaatagtttccgttatcccaaatgctgtggaccctacagacttcacccccgaccccttccggcgccacgactccatcacgattgtagtggtgagcagacttgtttacaggaaagggatagatctgctctctgggattatcccggaactttgccaaaagtatccggatctgaactttatcattggtggtgagggacccaagcgcatcatcttggaggaggtgcgcgagcgctaccagctccacgaccgggtcagactgttgggcgcccttgagcataaggacgtcaggaatgttctggtgcagggccacattttcctcaacacttcactgaccgaagccttttgtatggcaatcgtggaagccgcaagctgcggactccaagtcgtgtccacccgggttgggggaatccccgaggtcctgccagagaacctcataattctgtgcgagcccagcgtgaaaagtctgtgcgagggcctggaaaaagcaattttccagttgaagagtgggactttgccagctcccgaaaacattcacaatatcgttaagacattctatacatggaggaatgtcgcagagcgcacagagaaggtctatgatagagttagtgtcgaggcagtgctccctatggataagcggttggatagacttatctcccattgtgggcctgtgaccgggtatatctttgcgcttcttgccgttttcaatttcctgttcctgatcttcctgaggtggatgacacccgacagtataatagacgttgcgattgatgccacaggtcctaggggagcctggactaacaactattcccattctaagaggggaggggagaataacgagatttctgagacgaga

SEQ ID NO: 130522 - DNA, 1452 bp, Artificial Sequence
  derived and/or modified sequence
atggcatgtcgcggtggggcaggtaacggacatcgcgcatctgcaactctctcgagggtgtcaccgggatccctgtatacttgccggactagaactcacaatatctgtatggtgtcagacttcttttaccccaacatgggaggcgtggaatcgcacatttaccaactctcgcagtgtctgatcgaaaggggacacaaggtgatcatcgtgacccacgcctacggaaatcggaaagggatcagataccttacttccggactgaaggtgtactacctgcccctgaaagtaatgtacaatcaatccaccgccaccaccctctttcatagcctgccactgcttaggtacatttttgtgagagaacgagtcaccattattcattcgcattcctccttctcggcgatggcgcacgacgcactttttcatgccaagaccatgggactgcaaactgtgtttactgaccattcgctctttggatttgccgatgtctcgtccgtccttaccaacaaacttttgacggtcagcttgtgtgataccaaccatatcatctgcgtgagctacacgagcaaggagaacactgtgcttagagcagcactgaatcccgagattgtgtcagtcatcccaaacgcagtcgacccgaccgattttaccccagatccatttagacgccacgatagcatcaccattgtggtggtgtcacgactggtgtaccgaaagggtatcgatctgctgtcgggcatcatcccggaattgtgtcaaaagtaccctgatctgaatttcatcattgggggagaggggccaaaacgaataatcctcgaagaggtcagagaaagataccagctccatgatcgggtccgccttctgggagcacttgagcacaaggacgtgcgaaatgtgctcgtgcaagggcatatcttccttaatacctcgctcaccgaggccttctgtatggcgattgtggaggcagcatcgtgcggcctgcaggtcgtctctacccgggtcggtgggattccagaagttctccctgaaaacctgattattctctgtgagcctagcgtcaagagcctctgcgaaggtcttgagaaggcaatcttccagctcaagagcgggaccctccctgcacccgagaatattcacaatatcgtgaaaactttctacacttggagaaacgtggctgaacggactgaaaaggtttacgaccgagtgtcggtcgaggcagtgctgcccatggataagcggttggaccggctgatctcacactgtggtcctgtgaccgggtacatcttcgctcttctggcagtgtttaacttccttttcctgatctttctgagatggatgacccccgactccataatagatgtggcaatagatgcgaccggacctaggggagcctggaccaacaactactcgcattcgaagagagggggagagaacaacgagatctcggaaacccgg

SEQ ID NO: 130523 - DNA, 1452 bp, Artificial Sequence
  derived and/or modified sequence
atggcctgtcggggtggcgcaggaaacgggcatcgagcctcagccaccctgtcccgggtgagccccggaagcctctacacatgtagaactagaactcacaatatctgtatggtttctgattttttttatccaaatatgggcggagttgaatcccacatttaccaactttcgcagtgcctgatagaaaggggccataaggtgattatagtgacgcacgcctacgggaaccgaaaggggatccgttatctgacgagcggtctgaaagtttattaccttccattgaaagtgatgtataaccagagcaccgccacaacactctttcattcattacccctcttgcggtatattttcgtccgcgagcgggtaaccatcatccactctcattcctcgttctctgcaatggctcacgatgcgctgttccatgccaagacaatgggacttcagacagtatttaccgaccatagtctcttcggcttcgcagatgtgtcttctgtgcttacaaacaagttactgacagtgtccctgtgcgacacaaaccatatcatttgcgttagctacacaagcaaggaaaatacagtgctgcgggcagcactcaaccccgagattgtgtcagtgattccaaacgcggttgacccaaccgactttaccccagacccttttcgaaggcatgattccattacaatcgtcgtcgtgtctaggttggtgtaccgcaaggggattgacttactgtccggcatcattcctgaactctgtcagaagtatccagatttgaactttataattgggggagaaggtccaaagcgcatcatcctggaagaagtgagggaaaggtaccagctacacgaccgggtccgattattaggagcgctggagcacaaggatgttaggaacgtgctggtgcaagggcacatcttccttaacacttctctgacggaggctttttgtatggcaatcgtagaagcagcatcctgtggactccaggtcgtctctaccagggtgggcggtattccagaggtgctcccagagaacctgatcattctgtgtgaacccagcgtgaaatcgttgtgcgagggcctcgagaaggcaatttttcagcttaagtccggtaccttgccggctcccgagaacattcacaatattgtgaagacattctatacttggcggaacgtggcagaacggaccgagaaggtttacgaccgcgtcagtgtggaggccgttcttccaatggataagaggctggatcggctgattagccactgcggccccgtcacaggatatatcttcgccttattggcagtgttcaatttcctgttcttgatattcctcaggtggatgacccccgacagcatcatcgatgtcgctatcgatgccacagggccccgtggcgcttggacaaataactattcccattccaaaagggggggtgagaacaatgaaatctctgagaccagg

SEQ ID NO: 130524 - DNA, 1452 bp, Artificial Sequence
  derived and/or modified sequence
atggcctgtcgcggtggcgctggcaacgggcatagggccagtgcaaccttgtccagagtgtcaccggggtctttgtacacttgccgcacaagaacacacaatatttgcatggttagcgatttcttctacccgaatatggggggggtggagagtcacatctatcaactgagccagtgtctgatagagcgcggtcacaaagtaatcatcgtcacacatgcctacggcaacagaaagggcatccgctatctgacatctggtctgaaagtctattatctccccctgaaggtcatgtataaccagtctactgccaccacactcttccactccctccccctgctccggtatatcttcgtacgagagcgcgtcaccatcatccattcacattcctcattcagcgccatggcccacgatgccttgttccacgcaaagactatgggtctgcaaacagtgttcacggatcattccctctttggtttcgccgacgtgagcagtgttcttacaaacaagctgctgaccgtcagcctgtgtgatacaaaccacataatctgcgtgtcctacacatccaaagagaacaccgtgctgcgggctgccttgaatccagagatcgtgagcgtgatacctaatgccgtcgatccaaccgatttcactccagacccattccggcgccacgattccatcaccatcgtagtggtgtctcgcctggtgtaccggaagggtattgatctcctctcagggattatacccgaactgtgtcaaaaatatcccgatctcaacttcatcattggcggtgaagggccaaagaggattatacttgaagaagtgagagagcgataccagctccacgatcgcgttcgccttctgggggccctggaacacaaggatgtgagaaacgtgttggtgcagggtcacattttcctgaacaccagtcttactgaggccttctgtatggccattgtggaagccgcttcctgcggccttcaggtggtgtctacacgggtggggggcatccctgaagtgctccccgagaatctcatcatattgtgcgagcccagcgtgaaaagcctttgtgaaggactggaaaaagcaatattccaactcaaaagtggaacgcttccggctcctgagaacattcacaacatagtaaagacattctatacttggcggaatgtggcagaaagaactgagaaggtctatgaccgggtgagcgtcgaggcagtgctgcctatggacaaaagactcgataggctgataagtcattgcgggcccgtaacgggctatatcttcgcgttgcttgccgtgttcaatttcctgtttttgatctttcttcggtggatgaccccagattctatcattgatgttgctatcgatgctacagggccccgaggggcctggactaataactatagccattctaagcgaggaggagagaacaacgagattagcgaaacaaga

SEQ ID NO: 130525 - DNA, 1452 bp, Artificial Sequence
  derived and/or modified sequence
atggcgtgtagaggaggagctgggaatggtcatcgcgccagcgcaacgttgagcagagtctcacccggtagcctgtacacttgtcgaactcgcactcacaacatatgcatggtgtcagactttttctacccaaatatgggaggagtggaatcacacatttatcagcttagccagtgtcttattgaaagagggcataaggtgataattgtcacgcacgcctatggtaacagaaaaggaatccgttaccttacttcgggactgaaggtgtattaccttcctctgaaagtgatgtacaaccaatcgactgcgaccaccctgtttcatagcctgcctttgcttcgctacatttttgttagagaacgagttaccattattcattcccactcctcgttttccgcaatggcccatgatgccctgtttcatgccaagactatggggctccaaacggtgtttaccgaccattccctgtttgggttcgcagatgtgagctcggtgctgacgaataagctgctgaccgtgtccctttgtgatactaaccacattatctgtgtgtcctacacttcaaaggagaacacggtcctgagggcggccctgaatccggaaattgtgtccgtcattcctaatgcggtggatcccaccgattttactccggatccatttcggcgccacgattcgattaccatcgtcgtcgtgtcgagactggtgtaccgaaagggtatcgatctcttgtcgggaattatccctgagctttgtcaaaagtacccagacctcaacttcatcattggaggcgagggtccaaagagaattatcctcgaagaagtgagagaaaggtaccagcttcatgatagagtcagacttcttggggctctcgaacataaagatgtgaggaatgtgcttgtgcagggccacatatttctgaacacttccctgaccgaggccttttgtatggcaatcgtggaagcagcatcctgcggtctgcaagtggtgtcaactcgcgtcggaggcatcccagaggtgctccctgagaatcttatcatcctgtgcgagccctcggtcaagtcactgtgcgaaggacttgagaaggccattttccaactgaaatccggaaccctccccgcgccagagaacattcacaatatagtgaaaactttttacacctggcgtaacgtggcagaaagaaccgaaaaagtctacgaccgcgtcagcgtggaagccgtccttcctatggacaagaggctggacagactgatttcgcattgtgggcctgtgacgggatacatttttgcacttctggcagtgtttaactttctgttcctgatctttctgcgatggatgacccctgattccattattgatgtggcgatagatgccactggcccgagaggagcctggaccaacaattacagccattccaagcgaggaggagagaacaatgagattagcgagactaga

SEQ ID NO: 130526 - DNA, 1452 bp, Artificial Sequence
  derived and/or modified sequence
atggcatgccgcggaggagccggaaacggccaccgcgcttcggccacactctcacgagtgtctcccggcagtctttacacgtgcagaactcgcacccacaatatttgcatggtgtctgatttcttctatccgaacatgggtggcgtagagtcccacatctatcaattatcccagtgtctgatcgaacgcggtcataaagtgatcatcgtcactcatgcctacggcaatagaaaggggattagatacctcactagcggtttaaaagtctattaccttccgctgaaagtcatgtataatcagtctacagctaccactttatttcattccttaccactgttgagatacatttttgttagagaaagggtgacaattattcatagtcactcaagtttcagcgccatggcacacgatgcgctcttccacgcaaagaccatgggattgcagaccgtttttactgatcatagcctatttggttttgcggacgtcagctcggtgctgacaaacaaactgttgacggtctccctgtgtgataccaaccacatcatctgtgtctcctacacgtctaaggagaacaccgttctccgtgcagcccttaatcctgaaattgtgtcagtcattccgaatgcggtggatcctaccgacttcacacctgatcccttcagacggcatgacagtatcacgatagttgtggtgagccggttggtgtacagaaagggcatcgatctgctgagtgggattatccccgagctgtgccagaaatacccagatctgaacttcatcattggcggcgagggcccaaagagaatcattcttgaggaagtccgtgagcgttatcagctgcacgatcgtgttagattgcttggggcactagagcacaaagacgtccggaatgtcctagtgcaggggcatattttcttaaacacctcactgactgaggccttctgtatggccattgtcgaggctgccagttgtggacttcaggtcgtgtcgactagggtaggaggaataccggaagtcctgcctgaaaaccttatcatcctatgtgagcccagcgtgaagagtttgtgcgaaggccttgaaaaagcaattttccaactgaaatcaggcaccctcccagctcccgagaatattcacaatatcgtgaaaaccttctacacatggcggaatgtggccgagaggacggaaaaagtgtatgacagagttagcgtcgaggccgtcctgcctatggacaaaaggttagatcgcctgataagtcattgtggtcctgtcaccggatacatattcgcgttactggccgtcttcaacttcttatttttgattttcttgcgttggatgactccagactcgattatcgacgtagcaattgatgctacagggccgcggggagcctggactaataactattcccactccaaaagaggcggagaaaataacgaaataagcgagacacgg

SEQ ID NO: 130527 - DNA, 1452 bp, Artificial Sequence
  derived and/or modified sequence
atggcctgtcgcggaggtgctggtaacggacatcgcgcgtccgccacactttctcgcgtctcgcctggtagtctttacacctgcagaacgcggacccataacatctgtatggtttccgacttcttctaccccaacatgggcggagtcgaatcgcatatttatcagttgtcccagtgtctgatcgaacgaggccataaagtcataatcgtgacacatgcctacgggaaccggaaagggatacgctacctgacctctggtttaaaggtgtattacctgcccctgaaagtgatgtacaatcagagcactgccacaaccctgttccactcactccctctgctccgctatatctttgttagagagcgggtcaccatcattcacagccactcgtccttctccgctatggcccacgacgcattgtttcacgcgaagacaatgggcctccagacagtgtttactgaccattctcttttcggcttcgctgatgtgtcctcagtgttgactaataagctgctgaccgtgtcactttgcgatacaaaccacatcatatgcgtgagttatacatctaaggaaaacactgtactgcgcgctgcattgaacccagagatcgtatccgtgattcccaatgcggtggatcctacagatttcacccccgatccgtttcggaggcacgatagcataaccatagttgtcgtatcgaggctggtctatcgcaaggggattgatctgttatccggcatcatccccgagctgtgtcagaagtaccctgaccttaactttattataggtggagaagggcctaaaaggatcatcctggaagaggttagggagcggtatcagctgcacgacagagtgcgcttgttaggggccctggagcacaaggatgttagaaacgttcttgtccagggacacatttttttgaacacctccctgactgaagccttctgcatggctatcgtcgaggcagcatcctgcggactccaagtagtgagcacacgcgtgggcggtatcccagaggtgctacccgagaacctcatcatcctgtgtgaaccctccgtgaagagcctctgcgagggattggaaaaggcaatttttcagctcaagtccgggactctaccggctcccgaaaatattcataatattgtcaagacattttacacttggaggaacgtggccgaacggactgagaaagtctacgatcgggtttctgtcgaagctgtactcccaatggacaaaaggctcgatcggttgatatcgcattgcgggccagtgactggctatattttcgccctactcgcagtcttcaatttcctgttcctgattttcctccggtggatgacccctgattcaattattgatgtcgccatcgacgccacgggtccgcggggggcttggaccaataactacagtcacagcaagagaggcggggaaaataacgaaatctctgaaacgcga

SEQ ID NO: 130528 - DNA, 1452 bp, Artificial Sequence
  derived and/or modified sequence
atggcatgccgcggaggcgccggtaatggacaccgcgcgtccgccaccctttcaagggtgagccctggaagcctttacacctgtaggactcgcacgcacaacatctgtatggtgagcgactttttctatccgaacatgggaggggtggaatcccacatctatcagctgtcgcagtgtctgatcgaaagaggacacaaagtgatcatagtgacccatgcctacggaaatcggaaaggtatccggtacctcacctcgggactgaaggtgtactacctgccgctcaaagtaatgtacaaccagtccactgcaaccaccttgtttcattccctgcccctcctgagatacatcttcgtgagagaacgcgtgaccatcatccactcgcattcctcgttcagtgcaatggcccatgacgccctgtttcacgcgaaaacgatgggcctgcaaaccgttttcactgaccactcacttttcggattcgctgatgttagctctgtgctgactaacaagctcctgactgtgtcactgtgcgacaccaaccatatcatttgtgtgtcgtacacttctaaggagaacaccgtgcttcgggcggcgctcaatcccgaaatcgtctcggtcatcccaaacgccgtggatcctaccgactttactccggatccgtttagacggcacgattccatcacgattgtagttgtgtcgagactcgtgtaccgcaagggaattgacttgctgagcggcatcattccagaactctgccaaaagtacccggatctgaactttatcatcggaggcgaaggtccgaagcgcatcatcctggaagaagtgagagagcggtatcaactgcacgacagagtgaggcttctcggggcccttgagcacaaggacgtgcgcaacgtgctggtgcagggtcatatcttcctcaacacgtcattgaccgaggcattctgcatggccatcgtcgaggccgcctcgtgcggcctgcaggtcgtgagcactcgagtcgggggtatccctgaggtcctgccggagaacctcatcattctgtgcgaaccaagcgtcaagtccctctgcgaagggctcgagaaagctattttccagctcaagtccggaacgctccccgctccagagaatatccacaatatcgtaaagactttctacacttggcggaacgttgcggaacgaactgaaaaggtctacgaccgtgtctcagtggaagccgtgctgccaatggacaagaggctcgaccggctgatatcgcattgcgggccggtgaccggctacattttcgcgctgttggctgtattcaatttcctgttcctgatcttcctccgatggatgacgcctgatagtatcatcgatgtggcgatcgacgcaactggcccgcggggagcttggaccaacaattactcgcacagcaaacgcggcggagagaataacgagatctccgaaacccgt

SEQ ID NO: 130529 - DNA, 1452 bp, Artificial Sequence
  derived and/or modified sequence
atggcctgccggggaggggctggaaacggacacagagcttccgctacactcagcagggtcagtccagggtcactctacacctgccggactaggacccataatatctgcatggtgtcagatttcttttaccccaatatgggtggggtggagagccacatttatcaactgagccagtgtttgatcgaacgcggtcataaggttattatcgttacgcacgcttatggaaatcgcaaagggatccgatatttgacgtcagggttgaaggtgtactacttacccctgaaggtgatgtataaccagagcactgccaccactctttttcacagcctccctctgctcaggtacattttcgtacgcgagagggtgaccataatccattcccatagttccttctccgccatggcacatgacgcactgttccatgctaaaaccatgggactgcagacggtgttcaccgaccatagtctatttggtttcgccgacgtatctagcgtgctcaccaataaactgcttacagtgtcactgtgcgataccaaccacatcatttgcgtgtcatacacttccaaagagaacaccgtgctcagggcggcattaaatccagaaattgttagcgtgatcccaaacgctgtcgatcccacagatttcacgcctgacccttttcgcagacatgactccattaccatcgtggtggtgtctcgcctggtgtacaggaagggcatcgatctattgtccggcatcattcccgaattgtgtcaaaagtatcccgatctaaatttcattataggtggagagggtcccaagcgtataatcctggaggaggtgagagaaaggtaccagcttcacgacagggttcggctgttgggggctctggaacacaaggatgtacggaacgtcttggttcaggggcacatttttctcaatacttcattaaccgaggctttctgcatggctatagttgaagcagcatcctgcgggcttcaggtggtctccacccgcgtgggcggtattcctgaggtgctgcccgagaaccttattattctgtgtgagccatctgttaagtctctttgcgagggcctggagaaagcaattttccagctgaagagtgggacgttgcccgccccggagaacattcataatatagtgaaaaccttctatacatggagaaacgttgcagaacgaacagagaaggtctacgaccgcgtcagtgttgaggccgtgctaccgatggacaagagactggatcgcctaattagccactgtggacctgtcaccggatatatcttcgccctgcttgctgtgtttaacttccttttcctcatcttcttacgatggatgacccctgattccattattgacgtggctatagatgccacaggacctcggggtgcctggaccaataattacagccacagcaagcggggaggtgaaaataacgagatttctgagacacgg

SEQ ID NO: 130530 - DNA, 1452 bp, Artificial Sequence
  derived and/or modified sequence
atggcgtgcagaggaggagcaggaaacggtcatcgcgctagcgccaccctctcccgggtgagcccagggagcctgtacacttgtcgaacccgcactcacaacatctgtatggtgtcggatttcttctacccaaacatgggaggcgtcgagtcgcatatctaccagctttcgcagtgcttgatcgaacgcggacataaggtgatcatagtcacccacgcgtacggcaacaggaaagggatcagatacctcacgtccggcctgaaagtctattacctccctctgaaggtgatgtacaaccagtcgaccgccaccactcttttccacagcctgcccctcctgagatacatctttgtacgggaaagggtgaccatcatccactcccactcgagcttttccgcgatggcacatgacgcgctgtttcacgccaagactatgggtctgcagactgtgttcaccgatcactccttgttcggcttcgcggatgtgtcctccgtcctgactaataagctgcttaccgtgagcctctgtgacacgaatcatatcatctgcgtctcctacacctctaaggaaaacactgtgctgcgggctgcactgaatccagagatcgtctcggtgatccccaatgccgtggacccgactgatttcaccccagatcctttccggcgtcacgattcaatcactatcgtcgtcgtgtcaagactcgtgtacaggaaggggatcgacctgctgagcggcatcatcccggaactgtgtcagaagtatccagacctgaatttcattatcggtggagagggaccgaagcggatcatcctcgaagaggttcgcgagagatatcaactgcatgacagggtgaggctgctgggagcgctcgagcacaaagacgtgcgcaacgtgctcgtgcaaggccatatctttttgaacacttcacttaccgaggcgttctgcatggccattgtggaagccgcctcgtgtgggctgcaggtggtcagcactcgcgtgggaggaattccggaagtgctcccggagaacctcatcattctgtgtgaaccgagcgtgaagtcgctctgcgaaggcctggagaaagctatcttccagcttaagtccggcacgctgccggcacctgagaatattcacaacatcgtcaaaaccttttacacttggcgaaacgtggcggagagaactgaaaaggtgtacgaccgggtgtcggtggaggccgtcctgccgatggacaagaggctggaccgtctgatcagtcactgtggaccggtgaccggatatatctttgccctcttggctgtgttcaattttctcttcctcatctttcttagatggatgaccccggatagtatcatagatgtggctatcgatgccactggcccacgcggagcctggacgaacaattactcgcactcgaaacgcggaggagagaacaatgaaatctcagaaaccaga

SEQ ID NO: 130531 - DNA, 1452 bp, Artificial Sequence
  derived and/or modified sequence
atggcatgcaggggaggagcgggaaacggacaccgtgcctccgccactctctcccgagtgtctcccggatcactctacacttgcagaactcggacgcacaatatctgtatggtgtcggacttcttttacccaaacatgggaggcgtcgaatctcatatctaccaactgtcccagtgcttgattgagagagggcacaaagtcatcatcgtgacccatgcgtatggtaatcggaaaggcatccgctacttgacttccggtctgaaggtctattacctcccgctcaaggtgatgtacaaccaaagcactgcgactaccctgttccacagcctgccactcctgcggtacattttcgtgcgagaacgcgtgactatcatccacagccattcctcattctccgcaatggcccatgacgcgttgttccacgcgaaaaccatgggactgcagaccgtgttcaccgatcacagcctttttggattcgccgatgtgtccagcgtgctgactaacaagttgttgaccgtgtcactctgcgacactaaccacattatctgcgtgtcctacacctcgaaggaaaacactgtcctgcgagcagcactgaaccctgaaatcgtgtcggtgatcccaaacgccgtcgatccgaccgactttactccggacccgtttcggcgccacgacagcatcactatcgtcgttgtctcacgcctggtgtaccgtaagggtatcgatctgctgtccggcatcattcccgagctttgtcagaaataccctgacctgaatttcatcatcggaggtgaaggacctaagcgcatcatactggaagaagtgagggagcgctaccagctgcatgaccgcgtccggctgcttggggcattggagcataaagatgtgagaaacgtcctcgtacagggtcatatctttctgaatacgtctctcactgaggccttctgcatggcaattgtcgaggccgcttcctgtggtctgcaggtcgtctcaacccgggtggggggaatccctgaggtgttgccagagaatctgattatcctttgcgaaccgagcgtgaagtcgctgtgcgagggattggaaaaggccatatttcaactcaagagcggaacgctgccagcccccgaaaacatccataacattgtgaaaactttctacacttggcggaacgtggcggaaaggaccgaaaaggtgtacgacagggtttcggtcgaggcggtcctccccatggataagcgtctggatcgactcatttcgcactgcgggccggtgaccggctacatcttcgcccttctggccgtctttaacttccttttcttgattttcctgagatggatgaccccggacagcatcatcgatgtggctatcgatgccacgggaccgcggggagcatggaccaataactactcacactcgaagagaggtggggagaacaatgaaatctctgaaacccgg

SEQ ID NO: 130532 - DNA, 1452 bp, Artificial Sequence
  derived and/or modified sequence
atggcttgccgaggtggcgccggaaatggacacagggccagcgcaacactctccagagtgtcacccggctctctgtatacctgccggacccgaacgcataatatttgtatggttagcgatttcttctatcccaatatgggcggcgtggagtcccacatataccagctgtcccagtgcctaattgagagggggcacaaggtcatcatagttacccacgcgtacggaaacagaaaaggaatccggtacttgacctccggtctgaaggtctattacctgcccctgaaagtgatgtataatcagagtaccgccacgacacttttccattctctcccattgctgcggtacatatttgtccgcgagagggtgaccatcatacacagtcacagcagctttagcgcaatggcacatgatgcgctgttccacgcaaagactatgggcttgcagacagtgtttacggaccatagccttttcggttttgcggatgtgagcagcgtgctgacgaacaaactgctaaccgtatctctctgtgatacaaaccatattatctgcgtctcttatactagtaaggagaataccgtgctgcgggccgctctgaacccagagattgtgagcgtcatcccaaacgctgtggatcctaccgactttacacctgacccatttcgtaggcatgattcaatcaccatagtagtggtgtctaggctggtctacagaaaaggcattgacttgctgagcggcattattccagaactgtgccagaaataccccgacctgaatttcataattggcggagaaggtcccaaacgcattattctagaggaagtcagagaacggtaccaactccacgacagggtgcggctacttggcgctctggagcacaaggacgtgaggaatgtgctggtgcaaggtcacatcttcttgaacacttccttgactgaggccttctgcatggccattgtcgaggccgcctcctgcgggctccaagtggtgagtacccgcgtgggcggaatcccagaggttttgcccgagaacttgattatcctttgcgaaccatctgttaagtcactctgcgaaggcctggagaaagctatatttcagctcaaaagcggcacactgccagcccctgagaacattcacaacattgtgaaaacgttttacacgtggaggaacgtggctgagcgcacagagaaagtgtacgatcgcgtatctgtcgaagccgttctcccaatggataaacgcctggatcggttaatcagtcattgtggccccgttaccggatatatcttcgctttgctggccgtttttaattttctttttcttatcttcctccgatggatgacacccgattctatcatcgacgtagcaatcgatgccaccggcccacgcggcgcctggacaaataactatagccactctaagcgaggaggagaaaacaatgagatcagcgagactcgc

SEQ ID NO: 130533 - DNA, 1452 bp, Artificial Sequence
  derived and/or modified sequence
atggcttgccgcggcggtgccgggaacgggcaccgcgccagcgccaccctgtcgcgtgtctctccgggctcgctatacacttgccgcacccgtactcacaacatatgtatggttagtgattttttctatccaaatatgggcggggtcgagtcccacatctaccagctctcccaatgcctgatagaaagaggccacaaggttattatagtgacccatgcttatggtaatcggaagggtatacgctacctgaccagcggcctgaaagtgtactacctgccgcttaaggtgatgtataaccagtcaaccgccaccactttgtttcatagcctccctctgctccgttacatattcgtgcgcgagcgtgtgaccattattcactcgcactcaagcttctccgctatggcgcacgacgcactgtttcacgcgaagactatgggactgcaaaccgtctttaccgaccacagtttgttcggttttgcggatgttagcagcgtgctgactaataaactcctgacagtgagcctgtgcgacaccaatcacataatttgcgtgagctataccagtaaagaaaatacagttctccgcgcagcgctcaaccctgagattgtttctgtgattccgaacgctgttgaccctaccgacttcactccagacccattccgccgacacgactccatcacgatcgtggtcgtgagccgcttggtgtacaggaaaggcatcgacttgctgtctgggatcatcccggagttatgtcaaaagtatccagacctgaattttattatcgggggtgagggacccaaacgcataatattggaagaagttcgcgagcgataccagctgcacgatcgcgttcgcttgttgggcgctttggaacataaagatgttcgaaatgtgctggtccagggccacatctttctgaacacttcactcacggaagcattttgtatggcaatcgtggaggcagccagttgtggtctgcaggtggtgagcacccgagtaggtggcattccagaggtgcttcctgaaaatctgattatactctgcgaaccgagcgtgaaaagcctgtgcgagggactggagaaggcaatttttcagctgaaaagtggcaccctccctgctcctgagaacattcacaacatcgttaagacattctacacctggcgcaacgtcgcagagcgcactgagaaggtctacgaccgggtgagcgttgaggctgttctgccgatggataaacgcctggatcgcctgattagccactgtgggccagtgacgggctatatatttgcactgttggcggtttttaacttcctcttcctcattttcctgagatggatgaccccggatagtattatcgacgttgcgatcgatgccactggaccgagaggtgcctggactaataactactcgcactctaagcgcggcggtgagaataatgagatctcggagactcgt

SEQ ID NO: 130534 - DNA, 1452 bp, Artificial Sequence
  derived and/or modified sequence
atggcatgcaggggtggagcgggaaacggtcatagagcatcagcaaccctttcgcgggtgtcacctggaagcctctacacttgcaggacccgcacccataacatttgcatggtgagcgactttttctacccaaacatgggaggagtcgaatcccacatctaccagttgtcgcagtgtctgattgagcggggtcacaaagtgatcattgtgacgcacgcatacgggaacagaaagggaatcagataccttacctccggactcaaggtctactacctgccccttaaggtgatgtacaaccaatcgactgcaaccaccctttttcactcacttccactgcttagatacatattcgtcagagagagagtgaccattatacatagccactcgtcgttttcggctatggcacacgacgcactcttccatgcaaagaccatgggcctgcagactgtgtttacggatcactcgctgtttgggttcgcagatgtctcttcagttctcactaataagctgttgactgtgtcgctgtgtgacaccaaccatatcatctgcgtgtcctacacttcaaaagagaacactgtgctccgtgctgcgttgaacccagaaattgtgtcggtgattccgaacgcagtggatccgactgatttcacccccgatccttttagacgacacgattcgatcaccattgtcgttgtgtcacgtctggtgtatcgcaaaggtattgacctgctgtccgggattattcctgaactgtgtcagaaatatccggatttgaatttcattattggaggcgaagggcctaagcgcatcattctcgaagaggtccgtgaacggtaccaactccatgaccgcgtcagattgcttggcgcgcttgaacataaagacgtcagaaacgtccttgtgcaaggccatatctttcttaacacctccctgacggaggctttctgtatggccatcgtcgaggcagcatcctgtggcctgcaagtggtgtcgactcgcgtgggcgggattcctgaggtgcttccagaaaatctgatcattctgtgcgaaccatccgtgaagtctctttgcgagggcctggaaaaggcaatcttccagctgaaatcaggtactctccctgcaccagaaaacattcataacatcgtgaaaaccttttacacctggcgtaatgtagcagagcgaaccgagaaagtgtacgaccgggtgtcggttgaagcagtgcttcctatggacaagaggcttgatcggctgatatcccactgtggaccggtcactggatacattttcgcactgctggcagtgttcaattttctgtttctgattttcctgaggtggatgaccccagatagcattatcgacgtggcaatagacgcaaccggacctagaggggcatggactaataactactcacactcaaaaagaggaggagagaacaatgagatttccgagactaga

SEQ ID NO: 130535 - DNA, 1452 bp, Artificial Sequence
  derived and/or modified sequence
atggcctgcagaggcggagccggcaatggccacagggcttccgcaacgcttagtagggtctcccccgggagcctttacacttgcagaacacgcactcataatatttgcatggtttctgatttcttttaccccaatatgggcggtgttgagtcgcatatctatcagttgtctcagtgcctgatcgagaggggccataaagtaataatcgtcacacatgcctacggtaatcggaaaggcatccgctatctgacttccggccttaaggtgtattacctccccttgaaggtgatgtacaaccagagcaccgccactacattgttccatagcctgccgttgctccgctatatctttgtgcgagaacgagtgaccattattcactcccactcctccttttctgcaatggcacacgatgccctgttccatgccaagacaatgggccttcagacagtcttcactgatcacagcctgttcggctttgccgacgtctcttcagtgctgaccaacaagcttttgaccgtttctttatgtgacacaaaccacatcatctgtgtaagctacacgagcaaggagaacactgtactcagagcggccttgaatcccgaaattgtgtcggtgatcccgaacgcagtcgacccaacagacttcaccccggaccccttccggcgccatgactctattacaatcgttgtggtctcacgattagtgtacagaaaagggatcgacctgcttagtggcataattcccgaactctgtcagaaatatcccgaccttaattttatcatcggcggcgaaggtcccaagcgtattatcctggaagaggttcgagaacggtatcagttacacgacagagtacgtctgttgggcgccctggaacacaaggatgttagaaacgtgctggttcaggggcacatttttttgaacactagccttactgaggcattttgcatggccattgttgaggccgcttcgtgcggacttcaggtcgtaagtactagagtgggaggcatacctgaggtgctcccagagaacctgatcattctctgcgagccttccgtaaagagtctgtgtgaaggcctagaaaaggctatatttcagttgaaatccggcacgctacccgcccctgaaaacattcacaacatcgtcaagactttctatacatggagaaacgtggccgaacgaacagagaaagtgtatgatcgggtgagcgtggaagcagtactccctatggataaacgactggatcggctgatctcccactgcgggcccgtgacaggctatatcttcgccctgctggccgttttcaatttcttatttcttattttccttcggtggatgacaccggactctatcatagatgtggctatcgatgcaacaggaccacgcggcgcctggaccaataactattctcattcgaagagaggcggtgaaaacaacgaaattagcgaaaccagg

SEQ ID NO: 130536 - DNA, 1452 bp, Artificial Sequence
  derived and/or modified sequence
atggcatgtcgcggtggggcagggaacggtcatagagccagcgccaccctctctagggtcagcccggggtccctgtacacttgtcggacccgaactcataacatctgtatggtgtcggactttttctacccaaatatgggtggagttgaatcccatatctaccagctctcgcaatgtctgatcgaacgaggacacaaggtgatcattgtcacccacgcatacggcaatcgaaagggcatacgctacctgaccagcggactcaaggtgtactacctgccactcaaagtgatgtacaaccaatccactgctacgactcttttccactctctgccacttctgcgatacatctttgtccgggaaagggtgaccattattcattctcactcatccttttccgcaatggcacatgacgcactcttccatgccaaaactatggggctccagaccgtgttcactgatcattcgctttttggttttgcggatgtttcgagcgtgcttaccaacaagttgctgaccgtgagcctttgtgatactaatcacattatctgtgttagctacacctctaaggagaatactgtgcttagagcggcactgaaccctgaaatagtgagcgtgatcccaaacgccgtcgatcccactgattttaccccagacccatttcggcggcacgattcaatcaccatcgtggtggtgtcaaggctggtgtataggaaggggatcgatctcctgtccgggattataccggagctttgccagaagtaccccgacctcaacttcatcattggaggagaggggcctaagaggataatcctcgaggaggtccgtgaacgctatcaactccatgatagagtgcggcttctgggagcgctggagcataaggatgtgagaaacgtccttgtgcaaggacacatctttcttaatacttccctcactgaagcattctgcatggcaattgtggaagcagcatcgtgcggcctccaagtcgtgtcaacgcgggtgggtggaattccagaggtcctgcctgaaaaccttatcattctctgtgaaccttcggtgaaatcgctctgcgaagggctcgaaaaggcgatttttcagctcaaatctggaaccctgccggctcccgagaacattcataacattgtgaaaaccttttacacctggcgcaacgtggcggaacggactgaaaaggtgtacgacagagtgtccgtcgaagccgtactgcctatggataagaggctcgatcggctgatttcccattgtggaccagtcaccggatacattttcgcacttttggcagtgttcaatttcctgtttttgatattccttagatggatgacccccgacagcattattgacgtggcaattgatgctaccggtccacgcggtgcgtggacgaacaactactctcattcgaagcggggtggagaaaacaacgagatttcggagactcgc

SEQ ID NO: 130537 - DNA, 1452 bp, Artificial Sequence
  derived and/or modified sequence
atggcgtgtagagggggcgcaggcaacggtcacagagcttcagcaaccctctcgcgcgtgtcccctggatctctttacacttgtcggacccgcactcataacatttgcatggtgtcggacttcttttacccgaatatggggggcgtcgagtcgcacatttaccaactttcgcaatgtcttatcgagcgcggtcataaagtgataatcgtgacccacgcctacggaaatcggaaagggattagataccttacttcagggcttaaagtgtactaccttcctctgaaggtcatgtacaaccagtctaccgcaaccaccctctttcatagcctgccattgttgagatacatctttgtgagagagcgggtgacgatcatccattctcattcttccttttcagctatggcgcatgatgcgttgttccatgcaaagactatgggcctgcagaccgttttcaccgaccatagcttgtttgggtttgcagatgtgtcctccgtgctcactaataagttgctgacggtgtcgctttgtgataccaaccacattatctgtgtgtcgtacacttcgaaggaaaacaccgtcttgcgcgcggcacttaaccctgaaattgtctcggtcatccctaatgctgtggatcctaccgactttaccccagatcctttccgccgacatgacagcatcactattgtggtggtgtcacggcttgtgtataggaagggcatcgatctgctttcggggataattccagagctgtgccagaaataccccgaccttaacttcattatcggcggagagggacctaaacgcattatcctcgaagaagtgagagaaagataccaactgcatgatcgcgtccgtctccttggcgcacttgagcacaaggacgtgagaaacgtgcttgttcaaggccacatttttctgaatacttcgcttactgaggccttctgcatggcaatagttgaggccgcaagctgcggtctgcaagtggtcagcaccagagtgggtggaatcccagaagttctgccagaaaacctgattatcctgtgtgagccatcggtcaaatccctgtgtgaaggcctggaaaaggctatctttcaacttaagagcgggaccctgcccgcaccagagaatattcataacattgtgaaaaccttctacacctggaggaacgtcgccgaaagaaccgaaaaggtgtacgatcgggtcagcgtcgaggcagtccttccaatggacaaacgtcttgatcgtctcattagccattgcggacctgtgaccggctacattttcgccctcctcgcagtgttcaactttttgttcctgatttttctgagatggatgactccagattccattatcgatgtggcaatcgatgccactgggccccgcggcgcatggaccaacaactactcgcattcgaaacgaggaggtgaaaacaatgaaatctccgaaacgcga

SEQ ID NO: 130538 - DNA, 1452 bp, Artificial Sequence
  derived and/or modified sequence
atggcctgccgtggtggtgccggaaacggacatagagcttctgctacacttagtcgggtgagtcctggatccttgtacacatgccgaacacgtactcataacatctgtatggtttctgacttcttctacccgaatatgggtggagttgagtctcacatatatcaactttcgcagtgcctgatcgaacgtggacacaaggtgattatcgtgacacatgcctacggaaatagaaaaggcatacgttatctcacatctggattaaaggtctattatcttccactgaaggtcatgtacaatcagagcactgcaactacgttgttccatagtttgccactccttcgatatatcttcgttagagagagagttactattatacactctcattctagctttagtgccatggcacacgatgcactcttccatgctaagaccatgggattgcaaaccgttttcacagatcatagcttgttcggattcgcggacgttagctccgttctcaccaataagctcttgacagtttccctctgtgacacaaatcacattatctgcgtttcttacacgagcaaagagaacaccgtgcttagggccgctctcaaccccgaaatagttagtgtaattcccaatgccgttgatccaacagattttacgcctgatccgtttcggaggcacgattcaattacaatcgttgttgtcagccgtttggtgtatagaaagggcattgatcttctgtcgggtatcataccagagctttgccagaaatatcctgatctgaacttcattattggaggggagggtccaaagagaattattctcgaagaagttagagagcgttaccagcttcatgatcgagttcgactcctgggagcactcgaacataaggatgttagaaatgtactggttcagggacatatttttttgaataccagtttaacagaagccttctgtatggcaattgttgaagctgcctcatgcggcctccaagtagttagtacacgagttgggggtattcctgaagtccttccagagaacttgattattctgtgcgaaccttcagtgaaatctctttgtgagggtctcgagaaggccattttccagcttaaatctggtaccttaccggctccagaaaacatacataacatagttaaaaccttctacacgtggaggaatgtcgcagaacggaccgagaaggtttacgacagggtctctgttgaagccgtcctacctatggataaacggttggatcgtcttatctcgcactgtggtcccgtgaccggatatatttttgccctcttggcggttttcaatttcttgtttctgatctttcttaggtggatgaccccagattccatcatcgacgtcgctattgatgctactggtccacgaggggcttggaccaataattatagccattccaaaagggggggagaaaataatgaaattagcgagactaga

SEQ ID NO: 130539 - DNA, 1452 bp, Artificial Sequence
  derived and/or modified sequence
atggcgtgcagaggaggtgcaggcaacggccatagggcctccgcgaccctgtcaagagtctcgccggggagtctctacacttgccgcactagaacccacaatatctgtatggtcagcgacttcttctacccaaacatgggtggagtggaatcgcatatctaccagctgtcgcagtgcctgatcgaacgcggtcacaaggttatcattgtgacccacgcctacggaaatcggaaggggatcaggtaccttactagcggactgaaagtctactacctgccgctgaaggtcatgtataaccagagcactgccaccactttgttccactctctgccactcctgcggtacatcttcgtgcgggaacgggtcaccatcatccattcgcacagctccttttctgccatggctcacgatgctctgttccacgctaagaccatggggctgcagaccgtctttaccgaccatagcctgttcggattcgcggacgtatcgtcagtgctcaccaataaacttctgaccgtgagcctgtgcgataccaatcacatcatttgtgtgtcgtacacttctaaggaaaacactgtgttgcgcgcagccctcaacccagaaatcgtgtccgtcattcctaatgcagtcgaccctaccgacttcactccggacccgttcaggagacacgattccatcaccatcgttgtcgtgtcgcgccttgtctacagaaagggtatagacctcctttccggcatcatcccagagttgtgccagaagtacccggatcttaacttcattattggcggtgaaggcccgaagcgcatcatcttggaggaggttagagagaggtaccagctgcatgatcgggtgcgcctgttgggagcgctcgaacataaagacgtgcggaacgtgctcgtgcagggccacatcttcctcaatacgtctctgaccgaggctttctgcatggcaatcgtggaagccgcgtcatgcggactccaagtggtgagcacgagagtgggaggaattccggaagtcctgccggaaaacctgatcatcctgtgtgagccgtctgtgaagtcactttgcgagggattggagaaggcgatctttcagctgaagtcaggtaccctgcccgctccggaaaacatccataacatcgttaagaccttctacacctggcggaatgtggcggagaggaccgagaaagtgtacgaccgcgtgtcggtggaggcagtgctgccaatggacaagagactcgacagattgatctcgcactgcggtccagtgaccggatacatcttcgcgctcctggccgtgtttaacttcctgtttctgatcttcctgcgctggatgaccccagattccattatcgatgtggccatcgacgccaccggaccacgcggcgcctggactaataactactcgcactccaagcgtggaggagaaaacaatgaaatctccgaaacccgg

SEQ ID NO: 130540 - DNA, 1452 bp, Artificial Sequence
  derived and/or modified sequence
atggcgtgcagaggcggtgctggcaacgggcaccgcgcgagcgctacactatctcgtgtgtcacccgggagcctgtatacttgccgcacccgtactcataacatttgcatggtgtctgactttttttatcctaacatgggaggagtcgagtctcatatctaccagctctcccagtgcttgatcgagcgtggccacaaagttatcatcgtgacacacgcctatgggaaccgaaagggcatccgctacctcacctccgggctgaaggtgtattacttgcctctgaaggtcatgtacaaccagagtaccgctacgactctgttccactctctgcctctgctgcggtacattttcgtgcgtgagcgtgtgacaataatccactctcactcatcattttctgccatggcccacgatgccttgttccatgctaaaactatggggctgcaaactgtgtttaccgaccacagcctgtttgggttcgccgatgtctcttctgttctgactaacaagctgttaactgtgagcctctgcgacactaatcacatcatatgtgtctcttatacctcaaaagaaaacactgttctgagggccgcgcttaaccctgagattgtgtccgtcatccccaacgctgtcgaccctaccgacttcacgccggatccttttcggaggcacgattcaatcaccatagtcgtggtctctcgtctggtgtataggaaagggatcgacctcctcagcggaattatacccgagttgtgtcagaagtatcccgatcttaattttatcattggaggcgaaggtcctaagcgcataatcctggaagaggtgcgtgaaagataccagttacacgatcgggttcggctgctgggcgccctggagcacaaggacgtgcgcaacgttttggttcagggacacatcttccttaacacatcactgactgaggccttctgcatggctatcgtggaagccgcgtcctgcggactccaggtcgtaagcaccagagtgggcggcattcctgaggtgctgcctgagaacctgatcattctgtgcgagcccagtgtgaaaagtctgtgtgaaggactggagaaggccattttccagctcaagtcgggaaccctacccgcccccgagaacatacataacatcgtgaaaaccttttacacctggcggaacgtggccgagcgtactgagaaagtctacgatcgcgtgtcagtggaggctgtcttgcccatggataagcgactggaccgcctgatctcgcactgcggacccgtcacaggatacatcttcgctttattggccgtatttaactttctgttcctgatattcctgagatggatgacacctgactctatcattgatgtggctatcgatgccaccggaccacggggagcctggactaacaattactcccattctaagcggggcggcgagaacaacgaaatttctgagacccgg

SEQ ID NO: 130541 - DNA, 1452 bp, Artificial Sequence
  derived and/or modified sequence
atggcctgccgcgggggagctggcaacgggcacagagcatccgctactctgtcacgggtgtcaccgggatccctgtacacttgccgtacccgtactcacaacatctgtatggtgtccgatttcttctatccgaatatgggaggagtcgaatcgcacatatatcagctcagccagtgtttgatcgaacgaggccataaagtgatcatcgtcacccacgcctacggcaaccggaagggaatacgatacctcacttcaggacttaaggtgtactatctgccgctcaaagttatgtacaaccaatccaccgcaacgaccttgttccattcgctcccgctgcttcggtacatattcgtccgggaacgcgtgactatcattcacagccattcgtcgttctcggccatggcgcatgatgcgttgtttcacgccaagacgatgggcctgcaaactgtgttcaccgaccattcgctttttggatttgcggatgtgtcctctgtgctcactaacaagctgctcaccgtgagtctgtgtgacactaatcatatcatctgcgtgagctacacttccaaggagaacaccgtgctccgggccgcgctgaacccagaaatcgtgtccgtcatcccgaacgcggttgacccgacggatttcaccccagacccattccggcggcatgacagcattaccatcgtggtggtatcgcggcttgtgtaccgcaagggaatagatctgctgtctggcattatcccggaactttgccagaagtaccccgatctgaatttcatcatcgggggagagggacctaaaagaatcatcctggaggaggtgcgggagaggtaccagcttcacgatcgggtccggcttctcggcgctctggagcacaaagatgtgcgcaacgttctggtgcagggacacatctttctcaatacctcactcactgaggccttctgtatggcaatcgtcgaagctgcaagctgcggtttgcaggtggtgagcacccgcgtgggagggattccagaggtcctgccggagaacctgattatcctgtgcgagccttctgtgaagtcgctctgcgaaggccttgagaaggcgatttttcaacttaagtcaggcaccctgcctgcccccgagaacatccacaatatcgtgaaaacgttctacacctggcgcaacgtcgctgaaaggacggaaaaagtctacgacagagtgtcagtggaagcggtcctgccaatggacaagcggctggacagattgatttcccactgcggacccgtgacggggtacattttcgcgctgctggccgtgtttaacttcctgtttctcatcttcctgaggtggatgacgccggactccatcatcgacgtggcaatcgacgccaccggccctagaggagcctggactaataactactcacactcgaagcggggtggagagaataacgaaatctcagaaacccgg

SEQ ID NO: 130542 - DNA, 1452 bp, Artificial Sequence
  derived and/or modified sequence
atggcgtgtagagggggggccggcaatggccaccgggctagtgccacgctgtctcgtgtgtcccccggcagtctctacacatgccgcacgaggacgcataacatctgcatggtgtcggactttttttaccctaatatgggaggagttgagagccatatttaccagctttctcagtgtttgatcgaacgcgggcacaaggttatcatagtgacgcacgcgtacggcaatcgcaagggtattcgctatctgacgagtggtctcaaggtatactacttgccgttaaaggtgatgtacaatcagtccacagccaccaccctgttccattccttgccgttgctgaggtacatctttgtaagggagagggtgactattatccactcacattcctccttttcagccatggcacatgacgcattgtttcatgctaagaccatgggtctgcagacagtctttactgatcattctctgtttggcttcgcggacgtcagttccgttctgactaacaagctgctgacagttagcctgtgcgataccaatcacattatctgcgtgtcttatacttctaaggaaaatacagtactacgagccgccctaaatcctgaaatcgtttctgtgattcctaatgctgtcgacccaactgatttcacccccgatcccttcagaaggcacgattctattaccatagtcgttgtctcccggcttgtctacagaaagggcattgacctgctgagcggtattattcctgagctgtgtcaaaagtacccagacctgaactttattatcggcggcgagggaccaaagcggatcatcttagaggaagtgcgtgagaggtaccagcttcacgaccgggtgagactgctgggcgccttggagcataaggacgtccgtaatgtgcttgttcaagggcacatcttcctgaacacctcattaacggaggccttctgtatggctatcgttgaggccgcatcctgtggcttgcaggtggtctcaaccagggtggggggtatccccgaggttctccccgagaatctgattatactgtgtgagccgtccgtcaaatctctgtgcgaaggactggagaaggctatttttcaactgaagagcggaaccttaccagcacccgaaaatatccacaatatagtgaaaacattctacacctggcggaacgtggctgagaggaccgagaaggtgtacgaccgcgtctcggtcgaggccgttttgccgatggacaagagactggatcgcctgatcagccactgcggacctgtgacagggtatattttcgctctcctggccgtgttcaattttctttttctgatcttcctgcggtggatgacccccgacagtatcatagatgtggctattgacgccactggcccccgaggggcctggacaaacaactatagtcatagtaaaagaggcggggagaataacgaaatcagcgaaacacgc

SEQ ID NO: 130543 - DNA, 1452 bp, Artificial Sequence
  derived and/or modified sequence
atggcgtgccgcggcggcgccggtaacggtcacagagctagcgccactctgtcacgggtgtccccgggctccctgtacacttgccggactagaacccacaacatctgtatggtgtcggactttttctaccctaatatggggggtgtcgagtcccacatataccagctgagccaatgcctcatcgaaagagggcacaaagtcatcattgtgactcatgcctatggcaataggaagggaatccggtacttgacttcgggactcaaggtgtactaccttcctctcaaagtgatgtacaaccagtccaccgcgactaccctgtttcatagcctgccgctcctccgctacatcttcgtgcgcgaacgtgttactatcatccactcgcactcgagcttctccgccatggcgcacgacgcactgtttcacgccaagactatggggctgcagactgtgtttacggaccacagcctgttcggcttcgccgatgtctcgtctgtcctgaccaataagctgctgaccgtgtcactgtgtgacaccaaccacatcatctgcgtctcctacacttccaaggaaaacaccgtgctgcgcgccgctctcaatccagagatcgtgtctgtgatcccaaacgccgtggatccaacggatttcaccccggacccgttcagacgtcacgactccatcacgattgtggtagtctcccggctcgtgtatcggaaaggaatcgacctgcttagcggaatcatcccggagctgtgccagaaatacccggatctcaatttcatcatcggcggcgagggaccaaaacgcatcattctggaggaggtgcgcgaacggtaccaacttcatgaccgggtgcggctgcttggagctctcgaacacaaggacgtcagaaatgtcctcgtccaaggacacatcttccttaacacttcgctcaccgaggctttttgcatggccatcgtggaagcagcgagctgtggcctccaggtggtgtcaaccagagtgggcggaatcccggaggtgctgcccgagaatctgattatcctctgcgaaccgtccgtgaagtccctctgcgaggggctcgagaaggccatctttcagttgaagagcggcaccctcccggccccagagaatatacacaatatcgtgaaaaccttttacacctggagaaatgtggcggagcgcaccgaaaaagtgtacgaccgcgtgtccgtggaggcagttttgcccatggacaagagactggaccgattgatctcacactgcggaccagtgactggatacatcttcgccctcctggctgtgtttaacttccttttcctcatctttctgcgctggatgacccccgactcgatcatcgatgtggctatcgatgcgactggccccaggggagcctggaccaacaattacagccactctaaacggggaggagagaataacgagatttcggaaaccaga

SEQ ID NO: 130544 - DNA, 1452 bp, Artificial Sequence
  derived and/or modified sequence
atggcctgtaggggcggcgctggcaacggtcatcgggcgtcagcgacattgtcccgcgtctcaccaggatccctgtatacttgcaggacccggacccataacatctgcatggtgtcagacttcttctacccaaacatgggaggtgtcgagtctcacatctaccagctcagtcagtgcctgatcgagcgaggacataaggttatcattgtgacacatgcatatggcaaccggaaaggaatccgctacctgaccagtggtctgaaagtgtactacttgcccctgaaggttatgtacaatcagtcaacagctactacgctgttccacagtctgccgttactacggtatattttcgtacgagagagggtgacaatcattcactctcactcaagcttcagtgctatggctcatgacgcacttttccatgcgaagacgatgggactgcaaacggtctttactgatcactccctattcggatttgcagatgtatcatcagttctcaccaataaattgctgaccgttagcttatgcgacaccaaccacatcatctgtgtatcttacactagcaaagaaaataccgtgctccgggcagcacttaacccggagatcgtatctgtaatcccgaacgctgtcgacccaactgatttcacaccagaccctttcaggaggcatgattcaatcaccatcgtcgtcgtgtccagactcgtgtatcggaaaggcatagacttgctgtctggcattatccccgagctgtgtcagaagtaccctgatctgaactttataatcgggggcgaaggtcctaaacgcataatcctggaggaagtgcgggagcgctatcagctgcacgacagagtgcggctgctcggagcactcgaacacaaggatgtccggaatgtccttgtccaggggcacatctttctgaatacttctctaaccgaggccttctgtatggctatcgtggaagccgccagctgcggccttcaggttgtatcgactcgagtgggtggcattccggaggttctgcccgaaaatttgattatcctctgtgagccctcagtgaaatctctctgtgagggactggagaaagccattttccaactgaaatccggcacactcccagcaccagagaatatacataacattgtcaagaccttctacacatggcggaacgtggcggaacgcacagagaaggtgtacgacagggtgagtgtggaggccgttctccccatggacaagcggctggatcgcctcatcagccactgtgggccggtgacgggttatatctttgccctccttgcagtgttcaacttcttgttcctgatctttctcagatggatgacaccagactccattattgatgtggcaattgatgccacagggccacgaggcgcttggaccaacaattattcgcattccaagcgaggcggtgagaacaacgagatatctgaaacccgc

SEQ ID NO: 130545 - DNA, 1452 bp, Artificial Sequence
  derived and/or modified sequence
atggcatgtagaggaggagcaggaaatggacatagagctagtgctactctttctagggtatctccaggaagtttatatacatgtcgaactagaactcataatatttgtatggtttcagacttcttctatcctaatatgggaggagttgaaagtcatatttatcaattgtcccagtgtctcattgaaagaggacataaggtaattattgttactcatgcatatggtaatagaaagggtattagatatttaacatcaggacttaaagtttattatttaccattaaaagttatgtataatcaatcaacagcaacaactttattccattcacttccactattaagatatatctttgttagagaaagagttacgataattcattctcatagtagttttagtgctatggcacatgatgctctttttcatgctaagactatgggattacaaactgtctttacagatcattcattatttggttttgctgatgtttcttccgttttaactaataagttattaacagttagtttatgcgacactaatcatataatttgtgtttcttacacttctaaagaaaacacagtacttagggcagcacttaatccagaaattgtatctgttattcctaatgcagtagatccaacagattttactccagatccatttaggagacacgatagtattacaattgttgttgtttcacgtttagtttatcgtaaaggtattgatttattaagtggtattataccagagctttgtcaaaaataccctgatttaaattttattattggaggagaaggacctaaacgaattatattagaagaagtaagagaacgatatcaattacatgatagagttaggcttcttggtgctcttgaacataaggatgtacgtaatgttttagtgcagggtcatattttcttaaatacatctttaacagaagctttttgcatggctatcgtggaagctgcaagttgtggtttacaagttgtatcaactagagttggtggtattcctgaagtactccctgaaaacctcattattttatgtgaaccaagtgttaaatcattgtgtgaaggacttgaaaaagcaatcttccaattaaaatcagggactttaccagcacctgaaaatattcataacatcgttaaaactttctatacatggcgaaatgttgctgaaagaactgaaaaagtttatgatagggtttctgttgaagcagttttaccaatggataaaagattagatcgattaatttcacattgtggtccagttacaggatacatttttgcattattggcagtttttaattttttatttttgatttttttaagatggatgactcctgattcaattatcgatgtagcaattgacgcaactggaccacgaggagcatggactaataattattctcattctaaaagaggaggagaaaataatgaaatttccgaaacaaga

SEQ ID NO: 130546 - DNA, 1452 bp, Artificial Sequence
  derived and/or modified sequence
atggcctgccgcggcggcgccggcaacggacacagagcctctgccacactgagccgagtgagcccgggaagcctctacacttgtcgcactcgcacccacaacatctgcatggtgtccgattttttctaccccaacatggggggtgtcgaaagccatatataccagctgagtcagtgcctgatcgaacgtggccataaggtaatcatagtcacccatgcctacggaaaccgcaaaggcattaggtacctgacgtccggtttaaaggtgtactatctgcccctgaaggtcatgtataatcagagcactgctaccacgctctttcacagtctaccattgctgcgttacatctttgtgcgagaaagggtcaccataattcattcgcactccagtttctccgctatggcccacgatgcgctatttcacgcaaagactatgggcttgcagacagtgtttaccgatcattccctgttcggattcgccgacgtgagcagcgtgctgacaaacaagctgctgactgtttccctatgcgatacgaatcacataatttgtgtgagctacacgtcaaaagagaatacggtactccgggccgccctgaatccagaaatcgtctcggttatacccaacgctgttgaccctaccgatttcacccccgaccccttccgccgccatgactccataacgattgtggtggtaagtcgcctggtgtatcggaagggtattgacctgctgagcgggatcatccctgaactgtgtcagaagtaccccgatttgaatttcatcatcggcggcgaaggtccgaagagaattattttggaagaggtacgagagcgatatcagctacacgaccgcgtgcgactgctgggtgcgctcgagcacaaggacgtccgcaacgttctcgtgcaggggcatatctttttgaatacctcacttacggaggcattttgcatggctatcgtggaggcggcctcctgtggtctgcaggtggtgagcaccagagtcggaggtatccctgaggtgcttccggagaacctcattatcttgtgcgaaccgagcgtcaagtcactgtgcgaaggactcgagaaggcaatattccaactcaagagcggaaccctcccagcgcccgagaatatacacaatatcgtgaaaacattctatacgtggcgtaatgtggcggaacgcaccgaaaaggtttacgatcgcgtcagcgtcgaggccgtgctcccgatggacaagcgccttgaccgtctgatatcacactgtgggccagtgacgggctatattttcgccctcttagcggtcttcaactttctgtttctgatttttttgcgctggatgaccccggacagcatcatcgatgttgcgatagacgctacaggcccgcgtggggcctggaccaataattactcacactctaagcgcggcggtgagaacaacgagatttccgagacgaga

SEQ ID NO: 130547 - DNA, 1452 bp, Artificial Sequence
  derived and/or modified sequence
atggcatgtcgcggcggcgccggcaacggacacagagcctcggcaactctcagccgagtctcacctggatccctgtacacttgcagaactcgaactcacaacatttgcatggtgtccgatttcttttatcctaatatgggaggggttgaatcccatatctaccaactgtcgcaatgcctgatcgaacgaggacacaaagtgatcatcgttacccacgcgtacggaaaccgaaaaggcatccggtacttgaccagtggactgaaggtgtactaccttccactcaaggtgatgtacaatcagagcactgctacgactctttttcactcgctccccctcctgcggtacatcttcgtcagggagcgcgtgaccataatccattcccatagttccttctctgccatggcacatgatgcactcttccacgctaagaccatgggacttcagactgttttcactgaccactcgctctttggctttgccgatgtgtccagcgtcctgacgaacaagctgctgaccgtctcactttgcgataccaatcacataatctgcgtctcgtacacttcaaaggagaacactgtactgcgcgctgcgctcaacccagaaatcgtgtcggtcatcccgaatgccgtcgacccgaccgatttcaccccggacccgttcaggcgacatgactctatcaccatcgtcgttgtgtcgagactggtgtaccgcaagggaatcgacctcctgtccggaatcattcctgaactgtgccagaagtacccggatttgaatttcatcataggaggggaaggtcctaagagaattatccttgaagaagtccgggaacgctaccagttgcatgatcgggtgcgcctcctgggagccctggagcataaggacgtgcggaacgtgctggtgcagggccacatcttcctgaatacttcactcacggaggctttctgcatggcgatcgtggaagccgcgtcatgtggtctgcaggtcgtctcgactagggtgggaggtatccccgaagtgctcccagagaatctcatcatcctgtgcgaaccgtcagtgaaatccctgtgtgaggggctggaaaaggccattttccaactcaagagcgggactctcccggcgcccgagaacatccacaacatcgtgaaaaccttctatacctggaggaatgtggctgaacgcactgaaaaagtgtacgaccgcgtaagcgtggaggcggttcttcctatggacaagagacttgatcggctgatctcccactgcggaccggtgaccggatacatttttgccctcctggccgtgttcaactttttgttcctgatcttcctgcgttggatgaccccagacagcatcatcgacgtggcgattgacgctactggcccgcggggagcctggacgaataactacagtcatagcaaacgcggaggcgaaaacaacgagatctcagagactaga

SEQ ID NO: 130548 - DNA, 1452 bp, Artificial Sequence
  derived and/or modified sequence
atggcttgtagaggaggcgccgggaatgggcaccgggcctctgccaccttgagtcgcgtgagtcctggttccctgtatacttgcagaacccggacccataacatatgtatggtgtccgactttttctatccaaacatgggaggagtggaatctcacatctaccaactttcgcaatgcctgattgagcggggacacaaagtgattatagttacccacgcgtacggaaatcgtaaaggaatccgctacctgacatctggccttaaggtatattacctaccccttaaggtcatgtataaccagtccactgcaacaacgttatttcatagtctccccctgcttcgctacatttttgtgcgcgagcgtgttaccattatccactctcactcctcttttagcgccatggcccacgacgcactgtttcacgctaaaacgatggggctccaaactgtttttacggaccatagcctttttggattcgctgatgtgtcgtccgtgctgacaaataagttgttgacagtcagcttgtgtgacacgaaccacataatctgtgtgagctacactagtaaggagaacaccgtcttacgcgccgccctgaatcctgaaatcgtctccgtcatccctaacgccgttgatcctacagactttacgcccgatccgttccggcgacatgactccattacaatcgtcgtcgtgagccggctggtctatcgaaaaggtattgacctactgtcaggcattatcccagaactgtgtcagaaatatccagatctcaactttatcatcggtggtgaaggccctaagaggatcatactcgaagaggttagagagaggtatcagctccatgaccgagtgagactcctaggcgcactcgaacacaaggatgtgcggaacgtgctggtgcagggccacatcttcttgaacaccagtctaacagaggctttttgcatggccatcgtcgaggcagcatcgtgcgggttgcaagttgtgtctactagggtgggcggaatccccgaggtgctccccgaaaacctaatcatcctgtgtgaaccgagtgtaaaatctttgtgcgaggggcttgagaaggccatcttccaactgaagagtggtaccctgcccgctcctgagaacattcacaacattgtgaagactttctacacttggagaaatgtagctgaacgaactgaaaaggtgtacgaccgcgtatcggtggaggccgtgctgcccatggataagaggctagataggctcatatcacattgtggacccgttacgggatacatttttgcactcttggccgtgtttaactttctctttctgatctttctgcggtggatgactcccgatagtattatagatgttgctattgatgctactggccctagaggggcctggaccaacaattacagccattcaaagcggggcggcgaaaataatgagatttccgaaaccaga

SEQ ID NO: 130549 - DNA, 1452 bp, Artificial Sequence
  derived and/or modified sequence
atggcttgcagaggtggagctggaaatggccacagggcctctgcaacccttagcagagtgtcccctggatccctttacacttgtagaactcgcactcacaacatttgcatggtgtcggactttttctaccccaacatgggcggtgtcgaatcccatatctatcaactttcacaatgtcttattgaacgcggtcataaagtcattattgtgactcatgcatacgggaacagaaagggaattagataccttacctcaggactcaaagtgtactacctccctctgaaggtcatgtacaatcagtccaccgcaaccacgctttttcattcgctcccacttcttaggtacatctttgtccgcgagagggtcacgatcatccactcccattccagcttctccgcaatggcgcacgacgccctctttcacgcaaagacgatgggacttcagacggtgttcaccgaccactccctcttcggttttgccgatgtgtcgtccgtgctgactaacaaacttcttaccgtgtcgctgtgcgatactaaccacataatctgtgtgtcatacacctcaaaggaaaacactgtgctgcgggcggcactgaaccccgaaattgtctcggtcatcccaaatgcagtggaccctactgatttcactccagatccattccgtcgacatgattcgatcactatcgtcgtggtttcgagactggtgtaccgcaaggggatcgatcttctgtcgggaatcattcctgagctgtgccaaaagtacccagatctcaactttatcattggcggcgaaggtccaaagagaatcatactcgaagaagtgagagaacggtaccaattgcacgatagagtgagacttctgggggcactcgaacataaggacgtccgtaacgtcttggtgcaaggacacatctttctcaacacctcccttactgaagccttctgtatggcaattgtcgaggcggcgtcgtgcggtctgcaggtggtgtccactagagtgggcgggattcctgaagtcctgcctgagaacctgatcatcctctgcgagccaagcgtcaagtcgctttgcgaaggtcttgagaaagcaatattccaactgaaatcaggaacccttcccgcccccgagaatatacacaacattgtcaagaccttttacacttggaggaatgtcgccgaaagaactgaaaaggtgtacgatagagtgtcggtggaagcagtgcttcctatggataaaagattggatcgacttatatcccattgtggtccagtgaccggatacatctttgcccttcttgcggtgttcaatttcctgttcttgattttccttagatggatgacgcctgattcgattatcgatgtggcaatcgatgcaactggaccgaggggagcctggactaacaattacagccattcaaagcgtggaggagaaaacaacgaaatcagcgagactaga

SEQ ID NO: 130550 - DNA, 1452 bp, Artificial Sequence
  derived and/or modified sequence
atggcctgccgggggggcgcaggaaacggacacagagcttccgctaccctttccagggtaagccctggctcactttacacttgtcgcacgcggacccacaatatctgcatggtctccgatttcttttacccaaacatggggggagtggagtcacacatctaccaactgagccagtgcctgattgaaaggggccacaaggtgatcatagtcacacatgcctacgggaatcgcaaaggaatacgctatctcaccagcggccttaaggtgtattatctgccactgaaagtgatgtataaccaatccacagctaccacactctttcactccttgccattgctcaggtacatcttcgttagagaaagagttacgatcatccacagtcactctagcttcagcgcgatggcgcatgatgccttgttccacgcgaagacgatgggtctgcaaacagtctttaccgaccacagcctgttcggcttcgcggacgtttcctccgtgttgacaaacaagttgctgactgtgtccctgtgcgacactaaccatatcatttgtgtcagctatacgtccaaggaaaataccgtgctcagggccgccctcaatccagaaattgtgtctgttattcccaacgctgtcgatcccaccgactttacacctgatccttttagacggcacgactcaattacaattgtggttgtgtctcgcttggtctatcggaaaggaatcgacttgctgtcaggcataatcccagagctgtgccagaagtatccggatttgaactttatcatcggcggggagggaccgaagcgaatcatccttgaagaggtgcgagagcggtatcagctccatgacagggtgaggctgctgggggccctcgaacacaaggacgtgagaaacgttctcgtgcagggtcatatcttcctgaataccagcctgactgaagcattctgtatggctattgtggaggcagcctcatgtggccttcaagtcgtatctactcgggttgggggaatacccgaagtgttgcccgagaacctgatcatactctgtgagccttccgttaaaagtctgtgtgagggacttgaaaaagccatctttcagctgaagagcggtactttgcctgcgcccgagaacatacacaacatagtcaagacgttttatacctggaggaatgtcgcggaaaggactgaaaaggtttatgatagagtgtccgtggaggcagtgctgcctatggataagagactggacaggcttatttctcactgtgggcccgtgactggctatattttcgcgctgctggcagtctttaattttctcttcctgatctttctgcgctggatgacaccggactccatcatcgatgtggcaatcgacgcaaccggccctcggggcgcttggactaacaattacagccactcaaagcgcggtggggagaacaatgagatatcagaaacacgc

SEQ ID NO: 130551 - DNA, 1452 bp, Artificial Sequence
  derived and/or modified sequence
atggcgtgtcgtggtggtgcgggtaatggtcatcgtgcgtcggcgacgctatcgcgtgtttcgccgggttcgttatatacgtgtcgaacgcgtacgcataatatatgtatggtatcggattttttttatccgaatatgggtggtgttgaatcgcatatatatcaactatcgcaatgtttaatagaacgaggtcataaagtaataatagtaacgcatgcgtatggtaatcgaaaaggtatacgttatttaacgtcgggtttaaaagtatattatctaccgttaaaagtaatgtataatcaatcgacggcgacgacgctatttcattcgttaccgctattacgatatatatttgtacgagaacgtgtaacgataatacattcgcattcgtcgttttcggcgatggcgcatgatgcgctatttcatgcgaaaacgatgggtctacaaacggtttttacggatcattcgttatttggttttgcggatgtatcgtcggtactaacgaataaattattaacggtttcgctatgtgatacgaatcatataatatgtgtatcgtatacgtcgaaagaaaatacggtactacgtgcggcgttaaatccggaaatagtttcggtaataccgaatgcggttgatccgacggattttacgccggatccgtttcgtcgacatgattcgataacgatagtagtagtatcgcgactagtttatcgtaaaggtatagatttactatcgggtataataccggaattatgtcaaaaatatccggatctaaattttataataggtggtgaaggtccgaaacgtataatactagaagaagttcgtgaacgatatcaattacatgatcgtgtacgactactaggtgcgttagaacataaagatgttcgtaatgttttagttcaaggtcatatatttctaaatacgtcgctaacggaagcgttttgtatggcgatagttgaagcggcgtcgtgtggtttacaagtagtatcgacgcgagtaggtggtataccggaagtattaccggaaaatctaataatattatgtgaaccgtcggttaaatcgttatgtgaaggtttagaaaaagcgatatttcaattaaaatcgggtacgttaccggcgccggaaaatatacataatatagttaaaacgttttatacgtggcgaaatgttgcggaacgaacggaaaaagtatatgatcgtgtttcggtagaagcggtattaccgatggataaacgattagatcgattaatatcgcattgtggtccggtaacgggttatatatttgcgttattagcggtatttaattttctatttttaatatttctacgttggatgacgccggattcgataatagatgtagcgatagatgcgacgggtccgcgtggtgcgtggacgaataattattcgcattcgaaacgaggtggtgaaaataatgaaatatcggaaacgcga

SEQ ID NO: 130552 - DNA, 1452 bp, Artificial Sequence
  derived and/or modified sequence
atggcgtgcaggggtggagccggaaacggacacagagccagcgcaactttgtcaagggtgagcccggggagcttgtacacttgtcgaactcggacccataacatttgtatggtatccgacttcttctacccgaacatggggggagtcgaatcccacatttaccagctctcgcaatgcctgattgagagagggcataaggtgatcatcgtgacccatgcctacggaaaccgcaagggaataaggtatctgacttcgggactcaaggtgtactaccttccgcttaaggtgatgtacaatcaatccaccgcaacgactttgttccactcgctgccactgctgcgctacatctttgtgcgcgaaagggtcaccatcatccactcgcacagttctttttcggccatggcacacgacgccctgtttcacgcaaagactatgggactgcagactgtgtttactgatcattcgctcttcggtttcgcagatgtctcatcggttctcaccaacaagctgctgaccgtgagcctgtgcgacaccaatcacatcatctgtgtgtcatacacgtcaaaagaaaacaccgtgctgcgggcggccctgaatccggaaatcgtgtcggtgatcccgaatgcagtggatccgactgatttcacgccagacccatttcggagacatgactccatcaccattgtggtcgtctcacgccttgtgtaccggaagggaatcgacttgctctccggtatcattccggagctgtgtcaaaagtatccagaccttaacttcatcatcggaggagagggaccgaagcggatcatcttggaagaagtcagagagcgctatcaactccatgaccgggtgcgcctcctgggcgcccttgagcacaaggacgtgaggaacgtgctggtgcagggacatatcttcctcaacacgtcgttgaccgaagccttctgcatggccatcgtggaggctgcgtcctgcggccttcaggtggtcagtactagagttggagggatcccagaggttctgcccgagaatcttatcattctgtgcgaaccatctgtgaagtccctctgcgaaggactcgagaaggccattttccaactgaagagcggtaccctgccggcgccagaaaacatccacaatatcgtgaaaaccttctacacgtggagaaatgttgccgagcgaactgaaaaggtgtacgatcgggtcagcgtcgaggcggtgctgcccatggataaacggctggaccggcttatttcacattgtggtccggtgaccggatacatttttgcactcctggcggtgtttaacttcctgtttctcatcttcctgcgctggatgaccccggactcaatcattgatgtggctatcgacgcgacgggaccgcggggagcctggactaataactactcacacagcaaaagaggcggagagaacaatgagatctcagaaacgcgc

SEQ ID NO: 130553 - DNA, 1452 bp, Artificial Sequence
  derived and/or modified sequence
atggcatgtcgtgggggtgcagggaacggccacagggcttctgctaccttatctagagtgagtccagggtcactgtacacatgccggacgcgaacccacaacatttgcatggtctcagacttcttctatccaaatatgggcggcgtggaatcgcacatctaccagttgtcgcaatgcctgatcgagcgtggacataaagttatcatcgtcacccatgcttatggaaatagaaagggtatccgttacctaactagtggcttgaaagtgtactatttacccctgaaggtgatgtataaccagtccacagccacgactctttttcacagcctgccccttctgcggtatatcttcgtgagggagcgggttactattatccatagccatagtagtttctctgccatggcgcacgacgcactcttccacgccaaaacgatgggtttacagactgttttcaccgaccattctctgtttggattcgcagatgtttccagcgtcctgaccaataagctgcttacagtctctctttgtgatactaaccatattatctgtgtgagctacacctccaaagagaatacagtgctgcgcgctgcacttaatccagaaatagtctcggtgatccctaacgctgttgacccaaccgattttacccctgaccctttccgccgccacgattcaatcactatagtcgtggtaagtagactcgtatatagaaagggtattgacctgctcagcggtatcataccagaactgtgtcagaaatatccagatttgaacttcatcatcgggggggaagggccgaagagaataattctggaggaagtgagagaacgatatcaacttcacgacagggtacgtctgctcggtgccctggagcacaaggatgtgaggaacgtactagtgcagggccacatcttccttaacacctccctaactgaggccttctgtatggctatcgtggaagccgcctcttgcggattacaggtcgtctctacaagagtgggggggattcctgaggtcttacctgagaatttgatcatcctgtgtgagccaagcgtcaagtctttatgcgaaggtctcgagaaggctatcttccagctgaaaagtggaacactacctgccccagaaaacatccataatatcgtaaaaactttctacacctggcgcaatgtggccgagaggaccgagaaagtttatgacagagtgagtgtagaggctgtgctacccatggacaagagattggaccggctaatcagccattgtggaccagtaaccggatacatcttcgctctgctcgcagtgtttaatttccttttcctgatttttcttaggtggatgacccctgattccataattgacgtcgcgatagacgccaccgggccgcgcggcgcatggaccaacaactattcacacagcaaacgtggcggcgaaaataatgagatcagtgaaaccagg

SEQ ID NO: 130554 - DNA, 1452 bp, Artificial Sequence
  derived and/or modified sequence
atggcgtgtagagggggtgccggtaatggacacagggcatcagccactctgtcacgggtgtcccctggttcgctgtacacctgtagaacccggacgcacaatatctgtatggtgtcggatttcttctacccaaacatggggggtgtcgagtctcatatctaccaactcagccaatgtctgatcgagagaggacacaaggtgattatcgtgactcatgcttacggaaaccggaagggaatacgttacctgactagcggtctgaaggtgtactacctgcccctgaaggtcatgtacaatcaatcgaccgcaactaccctgtttcactcgctgccactgttgaggtacatcttcgtgcgtgaaagggttaccattatacattcacattcctcattttcagctatggcacatgatgcactctttcatgcaaagactatgggcctgcaaaccgttttcactgaccattccctttttggatttgccgacgtttcgagcgtgctgactaataagctcctcaccgttagcctctgtgacaccaaccacatcatttgtgtctcgtacacttctaaagaaaataccgtgctccgtgcggctttgaaccctgaaattgtgtccgtgattccgaatgctgtggaccccaccgacttcaccccagatccttttcggcgccatgattctatcaccatagtagtggtgtccagacttgtctacagaaagggtattgacttgctgagcggaatcatccctgaactttgtcagaagtaccctgatctgaactttatcattggaggagagggaccaaagcggattattcttgaagaagtgcgcgagaggtaccaacttcatgacagggtgaggttgcttggcgcccttgagcataaggatgtgcgcaacgtccttgtgcagggccacatctttctcaacaccagcctgaccgaagcattttgtatggcaattgtcgaggctgcatcgtgcggactgcaggtcgtgtcgacgagagtggggggtatccccgaagtgcttccagagaaccttatcatcctttgtgaaccctcagtcaagtccctttgtgaaggtcttgaaaaagcaatcttccagcttaagtccggaacgcttcctgccccggagaacattcataacattgtcaagacgttttacacctggagaaatgtggcagaaaggactgaaaaggtgtacgatcgggtcagcgtcgaagctgtgctgcccatggataagagactcgacagactgattagccactgtggcccagtgaccggatatatctttgccctccttgccgtgtttaactttcttttcctgatattccttcggtggatgaccccagattctattatcgacgtggccatcgatgcaactgggccacgcggagcatggacgaataactattcccacagcaagaggggtggggagaataacgaaatctccgaaaccaga

SEQ ID NO: 130555 - DNA, 1452 bp, Artificial Sequence
  derived and/or modified sequence
atggcctgccgaggaggcgctggcaatggccatcgggcctccgctactctctctcgggtcagtcccggcagcctttacacatgccgcacccggacccataacatctgtatggtcagcgactttttctaccccaacatggggggagtcgagagccacatctaccagctgtcccagtgtcttatcgaaaggggccacaaagtgataattgtgacccatgcatatggaaatcggaaagggatccgctacctgacctccgggctgaaagtttactatctgccactgaaagtcatgtacaatcagtctacagctacaaccctgtttcactccctccctctcttgcgctatatcttcgtgcgcgaacgtgtcacaatcatacattcccactccagtttttcagccatggcacacgatgcccttttccacgccaaaactatgggactgcagacagtgtttacagaccacagcctcttcggattcgccgacgtgagcagtgtgctgaccaacaagctcctcacggtttcactctgtgatacaaaccatataatttgcgtatcctacactagcaaagaaaatacagtgctgcgtgccgccctcaaccctgagatcgtttctgttatcccaaatgcagtggaccccacggactttaccccggatcctttccgccgccacgattccattaccattgtggtggtatctcgcctggtctatagaaagggaatcgacctgctctccggaatcattcccgagctatgccagaagtatcctgaccttaacttcatcattggtggagaaggaccaaagcgcattattctagaagaagtccgagagaggtatcagctgcacgatcgagttcgactcctgggagctttggagcacaaggacgttaggaacgtgttggtgcaaggccacattttcctgaatacctctctgacggaggctttctgcatggcgattgttgaagccgcctcatgcggcctccaagtagtcagcaccagggtgggaggcataccagaagtgcttccggaaaatctgattatcctttgcgaaccgtccgtgaagtcgctatgtgagggactagaaaaagcaattttccagctgaagagcggaactctgcctgcccctgagaacattcacaacatcgtcaaaaccttctacacctggcgcaacgtggccgaacgcactgagaaagtgtatgacagggtatctgtggaagccgtgctgccaatggataaacggctcgataggcttatcagccattgcgggccagtgacaggatacatcttcgctcttctggccgtatttaactttctctttcttattttcctccggtggatgacacctgactctataattgacgtcgcgattgatgcaaccggaccaaggggcgcctggactaacaactactcccacagtaaaaggggcggggagaataacgagatcagcgagactcgt

SEQ ID NO: 130556 - DNA, 1452 bp, Artificial Sequence
  derived and/or modified sequence
atggcctgtagagggggagcgggaaacggtcatcgcgcatccgcaactctttccagggtgtcccctggctcgctgtacacctgtaggactcgcactcataacatatgtatggtcagcgatttcttctacccaaacatgggtggtgtggaatcgcacatttaccaactttcacaatgtttgattgaacggggtcataaagtgattattgtgacccacgcatacggcaaccgcaagggtatccgttacctcacctccggtcttaaggtgtactaccttccactgaaggtgatgtataatcaatctaccgcaacgacccttttccattccctgcctctcttgagatacatctttgtcagagaaagagtgacgattattcactcccacagctccttttccgcaatggctcacgacgcactcttccacgctaagaccatggggcttcaaactgtgttcactgaccactcgctgtttggctttgcagatgtgtcaagcgtgctgaccaacaagctccttactgtgtcactgtgcgataccaatcacattatctgcgtgtcgtatacttcaaaggagaatactgtgcttcgagcggcgctgaatccagagatcgtctcagtgattccgaatgccgtggatcctaccgatttcactcccgaccctttccgcaggcatgattcgattaccatcgtggtcgtgtcgagacttgtgtacagaaagggtatcgatcttctctcggggataattcccgagttgtgccagaagtacccagatctgaatttcataatcggaggcgaaggccccaagagaattatcctggaggaagtgcgggagcgctaccaactccatgatagagtccgactgcttggagcgttggagcacaaggatgtgagaaacgtgcttgtgcagggacacatttttctgaacacgtcactgaccgaagccttctgcatggcaattgtcgaagcagcatcatgtggacttcaagttgtgagcacccgtgtcggaggtatccctgaagtcctgcctgaaaacttgatcattttgtgtgagccttccgttaaatcgctctgtgaaggactggagaaggcaatctttcaacttaaatccggaactctgcctgcccccgaaaacatccataacattgtcaaaaccttttacacctggagaaacgtcgccgaacgcaccgagaaggtgtacgacagggtgtctgtggaagccgtgcttccaatggacaaaaggctggacaggctgattagccactgcggacctgtgacgggttacatctttgcccttcttgcagtgtttaactttctgtttctgatttttcttcgctggatgacccctgacagcattatcgacgtggcgatagatgcgacgggccctagaggggcatggaccaacaactactcgcattccaagaggggtggcgaaaacaatgaaatttcagaaactaga

SEQ ID NO: 130557 - DNA, 1452 bp, Artificial Sequence
  derived and/or modified sequence
atggcatgtcgaggtggagcaggtaatggtcatcgggcaagcgcaaccctgtcgcgtgtctcgccgggatccctgtacacctgtagaactagaactcataacatttgtatggtgtcagactttttctacccaaatatgggtggagtcgaatcgcatatctaccagctctcccagtgcctcattgaaaggggccataaggtcattattgtgacccacgcctacggtaacagaaagggtataagatacctgacttccgggctcaaagtgtactaccttcctcttaaggtgatgtacaaccagtcgaccgccacgaccctcttccattccctgccgcttctgcgctacatctttgttcgcgaaagggttaccatcattcacagccattcgtccttttccgcaatggcacacgatgccctttttcatgcaaaaactatgggcctgcaaacggtttttaccgatcattccctctttggatttgctgatgtgtccagcgttctcaccaacaaacttctgactgtgtccctctgtgacactaaccacattatctgtgtcagctatacctccaaggaaaacaccgtgcttagggctgcactcaaccctgagatagtgtcagtcataccaaacgcagtggacccgaccgactttacccctgatcctttccggagacacgatagcattactatcgttgtcgtgtcacgactggtttacaggaaaggcattgatcttcttagcggaatcatccctgagctgtgtcagaagtatcctgatttgaactttatcataggaggtgaaggacctaagcggattattcttgaggaggtgcgcgaacggtaccaattgcatgaccgggtgcgcctgttgggggcacttgaacataaagacgtcagaaacgtgctggtgcaaggacacatttttcttaacaccagccttactgaggccttttgcatggccatcgtcgaggccgcgtcatgcgggctgcaagtcgtctcgacgagagtgggtggaattccagaagtgctccctgaaaacctcattatcctttgtgaaccttcggtgaagtcactttgtgaggggctcgagaaggccattttccaactgaaaagcggtacgctccctgccccggaaaacattcataacatcgtcaagaccttttacacctggagaaatgtggctgaacgcaccgaaaaggtgtacgaccgggtgtccgtggaagcggtgctgcctatggacaaaagactggatagattgatcagccattgtggcccagtgactgggtacatctttgcactccttgctgtctttaactttctttttcttatcttcttgcgttggatgacgccagactcgattattgatgtcgcgatcgacgccaccggtccgagaggagcctggactaacaactacagccattcgaagcgtggtggagagaacaacgaaattagcgaaacccgg

SEQ ID NO: 130558 - DNA, 1452 bp, Artificial Sequence
  derived and/or modified sequence
atggcctgccggggcggtgccggtaacggtcaccgtgcttccgcaactctgtcccgagtctcacctgggagcctgtacacgtgtcggacccgaactcataacatttgcatggtcagcgactttttctacccgaatatgggaggcgttgaatctcacatttaccaactctcgcagtgtcttatcgaacggggacacaaggtgatcattgtgacccatgcttacggaaaccgtaagggaattcggtaccttactagcggactcaaggtgtactaccttcctcttaaggtcatgtacaaccagagcaccgcaactacccttttccattcactccctcttctcagatacattttcgtgcgggaacgcgtgaccattattcattcgcattcctcgttctcggcaatggcacatgatgcacttttccatgccaaaaccatgggtctgcaaactgtattcaccgatcattcgctttttggatttgccgatgtgtccagcgttctcactaacaagctgctcactgtgagcctttgtgacaccaaccacattatctgtgtgtcgtacactagcaaggagaatactgtgctgagagcagctcttaaccctgagatcgtgtcggtgattccaaacgcagtggaccctacggattttactcccgatccgtttcgccgtcatgactcaataactatcgtggtggtgtcgcgccttgtctaccggaagggaattgatctcctgtccggaattatcccggagctctgtcagaagtaccctgatctcaatttcataattggcggagaagggccgaagagaatcattctcgaagaagtcagagaaagataccagcttcacgatcgggtgaggcttcttggagctctggagcacaaggatgtgagaaacgtcctggtgcaaggtcatatctttctgaacacttccctgaccgaagcattttgcatggcgatcgtggaagcggcctcctgtggacttcaagtcgtctcgacccgagtggggggtatccctgaggtcctgccagaaaacctcatcattctgtgcgagccatcggtcaagtcactttgtgagggactcgaaaaggcaattttccagctgaaatcggggactcttccagcgcctgagaatatccacaatatcgtgaaaaccttttacacctggcgtaatgtggcagagcggaccgagaaggtgtatgatcgagtgagcgtcgaggcagtcctgcctatggacaagagattggatcgccttataagccactgcggtcctgtcactggctacatttttgccctgcttgcagtgttcaattttctgtttcttatcttcctgagatggatgactcctgatagcatcatagacgtggctatcgacgcgaccggtcctagaggagcctggaccaacaactactctcattcgaagcgtggaggcgagaacaacgaaatctcggaaactcgc

SEQ ID NO: 130559 - DNA, 1452 bp, Artificial Sequence
  derived and/or modified sequence
atggcctgcaggggcggcgcaggcaatgggcaccgagctagcgctacgctgagccgcgtgtcccccggtagcctctacacttgcaggacgcgcacccacaatatctgtatggtatccgacttcttctacccaaatatgggcggggtagagagccacatctatcagctgagccaatgcctgatcgaaagaggacacaaggtgataatcgtaactcatgcctacggcaatcgaaagggaattcgctacctgacttcaggcctgaaggtgtactacctaccccttaaggtgatgtacaatcagtctacagctactaccctgtttcattcactccctttactgagatatatttttgtgcgggaaagagtgacgattatccacagccacagcagcttctcggcaatggcccacgacgcactctttcacgccaaaacaatgggtcttcagacagtgttcacagaccatagcctgttcgggtttgcagacgtgtcctcagtgctgacaaataaattgctgactgtcagtctgtgcgatacaaatcatatcatctgtgtgtcctatacctccaaagagaatacggttctccgcgctgcccttaatccagagatcgtaagcgtcataccaaatgcagttgatcctaccgatttcacccccgatccattccgtcggcatgattctattaccatcgtggtcgtgtcacgcctggtgtaccgcaagggcattgatcttctgtctggcatcatcccggagctttgtcagaagtaccccgacctgaattttatcattggaggagaaggccctaagagaataatccttgaagaagtacgggaaagataccagcttcatgacagggtgagactgctcggagcactggaacataaagatgtacggaacgtcttggtgcaagggcacatatttctgaatacctcactcaccgaggccttctgcatggcaatcgttgaggccgcatcctgcggtttgcaagttgtgtctacacgggtcggcggcatccctgaggtgctgcctgagaacctcatcatcctttgcgaaccctcagtgaagtcactctgcgagggccttgaaaaggcgatctttcagctgaaatctgggactctcccggcaccagaaaatattcataacattgtcaagacattttacacatggaggaatgttgccgaaaggactgagaaggtgtatgaccgtgtgtcagtcgaggcggttttacctatggacaagcggctggataggctgatcagccattgcgggcccgtcactggatatatcttcgcgctgctggctgtatttaattttttgttccttattttccttcgctggatgacccccgacagcattatagacgtggccatcgacgccacgggaccacggggtgcctggaccaacaattactcacatagtaaacggggcggagagaacaatgagatctccgagactcgt

SEQ ID NO: 130560 - DNA, 1452 bp, Artificial Sequence
  derived and/or modified sequence
atggcctgccgtggaggtgcgggaaacgggcacagagcttctgcaaccctcagccgggtttcacctggctccctttacacgtgccggactagaactcataacatttgcatggtgtcggacttcttctacccgaacatgggcggcgtggaaagccacatctaccaattgagccagtgtctgattgaacgcggccacaaggttatcatcgtgactcatgcgtacggtaatagaaaaggaatccgctacctcacttcgggactgaaagtctactacctgcccctcaaggtcatgtacaatcaaagcactgccaccaccctcttccattctctgccgcttctccgctacattttcgtgcgcgaacgcgtgacgatcatccactcgcattcatcattctccgcaatggcacacgatgccctgttccacgcgaaaactatgggcttgcagactgtgtttactgaccattccctctttgggttcgcagacgtgtcatcagtgttgactaacaaacttcttacggtgtcactgtgcgataccaatcacatcatctgcgtctcctatacctccaaggaaaacacggtgctccgggccgcgctcaatcctgagatagtgtcggtgatcccaaacgccgtggatccaactgactttaccccggatcccttcagacggcatgattcgatcaccattgttgtggtgtccagactggtctaccggaagggaatcgatctcctgtcagggatcatccctgagctgtgtcaaaagtacccagacctgaacttcataatcggaggcgaggggcctaagcggattattctggaagaagtcagggaacggtaccagctccatgaccgtgtgagactgctcggtgcactggagcataaggacgttcgaaacgtgctggtccagggtcacatcttcctgaataccagcctgacggaagcgttctgcatggccatcgtcgaagccgcttcctgcggtctgcaagtcgtgtccacccgagtggggggaatcccggaagtgctgccggaaaacctgattatcctgtgcgagccgtccgtcaagtcattgtgtgagggcctcgagaaggcaatctttcagctgaagtccggaaccctgccggctccggaaaacatccacaacatcgtcaagaccttttacacctggcggaacgtggcggaacgcactgagaaggtgtacgatcgcgtttcagtcgaggcagtcctcccaatggacaagcgactcgaccggctgatctcgcactgtggacccgtgactggatacatttttgcactgttggccgtgttcaatttcctcttcttgatcttcctgcggtggatgaccccggacagcatcatagatgtcgccatcgacgcgacgggaccacgcggagcctggacgaataactattcgcactcgaaaagaggaggtgagaataacgagatctccgaaactagg

SEQ ID NO: 130561 - DNA, 1452 bp, Artificial Sequence
  derived and/or modified sequence
atggcatgcagaggaggagcaggcaacggtcatagggcctccgcgactctgtcccgagtcagcccaggctccctttacacctgtcgaactagaacccacaatatctgcatggtgtcggatttcttctacccgaacatgggtggggtggagtcacacatataccaactttcacagtgtcttattgaaagaggacataaagtgatcatcgtgactcatgcatacggcaataggaaaggaatcaggtacctcaccagcggactgaaagtgtactaccttcctctgaaggtgatgtataatcagtcgaccgcaactaccctgtttcattcgctcccactccttcggtacattttcgtccgggaacgggtcacgattatacatagccattcgtcgttttccgcaatggcacatgatgcactgttccacgcaaagaccatggggcttcagaccgtgttcaccgatcatagcctttttggatttgctgacgtgtcatcggtgttgaccaataaactgctgaccgtctcactgtgcgatactaaccacatcatttgtgtgtcgtacaccagcaaggaaaatactgttctgcgcgcggcccttaaccctgaaattgtttccgtgattcccaatgcggtggatcctactgactttacgccggacccatttcgcagacacgattccattactattgtggtggtgtcacggcttgtgtacagaaaaggaatcgacctgctgagcggcattattcccgagctgtgtcaaaagtacccagatttgaactttatcattggaggggagggccccaagagaatcattctcgaagaagtgagagaaagataccaactgcatgatagagtcagactgctgggtgcactggaacataaggacgtgcgaaacgtgcttgtgcaaggtcacattttcctgaatactagcctgactgaggcattctgtatggctatcgtggaggccgcatcctgtggcctgcaggtggtgtcgaccagagtgggcgggataccagaagtgctgcccgaaaacctgattatactgtgtgagccatcagtcaagtccctttgtgaagggctcgaaaaagcaatctttcaactgaagtcgggaaccctgccggcacctgaaaacatccacaatatcgtgaaaacgttctacacctggaggaacgtggcggaacgaactgaaaaggtgtacgatagagtgtcggtggaggcagtgttgccaatggataagcgacttgatagactgatctcccactgtggtccagtgacgggatacatatttgcactgctcgccgtgtttaactttttgtttttgatttttcttcgctggatgactccagattccattattgacgtggcaatcgacgcaacgggacccaggggcgcatggaccaacaattacagccattcaaagagaggtggggaaaacaacgaaatttcggagacgaga

SEQ ID NO: 130562 - DNA, 1452 bp, Artificial Sequence
  derived and/or modified sequence
atggcttgtcggggaggagcgggtaatggacatagggcgtccgcaaccttgtccagagtcagccccggatccctgtatacttgtcggacacggacccataacatctgcatggtctctgactttttttatccgaatatggggggagtagaatctcacatataccagctatctcagtgcctgatagagcggggacataaagttataatagtcactcatgcctatggcaacagaaaggggatccgctatctgacgtcaggattgaaggtctattatttacccttgaaagtgatgtataatcagtcaaccgccaccaccctgtttcactctctgcccttactgcgttatatcttcgtccgtgaacgcgtgacgattatacacagccacagctctttttctgccatggcccacgacgcactcttccatgctaagaccatgggcttgcagaccgtcttcacagatcacagtctttttggcttcgccgacgtctcctcagtcttgactaacaagctgttaacagtgtcattatgtgatacaaaccacatcatctgcgtttcatatacctctaaggagaacacagtgctacgcgctgctctgaaccctgaaatcgtaagtgttatccctaatgccgtggatcccaccgatttcaccccagacccttttcgccggcatgacagcatcaccatcgtagtcgttagccgcttggtgtaccggaaagggattgacctcctctcaggaataatccccgagttgtgtcagaagtacccggaccttaactttatcatcggcggggaaggaccaaagcgtatcattctcgaggaagtgcgggagcgctaccagcttcatgatcgggtcagactactgggagcgctggagcacaaggatgtccggaatgtgttggtacaggggcacatcttcttgaacacaagcctgaccgaggccttttgtatggctattgtggaagccgccagctgcgggctccaagtcgtgtccaccagggtcggaggcattcccgaggtgctgcccgagaatcttatcattttatgtgaacctagcgtgaaatccctttgcgagggcttggagaaagcaatttttcagttgaaatctggtaccctgccagctccagagaatattcacaatattgtcaaaaccttctatacatggaggaacgtggctgaacggacggagaaagtttatgacagggtgagcgttgaagctgtgcttcccatggataagaggctcgaccgactgatatcacattgtggtccggttaccggatatattttcgcactgcttgctgtcttcaactttttgtttctcatatttctcaggtggatgacccccgattcaatcatagacgtggcgattgatgcaaccgggccacgcggtgcttggacaaacaactactcccacagtaaaaggggcggcgaaaataacgaaatctctgagacgaga

SEQ ID NO: 130563 - DNA, 1452 bp, Artificial Sequence
  derived and/or modified sequence
atggcatgccgtggaggagcaggcaatggacatagagcatccgccactctgtcaagagtgtcccctggctccctttacacctgccggaccagaacccataacatctgcatggtgtcggactttttctaccccaacatgggaggggtcgaatcgcacatctaccagctgagccaatgtctcatagaacgtggacacaaagtgattattgtgacccatgcctacggaaaccgaaagggaattcgctaccttactagcggtttgaaagtgtactaccttccactcaaggtgatgtacaaccaatccaccgccactaccctctttcactcgttgccactcttgaggtacatctttgtccgagagcgcgtgaccattatccatagccattcgtcattctccgctatggcacatgatgcactgttccatgcaaagacgatgggattgcaaaccgtgtttaccgatcactcgctgtttggattcgctgatgtgtcctccgtgcttaccaataagttgctcactgtctcattgtgtgacacgaaccacataatctgtgtgagctacaccagcaaggaaaacacggtgcttcgagcagcacttaacccggaaatagtgtccgtgattccaaatgcagtggatcccactgattttactccagatccctttaggcggcatgactcaattactattgtcgtggtgagcagacttgtctatcgcaaaggaatcgaccttctgtcaggcattatcccagaactgtgccagaaatatcctgatctcaacttcatcataggcggtgagggtcccaagagaattatcttggaggaggttcgagaaaggtaccaattgcatgatcgagtgcggctccttggtgcactcgaacacaaggacgtgcggaacgtcctggtgcaaggacacatcttcctcaacacctcccttactgaggccttctgtatggccattgtcgaagcagcaagctgtggtctgcaagtggtgagcactagagtcgggggtatcccggaggtgctgccagaaaatctcattatactttgtgaaccttcggtcaagtctctgtgtgagggtctggaaaaagccatttttcagcttaagtccggcacccttcctgcaccagagaatattcataacattgtgaaaaccttttacacttggcggaacgtggcagaacgcactgaaaaggtttacgatagagtgtcagtggaggccgtgctccctatggacaagcgtctggacaggctcattagccattgtggaccggtgactgggtacattttcgctttgctcgcagtgtttaactttctgtttctgattttccttcgctggatgactcctgactctattatcgatgtggcaatcgacgcaaccggtcctcgcggagcttggaccaataactacagccacagcaagcggggcggcgaaaacaatgagatttccgaaaccaga

SEQ ID NO: 130564 - DNA, 1452 bp, Artificial Sequence
  derived and/or modified sequence
atggcttgccgcgggggggctggcaatggacatcgggcttcagccaccctgtctagggttagcccgggatccctctacacctgcaggacgcgcactcataatatctgtatggtgtcagatttcttctatccgaacatgggaggcgtggagagccatatttaccagctctctcagtgccttattgagaggggccataaagttattattgtgacccatgcgtacggcaatagaaagggcatccgctacctcacaagcggtctgaaagtttactacctgcccctgaaggtgatgtacaatcaatccacggccaccacgctgttccactccctgccactgcttcgatacattttcgttcgcgaaagggttaccatcatccattcccactctagcttcagcgctatggcccatgatgcgctgttccatgccaagacgatgggactccaaaccgtgtttaccgaccactctctgttcggtttcgctgacgtttctagcgtgctcaccaacaaactccttacagtttcgctgtgcgacacaaaccacataatatgtgttagctatactagtaaggaaaataccgtcttgagggctgccttgaatcccgaaatcgtgagcgtgatccctaacgctgtagacccaaccgatttcacccccgatccatttcgaagacatgactctatcaccattgtggtcgtgtcgaggctcgtttaccggaaagggattgacctgctgagcggtatcattcctgaactgtgccagaagtatccggacttaaattttatcattggaggtgaaggaccgaagcgcatcatcctggaggaagtgagagaacgttatcagcttcatgatcgggttcggcttttaggggcactcgagcacaaagatgtgagaaacgttctcgttcagggtcatatctttctgaatacttctctgacggaggccttctgtatggccatcgtggaggccgcttcatgcgggctgcaggtggtgtctacaagagttggaggtatccccgaggtgctcccagagaatctaataatcctgtgcgaaccgagcgtgaaatctttgtgtgagggactcgagaaggctatctttcagctgaagtctggcacccttcccgctcccgagaatatacacaatatagttaaaaccttttacacctggcgcaacgtggccgagcggaccgagaaggtctatgaccgggtgagcgtagaagcagtgcttcccatggacaagcgactcgacaggctcattagtcattgcggacctgtgaccggctatatcttcgccctcctcgccgtgtttaacttcctcttcctgatttttctaaggtggatgactcccgactcgattatcgacgtggcgatagacgcaaccggcccaagaggggcctggacgaacaattatagtcactccaagcggggaggcgagaacaacgaaatatctgaaacgcgg

SEQ ID NO: 130565 - DNA, 1452 bp, Artificial Sequence
  derived and/or modified sequence
atggcatgcaggggaggggccggaaatggacacagggcttccgcaaccctgtcacgagttagcccaggctcgctttacacttgtaggacccggacccacaatatttgtatggtgtctgatttcttctatcccaatatggggggggtagagtcccatatttatcagctcagtcagtgcctcatagagcgtggacacaaggtcattatcgtaacgcatgcctatggtaaccgaaaaggcataagatatcttacgagtggcctgaaagtgtattatctaccgcttaaggttatgtataaccagtccacggctacaactctttttcatagccttccactgctgcgatatatcttcgtgcgggaacgagtgacaatcatccattcacactcatctttttctgcaatggcccatgacgcgttgttccacgctaagaccatggggcttcagacagtattcactgaccacagcttgtttggatttgcggatgtgtcctctgttctgaccaataagctccttaccgtgagtctctgtgacaccaaccacattatttgtgtgagttacaccagcaaggagaacactgtgttacgcgcggcacttaaccctgagattgtgagtgtgataccaaatgccgtggatcctacagattttacccctgaccccttccgaaggcatgattccattacgatcgtcgttgtcagtcgcctcgtttaccgaaaaggcattgacttattgtctggaataataccggaactatgtcagaagtaccccgatctaaattttattattggtggagagggccccaagagaatcatcctcgaggaggttcgcgagagataccagctgcatgatagagttcgactgctcggtgccttggaacacaaggacgtgcgtaacgtgctcgtgcaggggcacatcttcctgaatactagtctgacagaggctttctgcatggccatcgtcgaagctgcgtcatgtggccttcaggtggtgtccacaagggtagggggtatcccagaggtactgccagagaatctgataattctctgcgagccctctgttaagtctctgtgcgaaggccttgaaaaagctatctttcagctgaagagtggtaccctgcccgccccggaaaatattcataacatcgtgaagacattctacacttggcggaacgttgccgaacggacagagaaagtttatgatagagtctcagtcgaggccgtgttgcctatggacaagcgactggatcgcctgataagccattgcggcccagtcacaggctatatctttgcgttgctcgctgtgtttaatttcctgtttttgatatttcttagatggatgacccccgactctattattgacgtggccatagatgccacggggcctaggggcgcatggaccaacaactactcgcatagtaaacgcgggggagaaaacaatgagatctccgaaacgcga

SEQ ID NO: 130566 - DNA, 1452 bp, Artificial Sequence
  derived and/or modified sequence
atggcctgcagaggtggagcgggaaacggacaccgcgcctcagctaccctgtcccgggtgtccccgggatcgctttacacctgccggactaggactcacaacatttgtatggtttccgacttcttctatccgaatatgggcggcgtggagtcgcacatctaccagctctcccagtgcctcatcgagaggggacacaaggtgattatcgtgacccatgcatacgggaacagaaagggtattcggtacctcaccagcggacttaaggtgtactatctgcccctgaaggtgatgtacaatcagtcaaccgcaactactctgttccactccctcccactgctgaggtatatcttcgtgcgggagcgggtgaccatcatccactcacattcatcgtttagcgcaatggcgcacgacgctctgtttcacgccaaaaccatgggtttgcagacggttttcaccgaccactccctcttcggcttcgccgacgtttcgtctgtcttgactaacaaactgctgaccgtctcgctttgcgacactaatcacatcatttgtgtgtcttacaccagcaaggaaaacaccgtgctccgggccgccctcaaccctgagatcgtctccgtgatcccaaacgcagttgatccaaccgattttacgccagaccccttcaggcggcacgattctatcaccatcgtggtggtgtccagactggtctaccgcaagggtatcgatttgctctccggaattatcccggaactgtgccaaaagtacccggacctgaacttcatcatcggaggggagggaccgaagcggatcattttggaggaggtgcgagaacgctaccagttgcatgaccgagtgagactcctgggggcactcgaacacaaggacgtccgaaacgtcctggtgcagggccacatcttcctgaacacttcattgactgaagcgttctgcatggcaattgtggaagctgcatcatgcggtctgcaggtcgtttcgactcgcgtgggcggcattccggaggtgctgcctgagaatttgatcatcctctgcgaaccgtcggtgaagtccttgtgtgaaggacttgaaaaggctatcttccagctgaagtcgggcaccttgcctgctcctgaaaacattcacaacatcgtgaaaactttttacacctggaggaacgtggcagagcgtaccgaaaaggtctacgacagggtgtccgtcgaagccgtgcttcctatggataagcgcctcgatcggctgatctcacactgcggacccgtgaccggatacatcttcgccttgctggccgtattcaatttcctgtttctcattttcctgcggtggatgactccggattcgatcatcgacgtggcgattgacgcgactggcccacggggcgcctggaccaataactactcgcattccaagagaggtggggaaaacaatgagatcagcgagactaga

SEQ ID NO: 130567 - DNA, 1452 bp, Artificial Sequence
  derived and/or modified sequence
atggcttgcaggggcggggccggcaatggacatagagcttctgccaccctttcaagagtgtcacctggatccctgtatacgtgcaggacaagaacccataatatatgcatggtatctgattttttctaccccaacatgggtggggtagaatcccacatctatcagctcagccaatgtcttatagagcgcggccataaggtgattatcgtcacccacgcttacgggaatcggaagggaattaggtacctgaccagtggcctaaaggtgtactatctgcctctgaaggtgatgtataaccagtcaaccgctaccaccctgtttcatagcctacccctgctgcgctatattttcgtccgggagagagttacaattatccatagccactccagtttttctgcaatggctcatgacgctctgtttcatgcaaagaccatgggtctccagacggtgtttacagaccatagcctgtttggctttgcagatgttagcagcgttcttaccaacaaattgttaaccgtgagtctgtgtgatacgaatcatattatctgcgtctcatatacctctaaggagaacaccgtactgcgcgctgcactgaatcccgagattgtgtccgtgatacctaacgcggtcgaccccactgacttcacccccgatccttttcgtcgccatgacagtatcacaatcgtggtggttagtcgcttggtctaccgaaagggcattgacctactctcgggtattatccctgagctttgtcagaaatacccagacctaaactttattatcggcggtgagggaccgaagaggatcatactcgaagaggtgcgcgaacgctaccagctgcacgacagggttcggctgctgggggccctggagcataaagacgtgagaaacgtcctcgtccaagggcatatcttcctaaacacctccttaacagaggcattctgcatggccattgtggaggctgcatcctgtggcctgcaggtcgttagtacacgggtggggggtatccctgaagtgcttcccgagaacctaatcatactgtgcgagccaagcgttaaatctctgtgcgagggcctggagaaggcgatattccagctcaagtccggtacattgcctgcgccagagaacattcacaacatagtcaaaaccttttacacctggaggaacgttgccgagagaaccgagaaagtctacgacagagtgtccgtcgaagccgttctgcccatggataagaggctggacagactgatctctcactgcggaccagtcaccggctatatatttgctcttctggctgtttttaacttcctgttcctcatctttttacggtggatgacgcccgatagcattattgatgtggcaattgacgcgactgggccccggggcgcgtggactaataactacagccactccaagagaggtggggagaataatgaaataagtgagacacgg

SEQ ID NO: 130568 - DNA, 1452 bp, Artificial Sequence
  derived and/or modified sequence
atggcctgcagaggtggagccggtaacggtcacagagctagcgccaccctgtcccgggtgtctcctggaagcctttatacctgccgcactcgcacacataatatctgcatggtgtctgacttcttctaccctaatatgggtggtgtggaaagccacatttaccaacttagccagtgcctcatcgaaaggggccacaaagtgatcattgttacccacgcttatggaaacaggaagggcatcagatacctgacgtcgggactgaaggtgtattatttgcctctcaaagtgatgtacaaccaaagcaccgcaaccaccctgtttcacagcctccccttactgagatatatctttgtccgcgagagggttactatcatccattcacatagcagcttcagcgccatggcacatgacgctctgtttcatgctaaaacaatgggcctgcagacagtgttcaccgaccatagcctattcggtttcgctgatgtctccagcgtgttgaccaacaagctgctcaccgtcagcctctgcgataccaaccacatcatctgtgtaagttataccagtaaagagaacactgtgctccgcgccgctctgaaccccgaaatagtgtccgtcatcccgaacgctgtcgaccctaccgacttcacccctgatcctttcaggcgtcacgatagcataactatagtggtggtatcacggctcgtgtaccgtaaaggaatcgacctgctgtcgggaatcattcctgaactgtgccaaaaatatcccgacctgaattttataatcgggggtgagggaccaaaaagaatcatattagaagaggtgcgcgaacgctaccaactgcacgatcgtgtgagactgctcggagctcttgaacataaggacgtaaggaacgtgctcgtgcagggtcacatcttcctcaacacaagcctgactgaagctttctgtatggccattgtcgaggccgctagctgcggccttcaggtggttagcacaagagtgggtggtatcccggaagttctccccgagaacttgatcatactctgtgagccatctgtcaaaagcctgtgcgagggtctggaaaaagccatctttcaacttaagagcggaacattgccggctcccgagaatatccacaacatcgtcaaaacgttttacacctggaggaacgttgcagagaggacagagaaggtctacgatagggttagtgtcgaagcagtgttgcctatggacaagagactggacagacttatttctcattgcggcccagttaccggctacatctttgcactgctcgctgtgttcaactttctgtttctgattttcctgagatggatgactcctgatagtattatcgacgtggcaatcgatgccacaggacccaggggggcctggaccaataattatagccacagcaaaaggggaggcgaaaataatgaaatcagcgagacacgg

SEQ ID NO: 130569 - DNA, 1452 bp, Artificial Sequence
  derived and/or modified sequence
atggcatgcaggggaggagccggcaacggtcatcgggcatcggccactctttctcgggtgtctcccggaagcctgtatacgtgtcgaaccagaacccataacatctgtatggtgtccgacttcttttaccccaatatgggcggggtggaatcacacatctaccagctttctcagtgcctgatagaaagaggacataaagtgataatcgtcacgcatgcctacggaaacagaaaaggcattaggtacctgacctccggtcttaaggtgtattacctcccactgaaggtgatgtacaatcagtcgaccgcaaccaccttgttccactccctgccacttctgcggtacatctttgttcgtgaacgggtgaccattatacactctcactcatcatttagcgcaatggcacacgatgcactctttcatgctaagacgatggggcttcaaactgtgtttactgaccatagcctgttcgggtttgcggacgtttcatcagtgctgacgaataagttgctgaccgtgtcgctttgtgataccaaccacattatctgcgtctcctacacttccaaagagaatactgtgctgcgtgcggcattgaacccggaaatcgtctcggtcatcccgaatgccgtcgaccctactgatttcacccctgacccattccggcggcacgatagcattacgattgtggtggtgtcgcgccttgtctaccgaaaaggaatcgaccttttgtccggtataatccctgaactttgccagaagtacccagatctgaactttatcattgggggtgagggacctaaacgaatcatacttgaagaagtgcgagaaaggtaccaactccatgatagagtgcgcctcctcggagcgttggaacataaggatgtcagaaacgtcctggtccagggacacattttccttaacacttccctgaccgaggcattttgtatggccattgtggaagccgcaagctgtggtttgcaagtggtcagcactcgcgtgggtggcatccctgaggtgcttccggagaatctcattattctgtgtgaacccagcgtcaagtcattgtgtgagggcttggaaaaggccatttttcaacttaagtccgggacccttccagcaccggaaaacattcacaatattgtcaagaccttttacacgtggcgcaacgtggccgagcgtactgaaaaagtgtacgatcgggtgagcgtcgaggcggtgctgcctatggataagagacttgacagactgattagccattgcggacctgtgactggttacatttttgctcttctggcagtgtttaactttttgttcctgatttttcttcggtggatgaccccagactccattatagatgtggctatcgatgcaaccggaccacgtggagcatggaccaacaattactcgcactcaaagagaggaggtgagaataacgagatatccgaaactcgg

SEQ ID NO: 130570 - DNA, 1452 bp, Artificial Sequence
  derived and/or modified sequence
atggcctgccggggtggcgcaggaaatggacatcgggcctccgccacacttagccgagtgtcaccaggatcactctatacctgcaggacacgtacccacaacatttgtatggtcagtgattttttttaccccaacatgggaggagtggagagtcacatttatcagctgtcacaatgtctcatcgaacggggacacaaggtgattatagttacccacgcctatggcaacagaaaggggatccgatacctaaccagcggactgaaagtgtactatctgccactgaaggtcatgtataaccaaagtacggcaaccactctcttccactctttacctctcctgaggtacattttcgtgcgtgagcgtgtgaccataatacacagccacagctcattttctgccatggcccacgatgccctgttccacgctaagacgatgggactgcagacagtcttcacagaccatagtctctttggatttgccgatgtgtccagtgtccttacgaataaactgctcaccgtgtcattgtgtgacacgaatcatatcatctgcgtcagctatactagcaaagagaacacagttctgagggcggctctgaacccagaaatcgtgtcagttatcccaaacgccgtggatccaactgattttacccctgatccattccgacgacacgatagcattaccatcgtggttgttagccgactggtctatcgtaaaggcatagaccttctctctggcattatacccgagctgtgccaaaagtatcccgatctcaactttataatcgggggcgaggggcctaaacgaattatcctggaggaagtccgcgaaaggtaccagctgcacgacagagtcaggctgctgggagctctggagcacaaagacgtgaggaacgtcctcgtccaagggcacatcttcctgaacaccagcctgacagaagcgttttgtatggcaatcgtggaggcagcctcttgcgggctgcaggttgtgagcaccagggtgggggggatcccggaagtgttgcctgagaatcttattatactctgtgagccttcggtgaaaagcctctgcgaaggcttagagaaggcaatcttccagctgaagtctggaaccctgcccgccccagaaaatatccacaacatcgtgaagaccttctacacctggagaaacgtagctgaacgcaccgaaaaagtctacgaccgggtcagcgtggaggcagtgctacctatggataagaggctggaccgattaatcagtcactgtggaccggtgaccggatacatctttgcgctgctggccgtgttcaactttctgtttctgattttcctgcgatggatgacacccgattccataattgatgtggctatcgacgccacaggacctcggggcgcatggactaacaactactcacactcaaaacgagggggagaaaataatgaaataagtgagacgcga

SEQ ID NO: 130571 - DNA, 1452 bp, Artificial Sequence
  derived and/or modified sequence
atggcatgccgtggtggggccggtaacggacatcgtgcaagcgcaaccttgagcagagtctcacctggatccctatatacttgtagaacccgaacacataatatttgcatggtaagcgactttttctatcctaatatggggggggtggagtcccacatctatcagttgtcacagtgtctgatcgagcgcggacacaaggtgatcatcgtaacacacgcctacgggaaccgcaaaggcattcggtatttaacctcaggtcttaaagtctactacttgcctttaaaggtcatgtataaccaaagcaccgccacaactctatttcatagcctgcctctgctgcggtatattttcgtgcgcgagcgggtcaccatcattcattcccactccagcttcagcgctatggcgcacgatgctcttttccatgctaagactatgggcctgcagactgtgttcactgatcatagtctgtttgggtttgcggatgtgtcaagtgtgctcactaataagttgttgactgttagtctgtgcgacacaaatcatatcatctgtgtgagttatacctcaaaggaaaacacagtgctgcgggccgctctcaacccagagatcgttagcgtgattcccaacgccgtcgatcctacagactttacacccgatccttttcgtcgtcacgattctatcaccattgtggtcgtcagccggctggtgtaccggaagggtatcgatttgctcagcggaattatccctgaactgtgccagaagtatcctgacctgaatttcatcatcggtggtgaaggccccaagagaataattcttgaagaagtcagagagaggtaccaattacacgacagagtaagactgctaggagctctcgagcacaaggatgtacgcaacgtgctggtccagggtcacatatttctaaacacaagtctcaccgaagccttctgtatggcaatcgtggaggcagcttcttgcggcctccaagtggtgagcactagagtgggagggatacccgaagtgttgcccgaaaacttaatcatcctttgcgagccaagtgttaagtcactttgcgagggcctcgagaaggccatattccagctgaagtctggcaccctccctgctccagagaatatccacaatatcgtcaaaacattctatacctggagaaacgtggctgaaaggactgaaaaggtctatgacagagtcagcgtcgaagcggtgttgcctatggacaagcggcttgatcggctgattagtcattgcggacccgtcaccggctacatcttcgccctcctggcggtcttcaacttcctgtttctcatcttcctgcgctggatgactccagatagtattattgacgtggctattgacgccactggtccgaggggtgcatggacaaataattattcccattctaagcgggggggtgagaacaacgaaatcagtgaaacgagg

SEQ ID NO: 130572 - DNA, 1452 bp, Artificial Sequence
  derived and/or modified sequence
atggcgtgccggggtggcgctggtaacggacaccgtgcgagcgccacactgagcagggtaagcccgggatccttgtatacgtgcaggacgcggacccataacatctgtatggtgtccgattttttctaccctaatatgggtggtgtggagtcacacatataccagctcagccagtgcctgatcgaacgcgggcacaaggttatcattgtgacacatgcctacgggaaccggaaggggatccgatatctaacttcaggtcttaaggtctactatcttccattgaaggtcatgtacaaccagagcacagctactacactgtttcactccctgcccctcttgcgttatattttcgttcgggagagagtaactattattcactcacattcatctttctctgccatggctcatgatgccctttttcacgctaagacaatgggactgcagactgtgtttaccgaccactcacttttcggctttgccgatgtatcttcagtgctcaccaacaagttgctcaccgtcagcctatgcgataccaatcatatcatttgcgtctcttatacttccaaggaaaacactgtattgagggcggctttgaatcctgagatcgtgagtgtaataccaaacgcggtggaccccactgacttcacccctgaccccttcaggcgtcatgattcgatcacgatcgtggttgttagtcgcctcgtatatagaaaaggcatagatcttctttctggcatcataccagaattgtgtcagaagtacccagaccttaattttatcattggcggagaggggccaaagcggatcatattggaggaggttcgcgagcgctatcagctgcacgacagggtgcggctgctaggcgccctcgagcacaaggacgtgcgaaatgtcctggtgcagggtcatattttcctgaacaccagcctcaccgaagcattttgcatggcaatcgtcgaagccgcatcttgtggtttgcaggtagtgtcaacaagggttggtgggatccccgaagtgctgcccgagaacctgatcatactctgtgaaccttctgtcaagtccctctgcgagggcttggaaaaagctattttccagcttaagtcgggaactctgccggctccagagaacattcataatatcgtcaaaaccttttatacctggcgaaacgtggccgagaggacggaaaaggtctatgaccgcgtgtcagttgaggcggtactgccaatggacaagagactggatagactcatcagccactgtggcccggtaacaggctacatcttcgccttgctggctgtcttcaatttcttatttctgatatttcttcggtggatgactcccgacagcattattgacgtggccatcgacgctacaggaccccgaggcgcgtggactaataactactcacatagcaagaggggcggcgagaacaacgaaatctccgaaactagg

SEQ ID NO: 130573 - DNA, 1452 bp, Artificial Sequence
  derived and/or modified sequence
atggcgtgtagagggggcgccgggaacggccatagggcttccgccaccctgtctcgtgtgagtcctggaagtctgtatacctgcagaacaagaacccataacatctgcatggtatcagacttcttctacccaaacatggggggcgtggaaagccacatataccagttatcacagtgtctgatcgaacgcggccataaagttatcatcgtgacccacgcctatgggaacaggaagggtatccgctatctcacttcaggcctaaaggtgtattatcttccactaaaagtgatgtataatcagtctacagctacaaccctgttccatagccttccgttgctgagatacatcttcgtgcgagaacgtgtgactatcattcattcccatagttcattttccgccatggcccatgacgcactgttccacgccaaaactatgggcctgcagactgtctttaccgaccattccctttttgggtttgccgacgtgtcatccgtgctcactaacaagttactgactgtgtcactgtgcgacacaaatcatatcatctgcgtcagctacacatcaaaagagaataccgtcctgcgtgctgcgctaaaccctgaaattgtgtcagttattcccaatgcggttgatcctaccgatttcacacctgatcctttccggagacacgatagcattacaattgtagtcgtatcccgccttgtgtacaggaagggcattgatctcctttctggcattatacctgagctttgtcagaaataccctgacctgaacttcatcattggaggggaaggaccgaaaaggatcattttagaggaagtcagggagcggtaccagctgcatgatagggttcgcctgctcggagccctggagcataaagatgtccgaaatgtgctggtccagggtcacatatttttgaacacatccctcaccgaagctttctgtatggccatagtagaagcagcgtcatgcggcctgcaggtcgtgtcaactcgagtagggggaattcctgaggtgctgccagaaaatttaatcatcttgtgtgagccctcggtcaaatcgctttgcgagggcctggaaaaggccatattccagttgaagtcaggcactttgccagcacccgaaaacattcacaatattgtaaagaccttctatacgtggcgcaacgtggctgaaaggactgagaaggtttatgacagagtcagcgttgaagcagtcctccccatggataagaggctggaccgattgatctcgcattgcggccctgttactgggtacatttttgctctactggcggtcttcaactttttgtttctaatcttcttacgctggatgacgcccgacagcattattgacgtagccattgacgccaccggcccacggggtgcctggacgaacaattactctcacagtaaaaggggcggcgagaacaatgagatctccgaaacgagg

SEQ ID NO: 130574 - DNA, 1452 bp, Artificial Sequence
  derived and/or modified sequence
atggcttgcagagggggcgctggtaacgggcacagggcctcagccactttatcccgagtgagtccaggttcgctctatacttgccgcactcgcacacataacatttgcatggtctcggattttttctatccgaatatggggggtgtcgaaagccatatttaccagctgtcacaatgcttgatagaaagaggacataaggtgattatcgttacacatgcctacgggaatagaaagggtattcgctatcttacttcaggactgaaagtatattatttgccactgaaagtaatgtataatcagagtaccgctacgacgttgtttcactcactcccgttacttcgatatatttttgtacgagagcgagttacgatcatccactcacatagttctttctccgcaatggctcatgatgcgctgtttcatgctaaaacgatgggcttacaaacggtctttacggaccatagcctgtttggcttcgccgatgtttcatcggtgttaacgaacaaacttcttactgtcagcttgtgtgacaccaaccatattatctgtgtgtcatacacaagcaaagaaaatacggtcctgcgcgcagccctgaatcctgaaattgtttcagtaatcccgaatgctgtggatccgaccgatttcacacctgatccgtttcgcagacatgattccattacaattgtcgtagtgagtcgtctagtttaccgtaaagggatagatttgcttagcggaatcattcctgaactttgccagaaatatccggatcttaattttattatcggcggtgagggacctaaacgtataatattagaggaagtaagggagagatatcagttgcatgatcgtgtcagactcttgggagcactggagcataaggacgtcagaaatgttttggttcaaggccacatttttttgaatacatctctcacggaagcattttgtatggccatcgtggaagcggcttcatgtggccttcaggttgtttcaacgagagtcggaggaattcctgaagtgctacctgagaatttaatcatcctttgtgaaccctccgtaaaatcgctttgtgagggccttgagaaagcgatttttcaattaaagtccggaacgttgccagctccggaaaacattcacaatattgttaagacgttttacacgtggcggaacgtcgccgagcgcacggagaaagtttacgatagggtgtcagtcgaagccgtactgccgatggataaacgccttgataggctaataagtcattgtggcccagtcacggggtacattttcgcgctgcttgcggtatttaattttctgttccttatcttcttaagatggatgacccccgattctatcattgatgttgcaatcgatgcaacgggacctcgcggggcgtggacaaataattactctcatagtaaacggggcggagaaaacaacgagatctccgaaacacgg

SEQ ID NO: 130575 - DNA, 1452 bp, Artificial Sequence
  derived and/or modified sequence
atggcttgtaggggcggcgccggtaatgggcatagggcctcagctaccctaagtcgcgtatcacccggatccttgtacacctgccgcacccgcacgcacaatatttgcatggtctctgacttcttctatcctaatatggggggcgtggagtcacacatttatcagttgtcccaatgcctgatagagcgaggtcacaaggtcatcatcgttacacacgcgtacggcaaccgaaaaggaatcaggtatctgacatctgggctcaaggtttattacttgcctctgaaagtcatgtataatcagtcaactgccactactctgtttcactctctgcctctcttacggtacatcttcgtgagggagagggttacaataatccactcacacagctccttttctgcaatggcccatgacgcccttttccacgccaaaaccatgggactccagactgtctttaccgatcactccctattcggctttgccgacgttagctctgtgctgactaacaaactgcttaccgtgtctctatgcgataccaaccacatcatttgtgtttcgtacacctccaaggaaaacactgtactccgcgcagcccttaatccggagattgtgtctgtaataccgaatgccgtggacccaaccgacttcacacccgacccgttccgacgacatgactctataaccatcgtggtagtatcacgcctggtctacaggaagggtatagatctgctgtcaggcatcatccccgagctttgccagaagtacccagatctcaattttattatcgggggcgaaggaccaaaaagaataattttggaagaagtgcgggagagataccagctgcacgacagggtgcgccttctgggggccctggagcacaaagatgtgagaaacgttctggttcagggccatatattcctcaacacaagtcttacagaagccttctgcatggctatcgtggaggcagctagctgcggcctacaggtggtcagtactcgagtgggaggaatccccgaggtgttgcctgagaatctaatcattctctgcgagccgtctgtcaagagcctttgcgaaggactggagaaggctatctttcagttaaaatccggcactttgcccgctcctgagaacattcacaacatcgtgaagacgttttatacctggcgcaacgtcgcggaacgaactgagaaggtgtatgatagagtgtccgtagaggccgtacttcctatggataagcgtctggataggctcatctcccactgtgggccggtgacgggatacatcttcgccctcctggcggtcttcaacttcctgtttctcatcttcctccgctggatgactcccgatagcataatcgatgtggctatcgatgccactggtcccagaggggcgtggactaacaactatagccattctaaacgcggcggtgaaaataacgagatcagtgagacccgg

SEQ ID NO: 130576 - DNA, 1452 bp, Artificial Sequence
  derived and/or modified sequence
atggcgtgccgcggtggtgcaggcaatggtcatcgcgcgagcgcaactctgtcgagagtttcccctgggtcactttacacttgcaggacccggacgcataacatttgtatggtatccgactttttctaccctaacatgggaggagtggagtcccacatttatcagctttctcaatgtctgattgagagaggacacaaggtgataattgtgacccatgcatacggcaataggaagggaattcgttacctgacctcaggtcttaaggtgtactacctcccactgaaggtcatgtacaaccagtcgacggcaaccactctctttcactcgctgcctttgctcagatacatttttgtcagggagcgggtcaccattatacattcccactcctcgttctcagccatggcacatgacgcactgtttcatgcaaaaactatggggcttcagaccgtgtttacggatcatagccttttcggtttcgcagatgtgtcatccgtcctgaccaacaaactccttactgtctcactctgtgacaccaaccacattatctgcgtctcatacacctcgaaggaaaacaccgttctgagggctgcactcaaccctgaaattgtgtctgtcatccctaatgctgttgaccctactgattttactccagatccatttcggcgccatgactcaatcaccatcgtcgtggtgagccggcttgtgtaccggaaagggattgatctgctgagtggcattataccggaactttgtcagaagtacccggatcttaacttcataatcggcggagaaggccccaagaggattattctcgaagaagtccgagaaagataccaactgcatgatcgcgtgagacttctgggggcgctggaacataaggatgtgagaaatgtgttggtgcaaggacacattttcctgaatacttccttgaccgaggcattttgcatggctatcgtggaagcagcgtcgtgtggcctccaagtggtcagtactagagtgggagggatcccagaagtgctgcccgagaacttgatcatcctgtgtgagccaagcgtcaagtccctgtgcgaaggactggaaaaggcgatatttcaactgaagtcaggaacccttcccgcacctgagaacattcacaacatagtgaaaacgttctatacttggagaaacgtggccgaacgcactgaaaaagtttacgaccgtgtcagtgttgaagccgtgcttcctatggataagcgtctcgatcgcctcatctctcattgtggtccagtaacgggatacatctttgcccttctggcggtattcaactttctgtttcttatctttctccggtggatgacccccgacagcattatcgatgtggcaattgatgccactgggccaaggggtgcttggaccaacaattactcgcattcgaagcgaggaggagagaataatgaaatttctgagactcgt

SEQ ID NO: 130577 - DNA, 1452 bp, Artificial Sequence
  derived and/or modified sequence
atggcctgtagaggcggcgccgggaacggacacagggcatccgcaactctgtcacgagtgtcaccaggttctctgtatacgtgtcgtacccgcacccacaatatctgcatggtttcggatttcttctacccgaacatgggcggtgttgaaagccacatctaccaactgtcacagtgtctcatcgagagaggtcataaggtgattatcgttactcatgcatacggtaacagaaaggggatcaggtaccttacttccggtctgaaggtgtactacctgcctcttaaggtcatgtataaccagagcaccgcaaccacgctgtttcactcgcttccattgctcaggtatatcttcgttagagaacgggtgacgattattcattctcattcatccttttccgcgatggcacatgatgcactttttcacgcgaaaacgatgggactgcaaaccgtctttactgaccattcgctctttggttttgccgacgtgtcctccgtgctgactaacaagctgcttaccgtgtcgctttgcgacaccaaccacattatctgtgtgagttacaccagcaaagaaaacactgtgctccgagcggcgcttaatccagagatagttagcgtaatcccaaacgcagtggatcccactgattttacccccgatccctttaggagacatgacagcatcaccatcgtcgttgtctcaagacttgtgtaccggaaggggattgacctcctcagcggcatcatacctgaactgtgccagaagtaccctgatctgaatttcattatcggcggcgaagggcctaaacgaattatcttggaagaggtgcgtgaaagataccaattgcatgatcgagtgcgtctgctgggcgcgcttgaacataaagacgtccgcaacgtccttgtgcagggccatatctttcttaacacctcgcttaccgaagcattctgtatggctatcgtggaagcagccagctgtggactgcaagtggtatcgactcgcgtgggtggaatccccgaagtgctgccagaaaacttgatcattctttgtgaacccagcgttaagtctctttgcgagggactggaaaaggcaattttccaactgaaaagcgggacccttcccgcccctgagaatattcataacatcgtcaagaccttctacacgtggcggaatgtggcagagagaacggagaaagtgtacgatcgagtgtcggtggaagcagtgctgccaatggataagagattggatagactcatttcacactgcggtcctgtcactgggtacatctttgcactgctcgcggtgtttaactttctgttcctcattttccttcgttggatgactccagactcgatcatcgacgtggcgattgatgccactggtcctcggggagcatggaccaacaattactcccactcgaagcgcggaggggagaacaacgagatttccgaaactaga

SEQ ID NO: 130578 - DNA, 1452 bp, Artificial Sequence
  derived and/or modified sequence
atggcatgccgcggaggagccggaaatggacatcgcgcttccgctactctatcccgggtatcacccgggtcactatacacatgtcgcacacgaacacacaacatatgcatggtatctgatttcttttatcccaacatggggggggtggaatcgcatatctaccagctgtcacagtgtctcatcgaacgaggacacaaagttataatagtgactcacgcctacgggaataggaaggggattcggtatttgacatctgggcttaaagtgtattatctccctctgaaagtaatgtacaaccaatctactgctacaacactttttcacagtctccctctgttgagatatatatttgtacgggaacgggtgacaattatccactcacacagttccttctcagctatggcacatgatgcactatttcacgccaaaactatgggacttcagactgtattcacagatcactccctatttgggtttgctgatgtgagttcagtgctaacaaacaagctcttaacagtctcactctgtgatacaaatcacattatatgtgtgtcctatacaagtaaagaaaatactgtcttgagggctgctctcaaccctgaaatagtctcagtgatccctaatgcggtggatcctacagatttcacacccgatccctttcgaaggcatgattcaataactatcgttgtggtctcccgacttgtataccgaaaaggaatagatctgctgtcaggaatcatacctgagctatgccagaaatatcccgatcttaactttataattggaggagaaggacctaaaaggatcatacttgaggaagtacgggaacgatatcagctccacgatcgcgtgagactcctgggggcccttgagcacaaagatgtgaggaatgtactagtccaggggcatatatttctaaacacatccctaactgaagccttctgtatggctatcgtcgaagcagcaagttgcgggctacaggtggtgtccactcgagtagggggaatccctgaagtactgcctgaaaatttgattatactgtgtgaaccgtcagtgaagtctttatgcgaagggctcgaaaaggccatcttccagctcaagtccgggacactacctgctcccgagaacatccacaatatcgtaaaaacattttacacatggcggaatgtggccgagcggacagaaaaagtgtatgatcgagtctcagtggaagcagtgcttcccatggataaacgattagatcggctgatcagtcactgtggacctgtcactggatacattttcgccctcttagcagtcttcaactttctttttctaattttcttaagatggatgactcctgattcaatcatcgacgtggctatagatgcaacagggccccggggagcttggacaaataactacagtcattcgaaacgaggaggagaaaacaatgaaatttcggaaactcga

SEQ ID NO: 130579 - DNA, 1452 bp, Artificial Sequence
  derived and/or modified sequence
atggcttgccgcggcggtgcaggtaatggtcatagagcaagcgcaaccctgagccgcgtctcccccggctctctgtacacctgcagaactcgcacccataacatttgtatggtatctgatttcttctaccccaacatgggaggagtggaatcccatatctatcaactgagccagtgccttatcgaaagaggccataaggtaatcattgtgactcacgcctacggaaatcgcaagggtatcagatatctcacgagcggactcaaggtttactacctgccgctgaaagtcatgtacaaccaatctacggccactaccctgtttcactctctccctctcctgcgctacatctttgtccgcgagcgcgtcacaattatccattctcactcttcattctctgccatggcccacgatgccttgttccacgccaagaccatgggactgcaaacagtcttcaccgatcacagcctttttggcttcgccgatgtctcctctgtgctcacaaacaagctgctcaccgtcagcctgtgcgatactaaccacatcatctgcgtgagttatacaagtaaggaaaacaccgtcctccgcgccgccctgaaccccgagatcgtctctgtgatccctaacgcggtcgatcccaccgacttcaccccggacccattcagaaggcatgattcaatcaccatagtggtcgtgagcagactggtgtacaggaagggcatagatctgttgagcggaattatcccagaactgtgccagaagtatcctgaccttaactttatcattggaggcgaaggtcctaagcgcattatcctggaagaggtccgcgaacgctaccaactccacgacagggtcagacttcttggtgctttggagcataaagatgtgcgcaacgtgcttgtccagggacatatcttcctcaacacaagcctgactgaggccttctgtatggcgatcgttgaagctgcatcctgcggattgcaagtggtgtctacaagagtaggcggtatacctgaggtactgcccgaaaatctgattatactctgcgagccctccgtgaagtctttgtgcgaaggtctcgaaaaggctatttttcagctgaaaagcggaaccctgcctgcacccgaaaatattcataacatagttaagacattctacacttggaggaacgttgccgaaagaactgaaaaagtgtacgatcgcgtctcagttgaagcagtgttgcctatggacaagagattggatcgcttgatctcccattgcggacctgtgaccggatacatattcgcgcttctcgccgttttcaacttcctcttcctgattttcctgaggtggatgactccggattcaatcatagatgtagcgatcgacgccactggtccaaggggagcatggactaacaactattctcatagtaagagaggaggtgaaaacaacgaaatctccgagacccgc

SEQ ID NO: 130580 - DNA, 1452 bp, Artificial Sequence
  derived and/or modified sequence
atggcatgtaggggcggcgctggcaatggccacagagcttccgcgacgttatctcgtgtctctcccgggtctctgtacacttgccgcacccggacacataacatctgcatggtgtcagacttcttctacccgaacatgggcggagtggagagccatatctaccaactcagtcaatgccttattgagagaggacacaaggttataattgtgacccatgcatacggaaacaggaaaggaatcagatacttgacctccgggctcaaggtgtactatctgcctctgaaagtcatgtacaaccagagcacagccacgacactgtttcacagcttacccctactcaggtacatcttcgtgcgcgagcgagtgacgatcatccactcccattcaagtttttcggccatggcgcacgatgctctgttccacgcaaaaacaatgggactgcaaaccgtctttactgaccactcactctttggattcgctgacgtgtcaagcgtacttacaaacaagctgctgactgtgtcattgtgtgatactaatcatatcatatgcgtaagctacacctctaaagagaatacggtcctccgagccgccctgaatcctgagattgtgagcgtcatcccaaacgctgtggatccgacggattttacgcctgacccgtttcggagacatgactccataacaatcgtggttgtgtcaagactggtctatcggaaaggcatagacctcctctctggaatcatcccggaactatgccagaagtatcccgatttgaactttataattggaggagagggcccgaaacggatcattctggaggaggtgagagagaggtaccaactgcatgacagagtgcgtctgctcggagccctggagcacaaagatgtgcgaaacgtgctagtgcagggccatatcttcctgaacaccagcttaacagaggccttttgcatggccatagtggaggccgcatcgtgtgggcttcaggtggtgagcactagggtagggggtatccctgaagtgttgcctgagaacctgattatactgtgcgaaccatcagtgaagtcactgtgcgaaggtctggagaaagcaatcttccaactcaaatcaggcactttgccggccccagagaacatccacaacatcgtaaaaaccttctatacctggagaaacgtcgcagagaggacagaaaaggtgtatgaccgcgtctctgtggaagctgtgttaccaatggataaaagactggaccggcttatcagtcactgcggccctgtgaccggctatatatttgccctgctggccgtgttcaatttcttgttcctcattttcctgagatggatgaccccagattcaatcatcgatgtggccattgatgctaccggacctcgaggtgcttggacaaacaactattcccattccaagaggggcggcgagaacaacgaaatcagtgagacacgg

SEQ ID NO: 130581 - DNA, 1452 bp, Artificial Sequence
  derived and/or modified sequence
atggcatgccgcggaggcgcaggaaacggtcaccgcgcatctgctacgctgagtcgggtcagcccgggaagcctgtatacctgcagaactagaacccataacatctgtatggtgtcagattttttctatccaaacatgggaggtgttgagagtcatatctaccagctgtcccaatgcctcattgaaaggggacacaaggtgatcattgtaacccacgcttatggaaaccgaaaagggatccgttaccttaccagcgggttgaaagtgtactacctgccattgaaagttatgtacaatcagtcgacagctacaaccctttttcatagccttcccctgttgaggtatattttcgttagagaaagggtgactatcattcacagccacagcagcttcagcgcaatggctcacgacgccttgtttcacgccaagacgatgggacttcagacagtgttcaccgaccactcactgttcggcttcgccgatgtgagtagcgtcttgaccaacaaacttctcaccgtttcactctgcgacaccaaccacattatttgcgtttcttacactagcaaggaaaataccgtactgcgcgccgcccttaacccagagatcgtatctgtcatccccaacgcagtggatcctaccgattttactccggatccttttaggaggcatgatagcatcactatcgtggtagttagccgcctcgtgtataggaagggcatcgaccttctttcaggaattatccccgagctctgccagaaatatccagatctgaacttcattatcggcggcgagggccctaagaggatcattctggaggaggtgagagagaggtaccaacttcatgatagagtgagactgctgggggccttggagcacaaggatgtgcgcaacgtattggtacagggccacatctttctcaacacctcattgaccgaagctttctgcatggctatcgtggaggcagcgagctgtggacttcaggtcgtttcaacgcgggtggggggcatccccgaggtgttaccagagaaccttatcatcctttgcgaaccaagcgttaaaagtctgtgcgaagggctcgagaaggccatctttcagctgaagtctggcaccttgccagcacctgagaatatacacaacatcgtaaaaacattctacacctggcggaacgtggctgagcggacagagaaagtttacgacagggtctccgttgaagcagtacttcccatggataagcggttggacagacttattagtcactgcggaccagtgaccggctacatctttgcacttctggctgtcttcaattttctgttcctgatattcctgcggtggatgacccccgactcaatcatagatgtggctatcgacgcaacaggtcctagaggagcatggacaaacaactattctcatagcaagcggggaggggaaaataatgagatctcagagaccaga

SEQ ID NO: 130582 - DNA, 1452 bp, Artificial Sequence
  derived and/or modified sequence
atggcctgccgtggcggtgcaggtaatggacaccgcgcgtcagcaaccctcagcagggtatctcctggctccttatatacatgcaggaccaggactcacaatatctgcatggtatccgattttttctaccctaacatggggggcgtggaatcccatatctaccagctgtcccagtgtctgatcgagagaggccataaagtgatcattgtgacccacgcttatgggaaccgaaaaggcattagatacctcacatccggcttgaaggtctactacctgccgcttaaggtgatgtacaatcagtccaccgccactactctgtttcattcgctacctctgctccgttatatcttcgtccgggagagggtaaccatcatccactctcacagctcattttctgcaatggcccacgatgctttattccacgcaaagaccatgggtctccaaaccgtatttacagatcacagcctcttcggattcgcggatgtatcatccgttcttaccaataagttactgaccgtatccctgtgcgacactaatcacatcatatgtgtctcatacacctccaaagagaacaccgtactccgcgccgccctgaaccccgagattgtcagcgtaatccccaatgcggtggatcccaccgacttcacccccgatccctttaggcggcatgacagcatcacgattgtggttgtgagccgcctggtgtataggaaaggcatcgatctgttaagcggaatcatccccgagctgtgtcagaagtaccccgacctaaacttcatcataggtggcgaggggccaaaacggataattttagaagaagttagggaaagataccagctccatgaccgggtgcggttactgggagctctagaacataaagacgtccggaacgtgctcgtgcagggacacatcttcctgaacacatcgctgactgaggctttttgcatggccatagtagaggccgccagctgcggtctccaggtggtgtctaccagggtaggcggaattccagaagtgctccctgagaatcttattattctgtgtgagccaagcgtgaagagcctgtgtgaggggctcgagaaggcaatctttcagctaaagtctggtacactgccagctccagagaacatacacaatatcgtaaagaccttctatacgtggagaaacgtggctgaacggactgaaaaggtatatgatagagtatcagtagaggcagtcctgcccatggataaacggcttgaccggctgatatcccactgcggaccagtcactggttatatattcgcactgttggccgtgtttaactttctgtttctaatctttttgagatggatgactcctgatagcattatcgatgtggctatcgatgctaccgggcctcgcggcgcgtggaccaacaattacagtcactctaagcggggaggggaaaataatgaaattagcgagaccaga

SEQ ID NO: 130583 - DNA, 1455 bp, Artificial Sequence
  derived and/or modified sequence
atggcctgcagaggcggcgccggcaacggccacagagccagcgccaccctgagcagagtgagccccggcagcctgtacacctgcagaaccagaacccacaacatctgcatggtgagcgacttcttctaccccaacatgggcggcgtggagagccacatctaccagctgagccagtgcctgatcgagagaggccacaaggtgatcatcgtgacccacgcctacggcaacagaaagggcatcagatacctgaccagcggcctgaaggtgtactacctgcccctgaaggtgatgtacaaccagagcaccgccaccaccctgttccacagcctgcccctgctgagatacatcttcgtgagagagagagtgaccatcatccacagccacagcagcttcagcgccatggcccacgacgccctgttccacgccaagaccatgggcctgcagaccgtgttcaccgaccacagcctgttcggcttcgccgacgtgagcagcgtgctgaccaacaagctgctgaccgtgagcctgtgcgacaccaaccacatcatctgcgtgagctacaccagcaaggagaacaccgtgctgagagccgccctgaaccccgagatcgtgagcgtgatccccaacgccgtggaccccaccgacttcacccccgaccccttcagaagacacgacagcatcaccatcgtggtggtgagcagactggtgtacagaaagggcatcgacctgctgagcggcatcatccccgagctgtgccagaagtaccccgacctgaacttcatcatcggcggcgagggccccaagagaatcatcctggaggaggtgagagagagataccagctgcacgacagagtgagactgctgggcgccctggagcacaaggacgtgagaaacgtgctggtgcagggccacatcttcctgaacaccagcctgaccgaggccttctgcatggccatcgtggaggccgccagctgcggcctgcaggtggtgagcaccagagtgggcggcatccccgaggtgctgcccgagaacctgatcatcctgtgcgagcccagcgtgaagagcctgtgcgagggcctggagaaggccatcttccagctgaagagcggcaccctgcccgcccccgagaacatccacaacatcgtgaagaccttctacacctggagaaacgtggccgagagaaccgagaaggtgtacgacagagtgagcgtggaggccgtgctgcccatggacaagagactggacagactgatcagccactgcggccccgtgaccggctacatcttcgccctgctggccgtgttcaacttcctgttcctgatcttcctgagatggatgacccccgacagcatcatcgacgtggccatcgacgccaccggccccagaggcgcctggaccaacaactacagccacagcaagagaggcggcgagaacaacgagatcagcgagaccagatag

SEQ ID NO: 130584 - protein, 219 aa, Artificial Sequence
  derived and/or modified sequence
MKDNDIKRLLYTHLLCIFSIILSVFIPSLFLENFSILETHLTWLCICSGFVTAVNLVLYLVVKPNTSSKRSSLSHKVTGFLKCCIYFLMSCFSFHVIFVLYGAPLIELALETFLFAVILSTFTTVPCLCLLGPNLKAWLRVFSRNGVTSIWENSLQITTISSFVGAWLGALPIPLDWERPWQVWPISCTLGATFGYVAGLVISPLWIYWNRKQLTYKNN

SEQ ID NO: 130585 - DNA, 660 bp, Artificial Sequence
  derived and/or modified sequence
atgaaggacaatgatatcaaaagactcctgtacacccaccttttatgtatcttttcaattattctctctgtgttcatcccatccctgtttttggagaatttcagcatactcgaaacccacctgacctggctgtgcatttgttctgggtttgtgacagccgtgaatctggtcctgtacctcgtggtcaaacccaatacatcgagtaaacgctcctccttgtcccacaaggttactggcttcctgaaatgttgcatatactttctaatgtcctgtttcagtttccatgtgatctttgtactctatggcgctccccttattgaactggccctggagaccttcctgtttgcggtgatcctgtctacgttcactacagttccatgtctatgcctgcttgggcccaacctcaaagcatggcttagggtgttctcacgaaatggggtcacaagtatctgggagaactctctgcaaatcacaacaatatcgtcattcgtcggggcatggctgggcgctcttcccattccgcttgattgggaacggccatggcaagtgtggccaatctcctgtacccttggagctacttttgggtacgtggctggtctagtaatatctcccctctggatttattggaatcgcaagcaactgacctataagaataattag

SEQ ID NO: 130586 - DNA, 660 bp, Artificial Sequence
  derived and/or modified sequence
atgaaggacaatgacatcaagaggctgctgtacacccacctgctgtgcatcttcagcatcatcctgtctgtgttcatccccagcctcttcctggagaacttcagcatcctggagacccacctgacctggctgtgcatctgcagcggctttgtgacagctgtgaacctggtgctgtacctggtggtgaagcccaacaccagcagcaagaggagcagcctgagccacaaggtgacaggcttcctgaagtgctgcatctacttcctgatgagctgcttctccttccacgtgatctttgtgctgtatggagcccccctcatcgagctggccctggagaccttcctgtttgctgtgatcctgagcaccttcaccaccgtgccctgcctgtgcctgctgggccccaacctgaaggcctggctgcgggtcttcagcagaaatggagtgaccagcatctgggagaacagcctgcagatcaccaccatcagcagctttgtgggcgcctggctgggcgccctgcccatccccctggactgggagcggccctggcaggtgtggcccatcagctgcaccctgggcgccaccttcggctacgtggccggcctggtgatcagccccctgtggatctactggaacaggaagcagctgacctacaagaacaactag

SEQ ID NO: 130587 - DNA, 660 bp, Artificial Sequence
  derived and/or modified sequence
atgaaggacaacgacatcaagcggctgctgtacacccacctgctgtgtatattcagtataattttgtcagtgtttataccatcactgtttctagaaaactttagcattctcgagacgcacttaacctggctctgtatatgtagcgggttcgtgacagctgttaacctggtcctttacctcgtcgtcaagccaaataccagttctaaaagatctagcctctctcataaggttacagggttcttgaaatgctgtatatatttcctgatgtcgtgtttttccttccacgttatcttcgtcctgtatggagctcctctgatcgagctggcacttgaaacattcttatttgccgtaattttatccacgttcacaacagtcccttgcctgtgtctgctgggtccaaacctcaaggcttggctccgagtcttctcccggaatggggtgacctctatttgggagaattctctgcagattacaacaataagcagctttgttggcgcatggttaggcgccttacccatcccgcttgactgggagcgtccatggcaagtatggcccatcagctgtaccctgggggctacgtttggatacgtcgcaggactcgtaatcagccctctgtggatctactggaaccggaaacagctaacctacaagaacaactag

SEQ ID NO: 130588 - DNA, 1372 bp, Artificial Sequence
  derived and/or modified sequence
ttttgcccgcccctccctttctgcgactggctgttaggcgtgggtctccgccccacagccctgcgcctgcgcgtgggcctgggccgcccgtcgtacctgatggtaggaggcagtagttccccgcttcccttccgcgggagggagagttagctagccatccaagaaaacaccatgaaagataacgatatcaagagactactgtatacccatcttttatgcatattttcaattatcctaagtgtcttcattccatcactcttcttggagaacttctcaatattggaaacacacttgacatggttgtgcatctgttctggttttgtaactgctgtcaatctagtactatatttagtagtgaaaccaaatacatcctctaaaagaagttcattatcacacaaggtaactggatttttgaaatgctgtatctactttcttatgtcttgtttctcctttcatgtaatttttgttctgtatggagcaccactgatagagttggcattggaaacatttttatttgcagttattttgtctacttttactactgtgccttgcttatgtttgttaggaccaaacctcaaagcatggctaagagtgttcagtagaaatggagttacatccatatgggagaatagtctccagatcactacaatttctagctttgtaggagcatggcttggagcacttcctattccactggattgggaaagaccatggcaggtatggcccatctcctgtacgcttggagcgacctttggctacgtggctggccttgttatttcaccactctggatatactggaatagaaagcaacttacatacaagaacaattaactggagcaaagggagatatttctttgtgcagattctgtaagggctgggcagaaatgtgtatggtcaaagccaagcagttccatttacagctctgttttttacgtagttacaacatgatgtgattgtagctttttaaactatgaaacccctgagagattgtaccttctagttgaaataaagtatttataatagattgtggcttcagatgctgcttactgcttcttaaacctttaaggaacattcttaatacactttatagaattctgaggacaggttttgttttctttcaagttttgaactgcttcattacctataaaaggtctgggtatagctgtagcatttcatttgctttctgagagaaatggacagtttccttggccactgaagatgtttctcacgtaattaaacaacagtttatacatcttgatcctattcttttttttacagtgtgtttctttggagttaaaatggctatgatagcctcatcaaaaacagtcttcaatcccttctgggttaaagctgaacattccacatagcagca

SEQ ID NO: 130589 - DNA, 1061 bp, Artificial Sequence
  derived and/or modified sequence
gcgcgtgggcctgggccgcccgtcgtacctgatggtaggaggcagtagttccccgcttcccttccgcgggagggagagttagctagccatccaagaaaacaccatgaaagataacgatatcaagagactactgtatacccatcttttatgcatattttcaattatcctaagtgtcttcattccatcactcttcttggagaacttctcaatattggaaacacacttgacatggttgtgcatctgttctggttttgtaactgctgtcaatctagtactatatttagtagtgaaaccaaatacatcctctaaaagaagttcattatcacacaaggtaactggatttttgaaatgctgtatctactttcttatgtcttgtttctcctttcatgtaatttttgttctgtatggagcaccactgatagagttggcattggaaacatttttatttgcagttattttgtctacttttactactgtgccttgcttatgtttgttaggaccaaacctcaaagcatggctaagagtgttcagtagaaatggagttacatccatatgggagaatagtctccagatcactacaatttctagctttgtaggagcatggcttggagcacttcctattccactggattgggaaagaccatggcagatgacagtagaaagaaaacgtagcacttatagatctctccatgtaccctgcagggggcttggtactgtgaaatgagtaacttaatcctgacaaccgtagtgcaaggtatggcccatctcctgtacgcttggagcgacctttggctacgtggctggccttgttatttcaccactctggatatactggaatagaaagcaacttacatacaagaacaattaactggagcaaagggagatatttctttgtgcagattctgtaagggctgggcagaaatgtgtatggtcaaagccaagcagttccatttacagctctgttttttacgtagttacaacatgatgtgattgtagctttttaaactatgaaacccctgagagattgtaccttctagttgaaataaagtatttataataga

SEQ ID NO: 130590 - DNA, 660 bp, Artificial Sequence
  derived and/or modified sequence
atgaaagataacgacatcaagcggctgctgtatacacaccttctgtgcatctttagcatcatcctatccgtttttatcccttctctgtttctcgaaaactttagtatcttagaaactcacctaacctggttgtgcatatgcagcggctttgtcaccgcagtgaacctagttctttatctcgtagtgaaacccaacacatcttctaaacggtccagtctcagccacaaggtgaccgggttccttaaatgctgtatctactttttaatgagctgttttagcttccatgtgatttttgttctgtacggtgccccactgatcgagctggctctcgaaacgttcttattcgccgtcatcctgtccacgtttaccacagtgccatgcctttgccttctgggacccaatctgaaggcatggttgagagtctttagtagaaacggcgtgacttcgatctgggagaacagtctccagatcactactatttcgagctttgttggcgcttggctgggcgcattaccaattccccttgattgggagcgcccatggcaagtttggcccatctcatgcacccttggtgcgactttcgggtatgtggctggtcttgtgatttccccattgtggatatactggaaccgaaagcagctcacctataagaataactag

SEQ ID NO: 130591 - DNA, 660 bp, Artificial Sequence
  derived and/or modified sequence
atgaaggacaacgacatcaagagactgctgtacacccacctgctgtgcatcttcagcatcatcctgagcgtgttcatccccagcctgttcctggagaacttcagcatcctggagacccacctgacctggctgtgcatctgcagcggcttcgtgaccgccgtgaacctggtgctgtacctggtggtgaagcccaacaccagcagcaagagaagcagcctgagccacaaggtgaccggcttcctgaagtgctgcatctacttcctgatgagctgcttcagcttccacgtgatcttcgtgctgtacggcgcccccctgatcgagctggccctggagaccttcctgttcgccgtgatcctgagcaccttcaccaccgtgccctgcctgtgcctgctgggccccaacctgaaggcctggctgagagtgttcagcagaaacggcgtgaccagcatctgggagaacagcctgcagatcaccaccatcagcagcttcgtgggcgcctggctgggcgccctgcccatccccctggactgggagagaccctggcaggtgtggcccatcagctgcaccctgggcgccaccttcggctacgtggccggcctggtgatcagccccctgtggatctactggaacagaaagcagctgacctacaagaacaactag

SEQ ID NO: 130592 - protein, 1686 aa, Artificial Sequence
  derived and/or modified sequence
MAQISSNSGFKECPSSHPEPTRAKDVDKEEALQMEAEALAKLQKDRQVTDNQRGFELSSSTRKKAQVYNKQDYDLMVFPESDSQKRALDIDVEKLTQAELEKLLLDDSFETKKTPVLPVTPILSPSFSAQLYFRPTIQRGQWPPGLPGPSTYALPSIYPSTYSKQAAFQNGFNPRMPTFPSTEPIYLSLPGQSPYFSYPLTPATPFHPQGSLPIYRPVVSTDMAKLFDKIASTSEFLKNGKARTDLEITDSKVSNLQVSPKSEDISKFDWLDLDPLSKPKVDNVEVLDHEEEKNVSSLLAKDPWDAVLLEERSTANCHLERKVNGKSLSVATVTRSQSLNIRTTQLAKAQGHISQKDPNGTSSLPTGSSLLQEVEVQNEEMAAFCRSITKLKTKFPYTNHRTNPGYLLSPVTAQRNICGENASVKVSIDIEGFQLPVTFTCDVSSTVEIIIMQALCWVHDDLNQVDVGSYVLKVCGQEEVLQNNHCLGSHEHIQNCRKWDTEIRLQLLTFSAMCQNLARTAEDDETPVDLNKHLYQIEKPCKEAMTRHPVEELLDSYHNQVELALQIENQHRAVDQVIKAVRKICSALDGVETLAITESVKKLKRAVNLPRSKTADVTSLFGGEDTSRSSTRGSLNPENPVQVSINQLTAAIYDLLRLHANSGRSPTDCAQSSKSVKEAWTTTEQLQFTIFAAHGISSNWVSNYEKYYLICSLSHNGKDLFKPIQSKKVGTYKNFFYLIKWDELIIFPIQISQLPLESVLHLTLFGILNQSSGSSPDSNKQRKGPEALGKVSLPLFDFKRFLTCGTKLLYLWTSSHTNSVPGTVTKKGYVMERIVLQVDFPSPAFDIIYTTPQVDRSIIQQHNLETLENDIKGKLLDILHKDSSLGLSKEDKAFLWEKRYYCFKHPNCLPKILASAPNWKWVNLAKTYSLLHQWPALYPLIALELLDSKFADQEVRSLAVTWIEAISDDELTDLLPQFVQALKYEIYLNSSLVQFLLSRALGNIQIAHNLYWLLKDALHDVQFSTRYEHVLGALLSVGGKRLREELLKQTKLVQLLGGVAEKVRQASGSARQVVLQRSMERVQSFFQKNKCRLPLKPSLVAKELNIKSCSFFSSNAVPLKVTMVNADPMGEEINVMFKVGEDLRQDMLALQMIKIMDKIWLKEGLDLRMVIFKCLSTGRDRGMVELVPASDTLRKIQVEYGVTGSFKDKPLAEWLRKYNPSEEEYEKASENFIYSCAGCCVATYVLGICDRHNDNIMLRSTGHMFHIDFGKFLGHAQMFGSFKRDRAPFVLTSDMAYVINGGEKPTIRFQLFVDLCCQAYNLIRKQTNLFLNLLSLMIPSGLPELTSIQDLKYVRDALQPQTTDAEATIFFTRLIESSLGSIATKFNFFIHNLAQLRFSGLPSNDEPILSFSPKTYSFRQDGRIKEVSVFTYHKKYNPDKHYIYVVRILREGQIEPSFVFRTFDEFQELHNKLSIIFPLWKLPGFPNRMVLGRTHIKDVAAKRKIELNSYLQSLMNASTDVAECDLVCTFFHPLLRDEKAEGIARSADAGSFSPTPGQIGGAVKLSISYRNGTLFIMVMHIKDLVTEDGADPNPYVKTYLLPDNHKTSKRKTKISRKTRNPTFNEMLVYSGYSKETLRQRELQLSVLSAESLRENFFLGGVTLPLKDFNLSKETVKWYQLTAATYL

SEQ ID NO: 130593 - protein, 1306 aa, Artificial Sequence
  derived and/or modified sequence
MAAFCRSITKLKTKFPYTNHRTNPGYLLSPVTAQRNICGENASVKVSIDIEGFQLPVTFTCDVSSTVEIIIMQALCWVHDDLNQVDVGSYVLKVCGQEEVLQNNHCLGSHEHIQNCRKWDTEIRLQLLTFSAMCQNLARTAEDDETPVDLNKHLYQIEKPCKEAMTRHPVEELLDSYHNQVELALQIENQHRAVDQVIKAVRKICSALDGVETLAITESVKKLKRAVNLPRSKTADVTSLFGGEDTSRSSTRGSLNPENPVQVSINQLTAAIYDLLRLHANSGRSPTDCAQSSKSVKEAWTTTEQLQFTIFAAHGISSNWVSNYEKYYLICSLSHNGKDLFKPIQSKKVGTYKNFFYLIKWDELIIFPIQISQLPLESVLHLTLFGILNQSSGSSPDSNKQRKGPEALGKVSLPLFDFKRFLTCGTKLLYLWTSSHTNSVPGTVTKKGYVMERIVLQVDFPSPAFDIIYTTPQVDRSIIQQHNLETLENDIKGKLLDILHKDSSLGLSKEDKAFLWEKRYYCFKHPNCLPKILASAPNWKWVNLAKTYSLLHQWPALYPLIALELLDSKFADQEVRSLAVTWIEAISDDELTDLLPQFVQALKYEIYLNSSLVQFLLSRALGNIQIAHNLYWLLKDALHDVQFSTRYEHVLGALLSVGGKRLREELLKQTKLVQLLGGVAEKVRQASGSARQVVLQRSMERVQSFFQKNKCRLPLKPSLVAKELNIKSCSFFSSNAVPLKVTMVNADPMGEEINVMFKVGEDLRQDMLALQMIKIMDKIWLKEGLDLRMVIFKCLSTGRDRGMVELVPASDTLRKIQVEYGVTGSFKDKPLAEWLRKYNPSEEEYEKASENFIYSCAGCCVATYVLGICDRHNDNIMLRSTGHMFHIDFGKFLGHAQMFGSFKRDRAPFVLTSDMAYVINGGEKPTIRFQLFVDLCCQAYNLIRKQTNLFLNLLSLMIPSGLPELTSIQDLKYVRDALQPQTTDAEATIFFTRLIESSLGSIATKFNFFIHNLAQLRFSGLPSNDEPILSFSPKTYSFRQDGRIKEVSVFTYHKKYNPDKHYIYVVRILREGQIEPSFVFRTFDEFQELHNKLSIIFPLWKLPGFPNRMVLGRTHIKDVAAKRKIELNSYLQSLMNASTDVAECDLVCTFFHPLLRDEKAEGIARSADAGSFSPTPGQIGGAVKLSISYRNGTLFIMVMHIKDLVTEDGADPNPYVKTYLLPDNHKTSKRKTKISRKTRNPTFNEMLVYSGYSKETLRQRELQLSVLSAESLRENFFLGGVTLPLKDFNLSKETVKWYQLTAATYL

SEQ ID NO: 130594 - DNA, 5061 bp, Artificial Sequence
  derived and/or modified sequence
atggcccagatcagcagcaacagcggcttcaaggagtgccccagcagccaccccgagcccaccagagccaaggacgtggacaaggaggaggccctgcagatggaggccgaggccctggccaagctgcagaaggacagacaggtgaccgacaaccagagaggcttcgagctgagcagcagcaccagaaagaaggcccaggtgtacaacaagcaggactacgacctgatggtgttccccgagagcgacagccagaagagagccctggacatcgacgtggagaagctgacccaggccgagctggagaagctgctgctggacgacagcttcgagaccaagaagacccccgtgctgcccgtgacccccatcctgagccccagcttcagcgcccagctgtacttcagacccaccatccagagaggccagtggccccccggcctgcccggccccagcacctacgccctgcccagcatctaccccagcacctacagcaagcaggccgccttccagaacggcttcaaccccagaatgcccaccttccccagcaccgagcccatctacctgagcctgcccggccagagcccctacttcagctaccccctgacccccgccacccccttccacccccagggcagcctgcccatctacagacccgtggtgagcaccgacatggccaagctgttcgacaagatcgccagcaccagcgagttcctgaagaacggcaaggccagaaccgacctggagatcaccgacagcaaggtgagcaacctgcaggtgagccccaagagcgaggacatcagcaagttcgactggctggacctggaccccctgagcaagcccaaggtggacaacgtggaggtgctggaccacgaggaggagaagaacgtgagcagcctgctggccaaggacccctgggacgccgtgctgctggaggagagaagcaccgccaactgccacctggagagaaaggtgaacggcaagagcctgagcgtggccaccgtgaccagaagccagagcctgaacatcagaaccacccagctggccaaggcccagggccacatcagccagaaggaccccaacggcaccagcagcctgcccaccggcagcagcctgctgcaggaggtggaggtgcagaacgaggagatggccgccttctgcagaagcatcaccaagctgaagaccaagttcccctacaccaaccacagaaccaaccccggctacctgctgagccccgtgaccgcccagagaaacatctgcggcgagaacgccagcgtgaaggtgagcatcgacatcgagggcttccagctgcccgtgaccttcacctgcgacgtgagcagcaccgtggagatcatcatcatgcaggccctgtgctgggtgcacgacgacctgaaccaggtggacgtgggcagctacgtgctgaaggtgtgcggccaggaggaggtgctgcagaacaaccactgcctgggcagccacgagcacatccagaactgcagaaagtgggacaccgagatcagactgcagctgctgaccttcagcgccatgtgccagaacctggccagaaccgccgaggacgacgagacccccgtggacctgaacaagcacctgtaccagatcgagaagccctgcaaggaggccatgaccagacaccccgtggaggagctgctggacagctaccacaaccaggtggagctggccctgcagatcgagaaccagcacagagccgtggaccaggtgatcaaggccgtgagaaagatctgcagcgccctggacggcgtggagaccctggccatcaccgagagcgtgaagaagctgaagagagccgtgaacctgcccagaagcaagaccgccgacgtgaccagcctgttcggcggcgaggacaccagcagaagcagcaccagaggcagcctgaaccccgagaaccccgtgcaggtgagcatcaaccagctgaccgccgccatctacgacctgctgagactgcacgccaacagcggcagaagccccaccgactgcgcccagagcagcaagagcgtgaaggaggcctggaccaccaccgagcagctgcagttcaccatcttcgccgcccacggcatcagcagcaactgggtgagcaactacgagaagtactacctgatctgcagcctgagccacaacggcaaggacctgttcaagcccatccagagcaagaaggtgggcacctacaagaacttcttctacctgatcaagtgggacgagctgatcatcttccccatccagatcagccagctgcccctggagagcgtgctgcacctgaccctgttcggcatcctgaaccagagcagcggcagcagccccgacagcaacaagcagagaaagggccccgaggccctgggcaaggtgagcctgcccctgttcgacttcaagagattcctgacctgcggcaccaagctgctgtacctgtggaccagcagccacaccaacagcgtgcccggcaccgtgaccaagaagggctacgtgatggagagaatcgtgctgcaggtggacttccccagccccgccttcgacatcatctacaccaccccccaggtggacagaagcatcatccagcagcacaacctggagaccctggagaacgacatcaagggcaagctgctggacatcctgcacaaggacagcagcctgggcctgagcaaggaggacaaggccttcctgtgggagaagagatactactgcttcaagcaccccaactgcctgcccaagatcctggccagcgcccccaactggaagtgggtgaacctggccaagacctacagcctgctgcaccagtggcccgccctgtaccccctgatcgccctggagctgctggacagcaagttcgccgaccaggaggtgagaagcctggccgtgacctggatcgaggccatcagcgacgacgagctgaccgacctgctgccccagttcgtgcaggccctgaagtacgagatctacctgaacagcagcctggtgcagttcctgctgagcagagccctgggcaacatccagatcgcccacaacctgtactggctgctgaaggacgccctgcacgacgtgcagttcagcaccagatacgagcacgtgctgggcgccctgctgagcgtgggcggcaagagactgagagaggagctgctgaagcagaccaagctggtgcagctgctgggcggcgtggccgagaaggtgagacaggccagcggcagcgccagacaggtggtgctgcagagaagcatggagagagtgcagagcttcttccagaagaacaagtgcagactgcccctgaagcccagcctggtggccaaggagctgaacatcaagagctgcagcttcttcagcagcaacgccgtgcccctgaaggtgaccatggtgaacgccgaccccatgggcgaggagatcaacgtgatgttcaaggtgggcgaggacctgagacaggacatgctggccctgcagatgatcaagatcatggacaagatctggctgaaggagggcctggacctgagaatggtgatcttcaagtgcctgagcaccggcagagacagaggcatggtggagctggtgcccgccagcgacaccctgagaaagatccaggtggagtacggcgtgaccggcagcttcaaggacaagcccctggccgagtggctgagaaagtacaaccccagcgaggaggagtacgagaaggccagcgagaacttcatctacagctgcgccggctgctgcgtggccacctacgtgctgggcatctgcgacagacacaacgacaacatcatgctgagaagcaccggccacatgttccacatcgacttcggcaagttcctgggccacgcccagatgttcggcagcttcaagagagacagagcccccttcgtgctgaccagcgacatggcctacgtgatcaacggcggcgagaagcccaccatcagattccagctgttcgtggacctgtgctgccaggcctacaacctgatcagaaagcagaccaacctgttcctgaacctgctgagcctgatgatccccagcggcctgcccgagctgaccagcatccaggacctgaagtacgtgagagacgccctgcagccccagaccaccgacgccgaggccaccatcttcttcaccagactgatcgagagcagcctgggcagcatcgccaccaagttcaacttcttcatccacaacctggcccagctgagattcagcggcctgcccagcaacgacgagcccatcctgagcttcagccccaagacctacagcttcagacaggacggcagaatcaaggaggtgagcgtgttcacctaccacaagaagtacaaccccgacaagcactacatctacgtggtgagaatcctgagagagggccagatcgagcccagcttcgtgttcagaaccttcgacgagttccaggagctgcacaacaagctgagcatcatcttccccctgtggaagctgcccggcttccccaacagaatggtgctgggcagaacccacatcaaggacgtggccgccaagagaaagatcgagctgaacagctacctgcagagcctgatgaacgccagcaccgacgtggccgagtgcgacctggtgtgcaccttcttccaccccctgctgagagacgagaaggccgagggcatcgccagaagcgccgacgccggcagcttcagccccacccccggccagatcggcggcgccgtgaagctgagcatcagctacagaaacggcaccctgttcatcatggtgatgcacatcaaggacctggtgaccgaggacggcgccgaccccaacccctacgtgaagacctacctgctgcccgacaaccacaagaccagcaagagaaagaccaagatcagcagaaagaccagaaaccccaccttcaacgagatgctggtgtacagcggctacagcaaggagaccctgagacagagagagctgcagctgagcgtgctgagcgccgagagcctgagagagaacttcttcctgggcggcgtgaccctgcccctgaaggacttcaacctgagcaaggagaccgtgaagtggtaccagctgaccgccgccacctacctgtag

SEQ ID NO: 130595 - DNA, 393 bp, Artificial Sequence
  derived and/or modified sequence
atggcccagatcagcagcaacagcggcttcaaggagtgccccagcagccaccccgagcccaccagagccaaggacgtggacaaggaggaggccctgcagatggaggccgaggccctggccaagctgcagaaggacagacaggtgaccgacaaccagagaggcttcgagctgagcagcagcaccagaaagaaggcccaggtgtacaacaagcaggactacgacctgatggtgttccccgagagcgacagccagaagagagccctggacatcgacgtggagaagctgacccaggccgagctggagaagctgctgctggacgacagcttcgagaccaagaagacccccgtgctgcccgtgacccccatcctgagccccagcttcagcgcccagtag

SEQ ID NO: 130596 - DNA, 3921 bp, Artificial Sequence
  derived and/or modified sequence
atggccgccttctgcagaagcatcaccaagctgaagaccaagttcccctacaccaaccacagaaccaaccccggctacctgctgagccccgtgaccgcccagagaaacatctgcggcgagaacgccagcgtgaaggtgagcatcgacatcgagggcttccagctgcccgtgaccttcacctgcgacgtgagcagcaccgtggagatcatcatcatgcaggccctgtgctgggtgcacgacgacctgaaccaggtggacgtgggcagctacgtgctgaaggtgtgcggccaggaggaggtgctgcagaacaaccactgcctgggcagccacgagcacatccagaactgcagaaagtgggacaccgagatcagactgcagctgctgaccttcagcgccatgtgccagaacctggccagaaccgccgaggacgacgagacccccgtggacctgaacaagcacctgtaccagatcgagaagccctgcaaggaggccatgaccagacaccccgtggaggagctgctggacagctaccacaaccaggtggagctggccctgcagatcgagaaccagcacagagccgtggaccaggtgatcaaggccgtgagaaagatctgcagcgccctggacggcgtggagaccctggccatcaccgagagcgtgaagaagctgaagagagccgtgaacctgcccagaagcaagaccgccgacgtgaccagcctgttcggcggcgaggacaccagcagaagcagcaccagaggcagcctgaaccccgagaaccccgtgcaggtgagcatcaaccagctgaccgccgccatctacgacctgctgagactgcacgccaacagcggcagaagccccaccgactgcgcccagagcagcaagagcgtgaaggaggcctggaccaccaccgagcagctgcagttcaccatcttcgccgcccacggcatcagcagcaactgggtgagcaactacgagaagtactacctgatctgcagcctgagccacaacggcaaggacctgttcaagcccatccagagcaagaaggtgggcacctacaagaacttcttctacctgatcaagtgggacgagctgatcatcttccccatccagatcagccagctgcccctggagagcgtgctgcacctgaccctgttcggcatcctgaaccagagcagcggcagcagccccgacagcaacaagcagagaaagggccccgaggccctgggcaaggtgagcctgcccctgttcgacttcaagagattcctgacctgcggcaccaagctgctgtacctgtggaccagcagccacaccaacagcgtgcccggcaccgtgaccaagaagggctacgtgatggagagaatcgtgctgcaggtggacttccccagccccgccttcgacatcatctacaccaccccccaggtggacagaagcatcatccagcagcacaacctggagaccctggagaacgacatcaagggcaagctgctggacatcctgcacaaggacagcagcctgggcctgagcaaggaggacaaggccttcctgtgggagaagagatactactgcttcaagcaccccaactgcctgcccaagatcctggccagcgcccccaactggaagtgggtgaacctggccaagacctacagcctgctgcaccagtggcccgccctgtaccccctgatcgccctggagctgctggacagcaagttcgccgaccaggaggtgagaagcctggccgtgacctggatcgaggccatcagcgacgacgagctgaccgacctgctgccccagttcgtgcaggccctgaagtacgagatctacctgaacagcagcctggtgcagttcctgctgagcagagccctgggcaacatccagatcgcccacaacctgtactggctgctgaaggacgccctgcacgacgtgcagttcagcaccagatacgagcacgtgctgggcgccctgctgagcgtgggcggcaagagactgagagaggagctgctgaagcagaccaagctggtgcagctgctgggcggcgtggccgagaaggtgagacaggccagcggcagcgccagacaggtggtgctgcagagaagcatggagagagtgcagagcttcttccagaagaacaagtgcagactgcccctgaagcccagcctggtggccaaggagctgaacatcaagagctgcagcttcttcagcagcaacgccgtgcccctgaaggtgaccatggtgaacgccgaccccatgggcgaggagatcaacgtgatgttcaaggtgggcgaggacctgagacaggacatgctggccctgcagatgatcaagatcatggacaagatctggctgaaggagggcctggacctgagaatggtgatcttcaagtgcctgagcaccggcagagacagaggcatggtggagctggtgcccgccagcgacaccctgagaaagatccaggtggagtacggcgtgaccggcagcttcaaggacaagcccctggccgagtggctgagaaagtacaaccccagcgaggaggagtacgagaaggccagcgagaacttcatctacagctgcgccggctgctgcgtggccacctacgtgctgggcatctgcgacagacacaacgacaacatcatgctgagaagcaccggccacatgttccacatcgacttcggcaagttcctgggccacgcccagatgttcggcagcttcaagagagacagagcccccttcgtgctgaccagcgacatggcctacgtgatcaacggcggcgagaagcccaccatcagattccagctgttcgtggacctgtgctgccaggcctacaacctgatcagaaagcagaccaacctgttcctgaacctgctgagcctgatgatccccagcggcctgcccgagctgaccagcatccaggacctgaagtacgtgagagacgccctgcagccccagaccaccgacgccgaggccaccatcttcttcaccagactgatcgagagcagcctgggcagcatcgccaccaagttcaacttcttcatccacaacctggcccagctgagattcagcggcctgcccagcaacgacgagcccatcctgagcttcagccccaagacctacagcttcagacaggacggcagaatcaaggaggtgagcgtgttcacctaccacaagaagtacaaccccgacaagcactacatctacgtggtgagaatcctgagagagggccagatcgagcccagcttcgtgttcagaaccttcgacgagttccaggagctgcacaacaagctgagcatcatcttccccctgtggaagctgcccggcttccccaacagaatggtgctgggcagaacccacatcaaggacgtggccgccaagagaaagatcgagctgaacagctacctgcagagcctgatgaacgccagcaccgacgtggccgagtgcgacctggtgtgcaccttcttccaccccctgctgagagacgagaaggccgagggcatcgccagaagcgccgacgccggcagcttcagccccacccccggccagatcggcggcgccgtgaagctgagcatcagctacagaaacggcaccctgttcatcatggtgatgcacatcaaggacctggtgaccgaggacggcgccgaccccaacccctacgtgaagacctacctgctgcccgacaaccacaagaccagcaagagaaagaccaagatcagcagaaagaccagaaaccccaccttcaacgagatgctggtgtacagcggctacagcaaggagaccctgagacagagagagctgcagctgagcgtgctgagcgccgagagcctgagagagaacttcttcctgggcggcgtgaccctgcccctgaaggacttcaacctgagcaaggagaccgtgaagtggtaccagctgaccgccgccacctacctgtag

SEQ ID NO: 130597 - DNA, 1947 bp, Artificial Sequence
  derived and/or modified sequence
atggcccagatcagcagcaacagcggcttcaaggagtgccccagcagccaccccgagcccaccagagccaaggacgtggacaaggaggaggccctgcagatggaggccgaggccctggccaagctgcagaaggacagacaggtgaccgacaaccagagaggcttcgagctgagcagcagcaccagaaagaaggcccaggtgtacaacaagcaggactacgacctgatggtgttccccgagagcgacagccagaagagagccctggacatcgacgtggagaagctgacccaggccgagctggagaagctgctgctggacgacagcttcgagaccaagaagacccccgtgctgcccgtgacccccatcctgagccccagcttcagcgcccagctgtacttcagacccaccatccagagaggccagtggccccccggcctgcccggccccagcacctacgccctgcccagcatctaccccagcacctacagcaagcaggccgccttccagaacggcttcaaccccagaatgcccaccttccccagcaccgagcccatctacctgagcctgcccggccagagcccctacttcagctaccccctgacccccgccacccccttccacccccagggcagcctgcccatctacagacccgtggtgagcaccgacatggccaagctgttcgacaagatcgccagcaccagcgagttcctgaagaacggcaaggccagaaccgacctggagatcaccgacagcaaggtgagcaacctgcaggtgagccccaagagcgaggacatcagcaagttcgactggctggacctggaccccctgagcaagcccaaggtggacaacgtggaggtgctggaccacgaggaggagaagaacgtgagcagcctgctggccaaggacccctgggacgccgtgctgctggaggagagaagcaccgccaactgccacctggagagaaaggtgaacggcaagagcctgagcgtggccaccgtgaccagaagccagagcctgaacatcagaaccacccagctggccaaggcccagggccacatcagccagaaggaccccaacggcaccagcagcctgcccaccggcagcagcctgctgcaggaggtggaggtgcagaacgaggagatggccgccttctgcagaagcatcaccaagctgaagaccaagttcccctacaccaaccacagaaccaaccccggctacctgctgagccccgtgaccgcccagagaaacatctgcggcgagaacgccagcgtgaaggtgagcatcgacatcgagggcttccagctgcccgtgaccttcacctgcgacgtgagcagcaccgtggagatcatcatcatgcaggccctgtgctgggtgcacgacgacctgaaccaggtggacgtgggcagctacgtgctgaaggtgtgcggccaggaggaggtgctgcagaacaaccactgcctgggcagccacgagcacatccagaactgcagaaagtgggacaccgagatcagactgcagctgctgaccttcagcgccatgtgccagaacctggccagaaccgccgaggacgacgagacccccgtggacctgaacaagcacctgtaccagatcgagaagccctgcaaggaggccatgaccagacaccccgtggaggagctgctggacagctaccacaaccaggtggagctggccctgcagatcgagaaccagcacagagccgtggaccaggtgatcaaggccgtgagaaagatctgcagcgccctggacggcgtggagaccctggccatcaccgagagcgtgaagaagctgaagagagccgtgaacctgcccagaagcaagaccgccgacgtgaccagcctgttcggcggcgaggacaccagcagaagcagcaccagaggcagcctgaaccccgagaaccccgtgcaggtgagcatcaaccagctgtag

SEQ ID NO: 130598 - DNA, 5061 bp, Artificial Sequence
  derived and/or modified sequence
atggcacaaatcagctcaaattcaggctttaaagaatgcccgagcagccatcctgagcccacccgcgccaaagatgtggacaaagaggaggccctgcagatggaggccgaggcactggctaagctacagaaggaccggcaggtaactgacaaccagcgcggttttgaactctcttcatctacaagaaagaaggcccaggtgtacaataagcaggattatgacctgatggtgttccctgaatcggactcacagaaacgggcactcgatattgacgttgagaaattgacacaagcagaacttgagaaactgcttcttgatgactcttttgaaacgaagaagacccccgtgctgccggtgaccccgatcctgtcgccctctttttctgctcagttgtatttccgccccaccatccagaggggacaatggccaccggggctccctgggcctagcacgtatgccttgcccagcatttatccatctacttattcaaaacaggccgcatttcagaatggatttaatcccagaatgcctacatttccgtcaacagagcctatataccttagtctgcctggtcagtcaccgtacttctcttatcccctgacaccagctacaccatttcaccctcaggggagtttgcctatctatcggccagtggtgagcacagacatggccaaactgttcgataaaattgcatccacgtctgagttcttaaagaacggtaaggcccgcaccgatctggagatcacggattccaaggtcagcaacttacaggtctcccctaagagcgaggacatctccaagtttgactggttggaccttgaccctttgtccaaaccgaaggtcgacaacgtagaggtcctggaccacgaggaagaaaagaatgtgtcatccctgctagctaaagatccctgggacgccgttctgctggaggaacgcagtacagccaattgtcatctggaacgcaaagtgaacggtaaaagcctctctgtggccaccgtgacccgcagtcagagccttaacatccgtacaacacagctggctaaggcacaagggcatattagtcagaaagaccccaatggcacctccagcttgccgactggctcttccctcctacaggaggttgaagttcagaatgaagaaatggccgcattctgcagaagtatcactaagctgaagacaaagtttccctacactaatcaccggactaatccgggctacttgttgagtcctgtcactgcacagcgcaatatttgcggggagaacgcttccgtgaaggttagtattgatattgagggtttccagcttcccgtcaccttcacatgcgacgtgtccagcacagtcgagataatcattatgcaggcactgtgttgggtacacgatgatctgaaccaggtggacgtggggagctacgtcctgaaggtgtgcggacaggaagaggttctccaaaacaaccactgcctaggttctcatgagcacatccagaattgccggaagtgggacaccgagattcggttgcagcttctgaccttttccgcaatgtgccagaatctggctcgcactgccgaagatgatgagactccagtcgatcttaataagcatctctaccagatcgaaaaaccatgcaaggaggccatgacccgacacccagtcgaagagttacttgacagttaccacaaccaggtggagctagcactgcagattgagaatcagcatcgtgccgtggaccaggtgattaaagcagtacgcaaaatctgctctgcactggatggtgtcgagactcttgcaataaccgagtctgtgaaaaagttaaaacgtgcagtgaacttgccaagatcaaaaactgccgatgtgacctccctgtttgggggagaggacacaagtaggagcagtactcggggcagtctgaacccagaaaaccccgtgcaagtgtctatcaatcagctcaccgctgcaatttatgacctactgcggctgcatgccaactccggacgcagtccaactgactgtgcgcagagcagcaaatccgtaaaggaggcatggactaccacagagcagctccaattcaccatattcgctgcccatggaatcagttcaaactgggtaagcaattacgaaaagtactacctgatatgctctctgtcgcacaacgggaaggacctctttaagccaatacaatctaaaaaggttggcacctacaaaaactttttctatctgattaagtgggatgagctcattatctttcctattcagatctctcagctccccctggaatcagtcctacacctaaccctattcggcatcctcaaccagagctccgggagcagccccgattcaaataaacagcgcaagggccctgaggcattgggaaaggtcagcttacctctattcgattttaaacggttcttaacatgtggtaccaaactgctgtacctatggacaagtagccacaccaattctgttcccggcactgtgaccaagaaaggttatgtcatggagagaattgttctgcaggtcgactttccctcacccgcgtttgatattatatacaccaccccacaggttgatcgaagcattatccaacaacataatctcgagaccctcgagaacgatatcaagggcaagcttttggacattctgcacaaagacagctccttagggctgtccaaagaggataaagctttcttgtgggaaaagcgctactattgcttcaagcaccctaactgtcttccgaagatactggcttctgctcctaactggaaatgggtgaatctggcaaagacatatagccttttgcatcagtggcctgccttatacccactgattgctctcgaattgctggatagtaagtttgcggatcaggaggtccgcagcctggcagttacatggatcgaggcaatatctgatgatgaactgaccgatctgctcccccaatttgtgcaagctctgaagtatgaaatctacctgaatagttctcttgtgcaatttttgctgagcagggccctgggcaatatccaaatcgctcacaacctgtattggttgctcaaggatgccctgcacgatgtgcaatttagtaccagatacgaacacgtactgggtgccctgctttctgtaggaggcaaacgccttagggaagagctcttaaaacagaccaagctcgtgcaactgctcggtggagtcgcagagaaagtccggcaggcctcgggtagcgcgagacaggtggtcctacaaagaagcatggagcgggtccaaagtttctttcaaaagaacaagtgcaggctcccactgaagcctagtttggtcgcaaaggagctgaatatcaagtcgtgttccttctttagttcaaacgctgtacccctgaaggtgactatggttaatgccgaccccatgggagaagagataaacgtgatgttcaaggttggggaggatctgcgacaggatatgctggccttgcagatgattaaaatcatggacaaaatctggctaaaggaagggctggacctccgaatggttatttttaagtgcctgtcgacagggagggacagaggcatggtggaattagtgccggcgtctgataccctgcgcaaaatccaagttgaatacggggttaccggttcctttaaagataagcctttggccgaatggcttcggaaatacaacccctctgaagaagaatatgaaaaagcatcagagaattttatttatagctgcgcaggatgttgcgtcgccacctacgtcctgggaatatgcgacaggcacaacgacaacattatgctgaggtcaactgggcacatgttccacattgattttggaaagttcctgggtcatgcgcagatgtttggctcctttaagcgggatcgtgcaccatttgtcctcacttctgatatggcatatgttatcaatggcggcgagaagcctaccattagattccagctgtttgtagatctgtgttgtcaagcctacaatctgatccgtaaacagacaaacctatttcttaatctgttatccctgatgattccttccgggctgccagagttgacgtctatacaagaccttaagtacgttcgtgacgccttacagccccagacaacagatgcagaggcaacaatctttttcactcgtcttatagaaagttccctcggtagtatcgccacaaagtttaacttcttcattcacaacttggcccagctccggttctcaggcctcccgagcaatgacgaacccatcctgtcattttccccgaaaacatatagttttaggcaggatggcaggattaaggaagtgagcgtgtttacttaccacaaaaagtataacccagacaaacactacatttatgtagttcggattctgagagagggacagattgagccatcatttgtgttccgtaccttcgacgagtttcaggagctccacaataagctcagcatcatctttcccctctggaaactacccgggtttcccaaccggatggtactgggcaggacacacataaaagatgtagcagccaagagaaagatcgagttaaattcatatctccagtctctgatgaatgcttctactgacgttgccgagtgcgaccttgtttgtacttttttccaccctttactgcgggacgaaaaagctgaagggatcgcacgcagtgccgacgctgggtctttcagccctacacccggccagattggcggtgcagtgaagttgagcatcagttataggaacggcacactgttcatcatggtaatgcacattaaagatctcgtgaccgaagacggggcagaccccaacccctatgtgaaaacctatctgctgccggacaatcacaaaacctctaaacgaaagacaaagatctccaggaagacaaggaatccaactttcaacgagatgctggtgtactcgggatactcgaaggagaccctccgtcaacgtgagctccagttgtccgtcctcagtgcagagagcctgcgtgagaacttcttcctcggaggtgtgactttgccactgaaggatttcaacctctctaaggagacggtgaagtggtaccagctaactgctgccacttacctgtag

SEQ ID NO: 130599 - DNA, 393 bp, Artificial Sequence
  derived and/or modified sequence
atggcgcagatttccagcaacagcgggtttaaagagtgtccgtcctcacaccccgaacctacacgggctaaagatgttgacaaagaggaggcccttcagatggaagctgaggcactggctaaactacagaaggatcggcaggtcactgataaccagcgaggctttgagctgtctagcagcactcgaaaaaaggcacaggtgtataataagcaggattacgatttgatggtgtttcccgaaagcgatagccagaaaagggccctggacattgatgtcgaaaagctgacccaagcagagctggaaaagctgctcttggatgattcctttgagacaaaaaagacgccagtcctgcccgttacacccattctcagtcccagcttctctgcccagtag

SEQ ID NO: 130600 - DNA, 3921 bp, Artificial Sequence
  derived and/or modified sequence
atggccgctttttgcaggagcatcaccaagctaaaaactaaatttccttacacaaatcaccgtacaaaccctgggtacctgttgagccccgtcacagcccagcgcaatatctgtggcgagaacgccagcgtgaaagtgtccattgatattgagggcttccagctacctgtgacattcacttgcgatgtctcctctactgtcgaaatcatcataatgcaggccttatgttgggttcacgacgacctgaaccaagtagacgtgggttcatacgtcctgaaggtctgcggccaagaggaagtcctccagaacaaccactgcttagggtcgcacgaacacatacaaaattgtagaaagtgggatactgagatccgtctgcaattacttaccttttcagccatgtgtcagaatctagctagaactgctgaggatgatgagactccggtcgatctaaataaacacttgtatcagatagaaaagccatgcaaggaagcgatgactcggcaccccgtagaggagctgctggactcgtatcacaaccaggtggaattggcgctgcagatcgagaatcagcatcgtgcagtggaccaggtcattaaagcagttagaaagatttgttcagccctggacggtgtggaaactctggctattaccgaatcggtgaaaaagttaaagcgtgccgtgaacttacctcggtctaaaacggcagatgtcacctctttgtttgggggagaagacacttcacggagctccacccggggatccctgaaccctgaaaacccagtgcaggtgtccatcaatcagctgacagcagccatttacgaccttctacgcctacatgcgaattcaggcaggtcaccaactgactgtgcacaatcgagcaagagtgtcaaagaagcttggacgactacggaacagctgcagtttactatcttcgctgcacatggcatctcaagcaattgggtgagcaactatgagaagtactaccttatctgttctctgtctcataatggcaaggacctttttaaaccaatacagtccaagaaggtgggcacctataagaatttcttttaccttatcaagtgggatgaactaatcattttcccgattcagatctcccaattgcccttggaatccgtgctccatttaactctgtttggaattctgaaccagtcctcagggtcatctcctgatagtaacaaacagcgcaagggacccgaggctttgggaaaggtctccctccctctgtttgatttcaaacgatttctgacctgcggaactaagctgctgtacctgtggacctcatcgcataccaactctgtcccaggcaccgtaaccaagaaaggctacgtcatggagcgcatcgtcctccaagtggactttcccagtcctgcctttgatatcatctacacaaccccccaagtcgacagaagtattatccagcagcacaatctcgaaactcttgagaacgacataaaaggcaagcttctggacatactccataaagacagctccctgggcctgtccaaagaggataaagcatttctgtgggaaaaaagatactactgcttcaagcacccaaattgtcttccaaagattctcgcgtctgcgccaaactggaaatgggtcaacctagcaaaaacgtactccctgctccaccagtggcccgcattatatccgctcatagccctcgagttgctggacagtaaattcgcagaccaggaggtccgatctctagctgtcacatggatcgaagccatctcagacgatgaactgactgatctgctgccccagtttgtacaggctctcaaatacgagatttacctgaactccagtttggttcagttcctgcttagccgagccctgggaaatatacagattgcgcacaatctgtactggctcttgaaggatgcccttcacgatgtccaattttctactcgctacgagcacgtgctgggcgctctgctgtccgtcggaggaaagaggcttcgagaggaactgctaaaacagactaaactggtgcaactgctgggaggggtagctgaaaaagtcaggcaggcatcagggagcgctcgccaggtggtgctgcagcgcagtatggagcgggttcaatcttttttccagaagaacaaatgtagactgcctctgaagccatccttggtggccaaagaactcaacatcaagtcatgctcttttttcagctccaatgccgtgcctctcaaggtcaccatggtgaacgccgatccgatgggagaggaaatcaatgtcatgtttaaggttggtgaggatctgcgacaagatatgctggccttacagatgataaagataatggacaagatctggctgaaggagggactggacctgaggatggtcattttcaaatgtctgagtaccggacgtgataggggaatggtggagttagtcccagcttcggatacactgagaaagatacaggttgagtatggcgttacagggtcattcaaggataagccgttagcggagtggttgaggaagtacaatccttctgaggaggaatacgaaaaggctagcgagaacttcatctacagttgtgccgggtgttgtgtggccacctatgtgctagggatatgcgatagacacaacgataacattatgctccgcagcaccgggcatatgtttcatattgactttggcaaatttctgggacacgcgcaaatgtttggaagctttaaacgcgatcgggcaccattcgttctgacttccgacatggcttatgtgataaacggtggcgaaaagccaacaatcagattccagctcttcgtcgacctgtgttgccaggcctataatctgattagaaagcagaccaatctgttcctgaatcttctgtccctgatgattccttctggcctgccagagctcaccagtattcaagacctaaaatacgttagggacgccctgcagccccagaccacggacgccgaagccacaatcttttttacgcgtcttatcgaaagcagtctgggctcgatcgccacgaagtttaatttctttatccataacctagctcaactccggtttagcggcttacctagcaacgacgaacccatcctaagcttcagtccgaagacatattcgtttcgacaagacggcaggataaaagaagtatccgtcttcacctatcataaaaaatataatccagacaagcattacatctatgtcgtacggatactgcgcgagggacagatcgaaccctcattcgtattcaggactttcgacgaatttcaggagctacacaacaagcttagtatcatcttccctctttggaagctgcctggcttccctaacaggatggtattgggccggacccacatcaaggatgtggccgcgaaaagaaaaatagagcttaactcctacctgcagagcctaatgaatgcatcaaccgatgtggctgaatgcgacctggtgtgcacattctttcaccccttgctgcgagatgaaaaggcagaggggattgcaaggtccgccgacgctggatcattttcccctactcccggccagattggcggcgcagtgaaactgtcaataagttacagaaatgggaccctctttattatggtgatgcacatcaaagatctcgtcacagaagacggagccgatcctaacccctatgtcaaaacttacctattgccagacaaccataagacaagtaagagaaaaacaaagatatcccggaaaacccggaatcccactttcaatgaaatgctagtgtatagcggctattcaaaggaaactctgagacaaagagagctgcagctgagcgtgctttcagccgagagccttcgagagaatttcttcctcggaggggttactctgccactgaaagattttaatcttagtaaggagaccgtcaaatggtaccagctaactgccgcaacatacctttag

SEQ ID NO: 130601 - DNA, 1947 bp, Artificial Sequence
  derived and/or modified sequence
atggcccagatctctagcaactcaggtttcaaagaatgccccagcagccacccagagcccaccagggcaaaagatgtggacaaggaagaggccctacagatggaggcggaagccctggcgaagctgcaaaaggaccggcaggtgaccgacaaccagcggggctttgagttgtcctcttcaacccggaagaaagctcaggtctacaacaaacaggactatgatctcatggtgttccccgaatccgacagtcagaaacgggctctggatattgacgtcgagaagctcacgcaggctgaattggagaagttactgctcgatgatagcttcgagacaaaaaagacgccagtgctccccgtcactcccattctctccccaagtttctccgcccaactgtacttcaggccaacaattcagcgaggccagtggccccctggtctgcccggtccttctacgtacgccctcccatctatttatccctcaacttatagcaagcaggcggcttttcagaatggctttaatccccgaatgccaaccttcccgtctacagagcctatctaccttagtctgcctggccagtccccatattttagttaccccctgaccccggccacacccttccaccctcaggggtccctgcctatctaccggcccgtagtgtccaccgatatggccaaactgtttgacaaaattgcctccacctccgagtttctcaagaatgggaaggcaaggaccgacctggaaataaccgatagtaaggtatctaatctccaggtctcaccgaagtctgaggacatctcaaagtttgactggctcgacctggaccccctgtccaaacctaaggtcgacaatgttgaggtgctggatcacgaggaagagaagaacgtgtccagcttgctggcaaaggacccgtgggatgcagtactactagaggaaagatctacagcaaactgtcacttggagcggaaggtcaacggcaagagcctgtccgtggctaccgtgacccgaagtcagagcctcaacattagaacgacccagctggccaaggcacaggggcacatctcacagaaggacccaaatggtaccagttccctgcctaccgggtcatctcttcttcaggaggtcgaggttcagaatgaggaaatggctgctttttgccggagcattacgaagcttaagaccaaattcccttacaccaatcatagaacaaaccctgggtatttacttagtcctgtaaccgcgcagaggaatatttgtggtgaaaatgcaagtgtgaaggtcagcatcgacatcgaggggttccagttgcctgttacatttacgtgcgatgtctcaagtacagtggaaattattattatgcaagcactttgctgggtgcatgacgatttgaatcaggtggatgtgggctcatatgtgctgaaagtctgtggccaggaagaagtgctgcagaacaatcattgtttaggaagtcacgaacacatccagaattgtcgtaaatgggacactgagattcgcctgcagctattgacattctccgcaatgtgccagaatctcgccaggacagccgaagatgacgagactccagtggaccttaataaacatctgtaccagattgagaaaccatgcaaggaggcaatgacaagacatcctgtggaagagctgctggacagctatcataaccaagtcgagctcgcactgcagattgaaaatcagcatcgggccgtggaccaggtgatcaaggctgtcagaaagatttgcagcgcccttgacggcgtagaaaccctcgccatcactgagagcgtgaaaaagctgaaaagggccgtcaatctaccgcgatccaaaaccgctgacgtcacatcgctttttggcggagaggacacttccagaagttctaccagagggtcgctgaacccagaaaatccggtgcaggttagcatcaaccagttgtag

SEQ ID NO: 130602 - DNA, 5061 bp, Artificial Sequence
  derived and/or modified sequence
atggcccagatcagcagcaacagcggcttcaaggagtgccccagcagccaccctgagcccacccgggccaaggatgtggacaaggaggaggccctgcagatggaggccgaggccctggccaagctgcagaaggaccggcaggtgacagacaaccagaggggctttgagctgagcagcagcaccaggaagaaggcccaggtgtacaacaagcaggactatgacctgatggtgtttcctgagagtgacagccagaagagggccctggacattgatgtggagaagctgacccaggccgagctggagaagctgctgctggatgacagctttgagaccaagaagacccctgtgctgcctgtgacccccatcctgagccccagcttcagcgcccagctgtacttccggcccaccatccagaggggccagtggcccccaggcctgcccggccccagcacctacgccctgcccagcatctaccccagcacctacagcaagcaggccgccttccagaatggcttcaaccccaggatgcccaccttccccagcacagagcccatctacctgagcctgcccggccagagcccctacttctcctaccccctgaccccagccacccccttccacccccagggcagcctgcccatctacagacctgtggtgtccacagacatggccaagctgtttgacaagatcgccagcaccagcgagttcctgaagaatggcaaggccaggacagacctggagatcacagacagcaaggtgagcaacctgcaggtgagccccaagtctgaggacatcagcaagtttgactggctggacctggaccccctgagcaagcccaaggtggacaacgtggaggtgctggaccacgaggaggagaagaatgtgagcagcctgctggccaaggacccctgggatgctgtgctgctggaggagaggagcacagccaactgccacctggagaggaaggtgaatggcaagagcctgtctgtggccaccgtgaccaggagccagagcctgaacatccgcaccacccagctggccaaggcccagggccacatcagccagaaggaccccaacggcaccagcagcctgcccaccggcagcagcctgctgcaggaggtggaggtgcagaatgaggagatggccgccttctgccgcagcatcaccaagctgaagaccaagttcccctacaccaaccacaggaccaaccctggctacctgctgagccctgtgacagcccagaggaacatctgtggggagaatgcctctgtgaaggtgtccattgacatcgagggcttccagctgcctgtgaccttcacctgtgatgtgagcagcacagtggagatcatcatcatgcaggccctgtgctgggtgcatgatgacctgaaccaggtggatgtgggcagctatgtgctgaaggtgtgtggccaggaggaggtgctgcagaacaaccactgcctgggcagccatgagcacatccagaactgcaggaagtgggacacagagatccggctgcagctgctgaccttcagcgccatgtgccagaacctggccaggacagcagaagatgatgagacccctgtggacctgaacaagcacctgtaccagatcgagaagccctgcaaggaggccatgaccaggcaccctgtggaggagctgctggacagctaccacaaccaggtggagctggccctgcagatcgagaaccagcacagagctgtggaccaggtgatcaaggctgtgaggaagatctgcagcgccctggatggagtggagaccctggccatcacagaatctgtgaagaagctgaagagagctgtgaacctgcccaggagcaagacagcagatgtgaccagcctgtttggaggagaggacaccagccgcagcagcacccggggcagcctgaaccctgagaaccctgtgcaggtgtccatcaaccagctgacagctgccatctatgacctgctgcggctgcacgccaacagcggccgcagccccacagactgtgcccagagcagcaagtctgtgaaggaggcctggaccaccacagagcagctgcagttcaccatctttgctgcccacggcatcagcagcaactgggtgagcaactatgagaagtactacctgatctgcagcctgagccacaacgggaaggacctcttcaagcccatccagagcaagaaggtgggcacctacaagaacttcttctacctgatcaagtgggatgagctgatcatcttccccatccagatcagccagctgcccctggagagcgtgctgcacctgaccctgtttggcatcctgaaccagagcagcggcagcagcccagacagcaacaagcagaggaaaggacctgaggccctgggcaaggtgtccctgcccctgtttgacttcaagcgcttcctgacctgtggcaccaagctgctgtacctgtggaccagcagccacaccaacagcgtgcccggcaccgtgaccaagaagggctacgtgatggagcgcatcgtgctgcaggtggacttccccagccctgcctttgacatcatctacaccaccccccaggtggacaggagcatcatccagcagcacaacctggagaccctggagaatgacatcaagggcaagctgctggacatcctgcacaaggacagcagcctgggcctgagcaaggaggacaaggccttcctgtgggagaagcgctactactgcttcaagcaccccaactgcctgcccaagatcctggccagcgcccccaactggaagtgggtgaacctggccaagacctacagcctgctgcaccagtggccagccctgtaccccctgattgccctggagctgctggacagcaagtttgctgaccaggaggtgcgcagcctggccgtgacctggattgaggccatcagtgatgatgagctgacagacctgctgccccagtttgtgcaggccctgaagtatgagatctacctgaacagcagcctggtgcagttcctgctgagccgggccctgggcaacatccagatcgcccacaacctgtactggctgctgaaggatgccctgcatgatgtgcagttcagcaccaggtatgaacatgtgctgggcgccctgctgtctgtgggcggcaagaggctgcgggaggagctgctgaagcagaccaagctggtgcagctgctgggcggcgtggccgagaaggtgcggcaggccagcggcagcgcccggcaggtggtgctgcagaggtccatggagcgggtgcagagcttcttccagaagaacaagtgccgcctgcccctgaagcccagcctggtggccaaggagctgaacatcaagagctgcagcttcttcagcagcaatgctgtgcccctgaaggtgaccatggtgaatgctgaccccatgggagaggagatcaacgtgatgttcaaggtgggggaggacctgcggcaggacatgctggccctgcagatgatcaagatcatggacaagatctggctgaaggagggcctggacctgaggatggtgatcttcaagtgcctgagcacaggccgggaccggggcatggtggagctggtgcctgccagtgacaccctgaggaagatccaggtggagtatggagtgacaggcagcttcaaggacaagcccctggccgagtggctgaggaagtacaaccccagcgaggaggagtatgagaaggccagcgagaacttcatctacagctgtgccggctgctgcgtggccacctacgtgctgggcatctgtgacagacacaatgacaacatcatgctgcggagcacaggccacatgttccacatcgactttgggaagttcctgggccacgcccagatgtttggcagcttcaagagggaccgggccccctttgtgctgaccagtgacatggcctacgtgatcaatggaggagagaagcccaccatccgcttccagctgtttgtggacctgtgctgccaggcctacaacctgatcaggaagcagaccaacctcttcctgaacctgctgagcctgatgatccccagcggcctgcctgagctgaccagcatccaggacctgaagtatgtgagagatgccctgcagccccagaccacagatgctgaggccaccatcttcttcacccggctgattgagagcagcctgggcagcatcgccaccaagttcaacttcttcatccacaacctggcccagctgcgcttcagcggcctgcccagcaatgatgagcccatcctgtccttcagccccaagacctacagcttccggcaggacggccgcatcaaggaggtgtctgtgttcacctaccacaagaagtacaacccagacaagcactacatctacgtggtgcgcatcctgcgggagggccagatcgagcccagctttgtgttccgcacctttgatgagttccaggagctgcacaacaagctgagcatcatcttccccctgtggaagctgcccggcttccccaacaggatggtgctgggccgcacccacatcaaggatgtggccgccaagaggaagattgagctgaacagctacctgcagagcctgatgaatgccagcacagatgtggctgaatgtgacctggtgtgcaccttcttccaccccctgctgagagatgagaaggccgagggcatcgcccggtctgcagatgctggcagcttcagccccaccccaggccagattggaggagctgtgaagctgagcatctcctacagaaatggcaccctcttcatcatggtgatgcacatcaaggacctggtgacagaagatggagctgaccccaacccctacgtgaagacctacctgctgcctgacaaccacaagaccagcaagaggaagaccaagatcagcaggaagaccaggaaccccaccttcaatgagatgctggtgtacagcggctacagcaaggagaccctgcggcagcgggagctgcagctgtctgtgctgtctgctgagagcctgcgggagaacttcttcctgggcggcgtgaccctgcccctgaaggacttcaacctgagcaaggagaccgtgaagtggtaccagctgacagctgccacctacctgtag

SEQ ID NO: 130603 - DNA, 393 bp, Artificial Sequence
  derived and/or modified sequence
atggcccagatcagcagcaacagcggcttcaaggagtgccccagcagccaccctgagcccacccgggccaaggatgtggacaaggaggaggccctgcagatggaggccgaggccctggccaagctgcagaaggaccggcaggtgacagacaaccagaggggctttgagctgagcagcagcaccaggaagaaggcccaggtgtacaacaagcaggactatgacctgatggtgtttcctgagagtgacagccagaagagggccctggacattgatgtggagaagctgacccaggccgagctggagaagctgctgctggatgacagctttgagaccaagaagacccctgtgctgcctgtgacccccatcctgagccccagcttcagcgcccagtag

SEQ ID NO: 130604 - DNA, 3921 bp, Artificial Sequence
  derived and/or modified sequence
atggccgccttctgccgcagcatcaccaagctgaagaccaagttcccctacaccaaccacaggaccaaccctggctacctgctgagccctgtgacagcccagaggaacatctgtggggagaatgcctctgtgaaggtgtccattgacatcgagggcttccagctgcctgtgaccttcacctgtgatgtgagcagcacagtggagatcatcatcatgcaggccctgtgctgggtgcatgatgacctgaaccaggtggatgtgggcagctatgtgctgaaggtgtgtggccaggaggaggtgctgcagaacaaccactgcctgggcagccatgagcacatccagaactgcaggaagtgggacacagagatccggctgcagctgctgaccttcagcgccatgtgccagaacctggccaggacagcagaagatgatgagacccctgtggacctgaacaagcacctgtaccagatcgagaagccctgcaaggaggccatgaccaggcaccctgtggaggagctgctggacagctaccacaaccaggtggagctggccctgcagatcgagaaccagcacagagctgtggaccaggtgatcaaggctgtgaggaagatctgcagcgccctggatggagtggagaccctggccatcacagaatctgtgaagaagctgaagagagctgtgaacctgcccaggagcaagacagcagatgtgaccagcctgtttggaggagaggacaccagccgcagcagcacccggggcagcctgaaccctgagaaccctgtgcaggtgtccatcaaccagctgacagctgccatctatgacctgctgcggctgcacgccaacagcggccgcagccccacagactgtgcccagagcagcaagtctgtgaaggaggcctggaccaccacagagcagctgcagttcaccatctttgctgcccacggcatcagcagcaactgggtgagcaactatgagaagtactacctgatctgcagcctgagccacaacgggaaggacctcttcaagcccatccagagcaagaaggtgggcacctacaagaacttcttctacctgatcaagtgggatgagctgatcatcttccccatccagatcagccagctgcccctggagagcgtgctgcacctgaccctgtttggcatcctgaaccagagcagcggcagcagcccagacagcaacaagcagaggaaaggacctgaggccctgggcaaggtgtccctgcccctgtttgacttcaagcgcttcctgacctgtggcaccaagctgctgtacctgtggaccagcagccacaccaacagcgtgcccggcaccgtgaccaagaagggctacgtgatggagcgcatcgtgctgcaggtggacttccccagccctgcctttgacatcatctacaccaccccccaggtggacaggagcatcatccagcagcacaacctggagaccctggagaatgacatcaagggcaagctgctggacatcctgcacaaggacagcagcctgggcctgagcaaggaggacaaggccttcctgtgggagaagcgctactactgcttcaagcaccccaactgcctgcccaagatcctggccagcgcccccaactggaagtgggtgaacctggccaagacctacagcctgctgcaccagtggccagccctgtaccccctgattgccctggagctgctggacagcaagtttgctgaccaggaggtgcgcagcctggccgtgacctggattgaggccatcagtgatgatgagctgacagacctgctgccccagtttgtgcaggccctgaagtatgagatctacctgaacagcagcctggtgcagttcctgctgagccgggccctgggcaacatccagatcgcccacaacctgtactggctgctgaaggatgccctgcatgatgtgcagttcagcaccaggtatgaacatgtgctgggcgccctgctgtctgtgggcggcaagaggctgcgggaggagctgctgaagcagaccaagctggtgcagctgctgggcggcgtggccgagaaggtgcggcaggccagcggcagcgcccggcaggtggtgctgcagaggtccatggagcgggtgcagagcttcttccagaagaacaagtgccgcctgcccctgaagcccagcctggtggccaaggagctgaacatcaagagctgcagcttcttcagcagcaatgctgtgcccctgaaggtgaccatggtgaatgctgaccccatgggagaggagatcaacgtgatgttcaaggtgggggaggacctgcggcaggacatgctggccctgcagatgatcaagatcatggacaagatctggctgaaggagggcctggacctgaggatggtgatcttcaagtgcctgagcacaggccgggaccggggcatggtggagctggtgcctgccagtgacaccctgaggaagatccaggtggagtatggagtgacaggcagcttcaaggacaagcccctggccgagtggctgaggaagtacaaccccagcgaggaggagtatgagaaggccagcgagaacttcatctacagctgtgccggctgctgcgtggccacctacgtgctgggcatctgtgacagacacaatgacaacatcatgctgcggagcacaggccacatgttccacatcgactttgggaagttcctgggccacgcccagatgtttggcagcttcaagagggaccgggccccctttgtgctgaccagtgacatggcctacgtgatcaatggaggagagaagcccaccatccgcttccagctgtttgtggacctgtgctgccaggcctacaacctgatcaggaagcagaccaacctcttcctgaacctgctgagcctgatgatccccagcggcctgcctgagctgaccagcatccaggacctgaagtatgtgagagatgccctgcagccccagaccacagatgctgaggccaccatcttcttcacccggctgattgagagcagcctgggcagcatcgccaccaagttcaacttcttcatccacaacctggcccagctgcgcttcagcggcctgcccagcaatgatgagcccatcctgtccttcagccccaagacctacagcttccggcaggacggccgcatcaaggaggtgtctgtgttcacctaccacaagaagtacaacccagacaagcactacatctacgtggtgcgcatcctgcgggagggccagatcgagcccagctttgtgttccgcacctttgatgagttccaggagctgcacaacaagctgagcatcatcttccccctgtggaagctgcccggcttccccaacaggatggtgctgggccgcacccacatcaaggatgtggccgccaagaggaagattgagctgaacagctacctgcagagcctgatgaatgccagcacagatgtggctgaatgtgacctggtgtgcaccttcttccaccccctgctgagagatgagaaggccgagggcatcgcccggtctgcagatgctggcagcttcagccccaccccaggccagattggaggagctgtgaagctgagcatctcctacagaaatggcaccctcttcatcatggtgatgcacatcaaggacctggtgacagaagatggagctgaccccaacccctacgtgaagacctacctgctgcctgacaaccacaagaccagcaagaggaagaccaagatcagcaggaagaccaggaaccccaccttcaatgagatgctggtgtacagcggctacagcaaggagaccctgcggcagcgggagctgcagctgtctgtgctgtctgctgagagcctgcgggagaacttcttcctgggcggcgtgaccctgcccctgaaggacttcaacctgagcaaggagaccgtgaagtggtaccagctgacagctgccacctacctgtag

SEQ ID NO: 130605 - DNA, 1947 bp, Artificial Sequence
  derived and/or modified sequence
atggcccagatcagcagcaacagcggcttcaaggagtgccccagcagccaccctgagcccacccgggccaaggatgtggacaaggaggaggccctgcagatggaggccgaggccctggccaagctgcagaaggaccggcaggtgacagacaaccagaggggctttgagctgagcagcagcaccaggaagaaggcccaggtgtacaacaagcaggactatgacctgatggtgtttcctgagagtgacagccagaagagggccctggacattgatgtggagaagctgacccaggccgagctggagaagctgctgctggatgacagctttgagaccaagaagacccctgtgctgcctgtgacccccatcctgagccccagcttcagcgcccagctgtacttccggcccaccatccagaggggccagtggcccccaggcctgcccggccccagcacctacgccctgcccagcatctaccccagcacctacagcaagcaggccgccttccagaatggcttcaaccccaggatgcccaccttccccagcacagagcccatctacctgagcctgcccggccagagcccctacttctcctaccccctgaccccagccacccccttccacccccagggcagcctgcccatctacagacctgtggtgtccacagacatggccaagctgtttgacaagatcgccagcaccagcgagttcctgaagaatggcaaggccaggacagacctggagatcacagacagcaaggtgagcaacctgcaggtgagccccaagtctgaggacatcagcaagtttgactggctggacctggaccccctgagcaagcccaaggtggacaacgtggaggtgctggaccacgaggaggagaagaatgtgagcagcctgctggccaaggacccctgggatgctgtgctgctggaggagaggagcacagccaactgccacctggagaggaaggtgaatggcaagagcctgtctgtggccaccgtgaccaggagccagagcctgaacatccgcaccacccagctggccaaggcccagggccacatcagccagaaggaccccaacggcaccagcagcctgcccaccggcagcagcctgctgcaggaggtggaggtgcagaatgaggagatggccgccttctgccgcagcatcaccaagctgaagaccaagttcccctacaccaaccacaggaccaaccctggctacctgctgagccctgtgacagcccagaggaacatctgtggggagaatgcctctgtgaaggtgtccattgacatcgagggcttccagctgcctgtgaccttcacctgtgatgtgagcagcacagtggagatcatcatcatgcaggccctgtgctgggtgcatgatgacctgaaccaggtggatgtgggcagctatgtgctgaaggtgtgtggccaggaggaggtgctgcagaacaaccactgcctgggcagccatgagcacatccagaactgcaggaagtgggacacagagatccggctgcagctgctgaccttcagcgccatgtgccagaacctggccaggacagcagaagatgatgagacccctgtggacctgaacaagcacctgtaccagatcgagaagccctgcaaggaggccatgaccaggcaccctgtggaggagctgctggacagctaccacaaccaggtggagctggccctgcagatcgagaaccagcacagagctgtggaccaggtgatcaaggctgtgaggaagatctgcagcgccctggatggagtggagaccctggccatcacagaatctgtgaagaagctgaagagagctgtgaacctgcccaggagcaagacagcagatgtgaccagcctgtttggaggagaggacaccagccgcagcagcacccggggcagcctgaaccctgagaaccctgtgcaggtgtccatcaaccagctgtag

SEQ ID NO: 130606 - DNA, 5061 bp, Artificial Sequence
  derived and/or modified sequence
atggcccagatcagcagcaacagcggcttcaaggagtgccccagcagccacccggaaccaacacgcgccaaggacgttgacaaagaggaagctctgcaaatggaagctgaagctttggctaaactccaaaaagacaggcaggtgactgacaatcagcggggatttgagctatcctcatctactcgaaaaaaggcccaggtatacaataagcaggattacgacctaatggtctttccggaatcagactctcagaaacgggctctggatatagacgtggaaaagctcacccaggcagagttggaaaaactgctgctggacgacagtttcgagaccaagaagactcctgtcctcccagtcacaccaattctctccccctctttctccgctcagctctacttcaggcctacaatccagagaggccaatggccgcccggactaccaggcccctcgacctatgctcttccctctatctaccccagtacttactctaagcaggccgccttccaaaatgggtttaaccctaggatgccaacatttcccagcactgaacctatctatctctctcttccaggccagagcccctacttctcataccccttaacacctgcaacccctttccatccccagggctcactgccaatttatcgacccgtcgtctccacagatatggcaaaactgtttgataaaatcgcctctacatccgagttcctgaagaacggcaaagcccgaactgatctagagatcaccgatagcaaggtgagcaatttgcaggtcagccccaaatcagaagatatttccaaatttgactggctggatcttgacccactctcaaaacctaaggtggataacgtggaggtcctggatcacgaagaggagaaaaatgtgagtagtctcctggctaaagatccctgggatgcagttttactggaagaacgatcgacagccaattgtcacctggagaggaaggtgaatgggaaaagtctatccgtcgctacggtaaccagaagtcagtcgctcaacatacgaaccacccagcttgctaaagcacaaggccacatttctcagaaagatcccaatggcacctcttcacttcctaccggctcgagtctcctacaggaagttgaggttcaaaacgaggaaatggctgcgttttgcaggtctattactaagttgaagacaaagttcccctataccaaccatcggaccaaccccgggtatttgctgtcgccagtgactgcccagcggaatatttgtggagagaatgcctctgtcaaggtctcaatagatatcgaaggctttcagctgccagttactttcacatgtgatgtcagttcaacagttgaaatcatcattatgcaggcgctctgttgggtacatgacgacctcaatcaggtcgatgtaggatcctatgtgttaaaagtgtgcggacaggaggaagttctccaaaacaatcactgcctcgggagtcacgaacacatacagaattgtaggaagtgggacacagagatcaggcttcagctactgaccttcagtgcaatgtgccagaacctcgcccgaactgcggaggatgatgagacaccggtggacctgaacaagcacctgtatcagattgagaaaccctgcaaagaagctatgactcgtcaccctgtcgaggaactgctcgacagttatcacaatcaggtcgaacttgccctgcagatcgaaaatcagcaccgtgctgtcgatcaggtgatcaaggcagtacgtaagatctgttcagccctcgacggtgttgagacactagcgatcaccgagtccgtgaagaaactgaaaagagcagtgaacctcccgcggtcgaagaccgctgacgtgaccagtctctttggtggtgaagatacctctaggtcttctactcggggctctctcaatcctgagaacccagtgcaggtatccatcaaccaactgacagcagccatttatgatctgcttcgcctccacgcaaattcaggcagaagtcctacagactgcgcacagagctcaaaatcagtcaaagaagcttggaccacaacggagcagctccagttcaccatcttcgccgcccacggcatctccagtaactgggtcagcaattatgaaaaatactacttaatctgctctctgagccataacgggaaagatctgttcaagcctattcagtcaaaaaaggtagggacttacaaaaacttcttttacctcatcaagtgggatgagctgatcatttttcctatccagatctcacagcttccgcttgaatctgtcttgcacctgactctctttggcatcctgaaccaatcatcaggctcttcccccgacagcaataaacagcgaaaaggccctgaggcccttgggaaggttagcctgcccctttttgactttaagagatttctcacctgtgggactaaactgctatacctttggacttcaagtcatactaatagcgtgccgggcacagtcaccaagaaaggctatgtgatggagcggattgtgttgcaagttgatttcccttcacccgctttcgacatcatctacaccacaccacaagtggacagatcaatcatacaacagcacaacttagagacactggagaacgacatcaagggcaaactgctggatattctacataaagactcaagccttggcctttctaaagaggacaaggcatttctgtgggaaaagagatactattgctttaagcaccccaactgcctgccaaaaattttagcctctgcgccgaattggaaatgggtaaatctggcaaagacatattcactcctccaccaatggccggcgttataccctctgattgcgctggaattgctcgactctaaatttgccgatcaggaagtacggagtttggccgttacttggatcgaggcgattagcgatgacgaactgacggacctacttccacagttcgttcaggcgctcaaatatgagatttatttgaactccagcttggtgcagtttctcctgagtcgtgcgctgggcaacattcaaatagcacacaatctatactggctgcttaaggacgcgctgcatgatgtgcagttcagcacccggtatgagcatgtgctcggggctctgctgtccgtaggcggaaaacgcctaagggaggaactgttaaaacagacaaagctggtccagttgctggggggagtggcagagaaagtgaggcaggccagcggatcagcaagacaagtggttctgcagagatcgatggagcgcgtccagtcctttttccaaaaaaacaaatgccgattgccactgaaaccgtcattagttgctaaggagctgaatattaaaagctgctcattttttagctccaacgctgtacccctaaaggtgacaatggtgaatgctgaccccatgggagaagagatcaacgtcatgtttaaggttggcgaagacttacggcaagacatgttggccctgcagatgattaagatcatggataagatttggttgaaagaggggctggacctgagaatggtgattttcaagtgcctgtcaactggaagggatagaggtatggtggagcttgttcccgccagcgacacacttcgcaaaatacaggtggagtacggcgtgacaggatcattcaaagataagcccctcgccgagtggctgcgtaaatataacccctccgaagaggagtatgagaaagccagtgaaaactttatttactcgtgtgccggatgttgtgtcgccacgtacgttctcggcatttgtgataggcataatgacaatatcatgctgcggtcaaccggtcacatgttccacatagactttggtaaattccttggacacgcacagatgttcgggagctttaaacgtgatcgagcacccttcgtcctgacatccgatatggcatatgtgatcaacggcggcgaaaaacctacgattcgattccagttgtttgtggatctttgttgtcaggcctataatcttataaggaagcaaaccaatctcttcctaaatctgttgtctttaatgataccatctggcttaccagaattgacatccattcaggacttgaaatatgtaagagacgccctgcagcctcagacaactgacgccgaggctacaatattctttacacggctgatagaatcaagcctggggagtatcgccactaaattcaattttttcattcataatctggcccagctcagattttccggattgccatcaaacgatgagcctatcctgagctttagtcccaagacgtacagcttccgtcaggacgggcgcatcaaagaagtaagtgtgttcacgtatcataaaaagtataatcccgacaagcattatatttacgtcgtgcgaattctgcgtgaaggccagatcgagccttctttcgtattcagaacatttgacgagttccaagagcttcataataagctgtccataatattccccctttggaagctgccaggtttccccaatcggatggtattggggagaactcacatcaaagatgtggcggccaaacgtaagatcgagctgaacagttatctgcagtctctgatgaacgcaagtacggacgtggcggagtgcgatttggtgtgcacatttttccaccccctgcttcgggatgagaaggctgagggtatcgcgaggagtgccgacgctgggtctttcagccccacacccggccagattggcggcgccgtgaaactctcaatctcatatcggaatgggactttattcatcatggtgatgcacattaaggatctggtaacagaagatggcgcggacccaaacccttatgtgaaaacgtacctccttcctgataaccacaaaacctcaaaacggaagactaagatcagtagaaaaaccaggaacccgactttcaatgaaatgctggtgtactctggatactcaaaggaaacattgagacagcgcgagcttcagctcagcgtgttaagcgctgagagtctgagggaaaatttcttcctcggaggtgtgacactgccactcaaagacttcaacctttccaaggagaccgtgaagtggtatcaactcactgccgcaacttacctctag

SEQ ID NO: 130607 - DNA, 393 bp, Artificial Sequence
  derived and/or modified sequence
atggcccagatcagcagcaacagcggcttcaaggagtgccccagcagtcacccagagcctaccagggcaaaagacgtggacaaggaggaggccttgcaaatggaggccgaagcactggccaaactgcaaaaggataggcaagtgaccgacaaccaaaggggctttgaactcagcagctccacccgaaaaaaagcgcaagtctacaataaacaggactacgacctgatggtatttcccgagtcggattcccagaagagagcccttgatattgacgtcgaaaagctcactcaggccgagttggaaaagttattgttagacgactcatttgagacgaagaagactcctgtacttcccgtgacgcccatcctctccccttcctttagcgcccagtag

SEQ ID NO: 130608 - DNA, 3921 bp, Artificial Sequence
  derived and/or modified sequence
atggccgccttctgccggagcatcaccaagctgaagaccaagttcccatacactaatcacaggaccaaccccggctatcttctatcccctgtaacagcccagcggaatatttgcggtgagaatgcgtcagttaaagtgtcaatcgatatcgagggctttcagctgcccgttacttttacttgcgacgttagctctacagtggagatcataataatgcaggccctatgctgggtacatgacgatcttaatcaggtcgacgtggggtcatatgtgctgaaagtatgtggccaggaggaagtgctgcagaacaatcattgtcttgggtcgcacgaacatatccagaattgtcgcaagtgggacacggagataagattgcagttgcttacgtttagtgcaatgtgtcagaacctcgcacgtaccgctgaggatgacgagactccagtggatctgaacaaacacctgtatcaaatagagaaaccttgtaaggaggccatgacaagacatcccgtggaagaactcctggactcttatcacaaccaggtggagctggctctgcaaatcgagaaccagcatcgagctgtggatcaggtgatcaaggccgttaggaaaatctgctctgctcttgatggagttgaaaccttggccatcactgagagcgtgaagaagctgaagcgcgcggtgaacctccctagaagtaagactgctgatgtaacatctttatttggcggcgaggatacgtcgcgttctagcacccggggctcactgaaccccgagaatcccgttcaggtctctatcaatcagctgactgctgccatctatgacctcctcaggttacacgctaattccggaagatccccaacagactgtgcgcaatcatccaaatctgtcaaggaagcatggaccacgacggagcagttacagttcaccatattcgctgcccacggaatttctagtaattgggttagtaactacgaaaagtactatctgatctgttctttgagtcacaatggaaaagacctgtttaagccaatacagtccaaaaaggtgggtacttataaaaactttttctacctaatcaaatgggatgaacttattatttttcccatacaaattagccagctgcccctcgaatcagtgttgcacttaacgctgtttggaatcctgaaccagagttccgggtcttcccctgactccaacaagcaacgtaagggtccagaggctctgggtaaggtctccctgcctctgtttgacttcaaaaggtttctgacttgcggcacgaagctcctatacctgtggacctccagccacaccaactctgttccagggaccgtcactaagaaaggatacgtgatggagagaatcgtgctgcaggtagatttcccatctccagcgttcgatataatctacacaacacctcaggtggatcgcagtatcatccagcaacataacttggagacactggagaatgacattaagggtaagctgttggacattctccataaagacagttcgctcgggctctcgaaggaggacaaggcatttctgtgggaaaagcggtactattgctttaagcatcctaactgcctgcccaaaattctggcatccgcacctaattggaaatgggtgaacctcgccaagacctattctttgttacaccagtggccagcgctgtacccattgatcgctctcgagcttctggatagtaaatttgctgatcaggaagtgcgctcactcgcggtgacttggattgaggccataagcgacgacgagctgactgacctcctgccccagtttgtgcaggccctcaagtacgaaatctatctcaactcctcattggtccaatttctcctctcaagagccctgggtaacattcagatcgctcataatctctattggctgctaaaggacgccttgcacgatgtgcagttcagcactcggtatgagcacgtcctgggcgccttattaagcgttggtggaaaaaggctgcgggaggagctgctgaaacagacgaaactggtgcagttgttgggtggggtggccgagaaagtcaggcaggcctccggctcggcacgtcaagtcgtattgcagcgaagcatggaacgggtgcagagcttcttccagaagaataaatgccggttgcccctaaaaccatcactggtcgcaaaagagctaaatatcaaatcctgttccttcttctcttcaaacgccgtacccctcaaggtaactatggtgaatgcagaccctatgggcgaagaaatcaacgtaatgtttaaggtcggcgaggacctcaggcaggacatgctggcgctgcagatgatcaaaattatggacaagatctggttaaaagagggattggacttgcggatggtcatattcaagtgtctgtcaaccggccgggatagaggcatggtagaactggttcccgctagtgacacacttagaaaaattcaagtggaatacggggtgaccggatctttcaaggacaagccactcgccgagtggctgaggaagtacaacccttccgaggaggagtacgagaaggccagcgagaattttatctactcctgcgctggctgttgcgtggctacttatgtgctcggaatctgtgatcgtcacaatgacaatatcatgctaagatcaactggacacatgtttcatattgactttggcaaattcctcggtcatgcgcagatgttcgggagtttcaaacgagatcgcgcacccttcgttctaactagcgacatggcgtacgttatcaatggcggcgagaaaccgacaatcagattccagttgtttgtggatctatgctgtcaggcctataaccttatccgcaagcagaccaatctgtttctgaacctcctgagcctgatgattccttcaggcctacccgaattgaccagcatacaggatttgaagtacgtgcgtgacgccctgcagccccagaccaccgatgccgaagccaccattttcttcactcggcttatcgagagctccctcggttcaattgcgaccaagttcaacttttttatacataacctggcccagttgcgattttctggtcttcctagcaatgacgagcccattctctcattttctcctaagacctacagttttagacaggacggtcggataaaagaggtgagcgtatttacataccataagaaatacaacccggacaaacactacatttatgtggtccggattctgcgtgaaggacagattgaaccatcgtttgtgttcagaacatttgacgaatttcaggagctccataacaagctgtctattatcttccccttatggaagttgccagggttccctaatagaatggtacttggtcgtacacacatcaaagacgtggcagccaaaagaaaaattgagttaaacagttatctgcaaagccttatgaatgctagtacagatgtcgccgagtgtgatcttgtgtgtacttttttccaccccctgcttagagacgaaaaggcagagggcattgctaggtcggccgacgcgggttccttcagcccaactcctggccaaattgggggcgccgtcaagttgagtatttcataccggaacgggacactcttcatcatggtgatgcatatcaaggatctggtgactgaggatggggctgacccaaatccctatgtcaagacgtatctgctgccagataaccacaaaacatctaaaagaaaaactaagatttcaagaaagactcgaaacccgacctttaacgagatgctggtctacagcggttatagcaaagagacccttcgccaaagggagctgcaactatccgtgctcagcgccgaaagcctaagggagaatttctttttgggcggtgtcactctgcctctgaaagattttaacctgagcaaagagactgtcaaatggtaccaacttacagccgccacatatctctag

SEQ ID NO: 130609 - DNA, 1947 bp, Artificial Sequence
  derived and/or modified sequence
atggcccagatcagcagcaacagcggcttcaaggagtgccccagctcgcatcctgaaccaacccgcgccaaggatgttgataaggaggaggccctacagatggaggcggaggcacttgccaagcttcagaaggatcggcaggtaactgacaatcagcgtggctttgagttgagctcttcgacgcgaaaaaaagcgcaggtatataataaacaggattacgacctgatggtctttccagagagcgatagtcaaaaaagggctctcgatatagatgttgaaaaactgactcaagcagagctggaaaaactcctgctggacgacagctttgagaccaagaagactccggtgctccctgtgacccccatcttatctccaagcttcagcgcgcaactgtactttcgaccaacaatacagcggggccagtggccacccgggcttccgggcccatcaacgtatgccctgccttctatttacccaagcacttattccaagcaagccgcttttcagaacggattcaatcctcgtatgccgacttttcctagtaccgagccaatttacctaagcctgccgggacagtccccatacttcagctaccccctgaccccagctactccattccatccccaggggagcctgccaatttatagaccagtcgttagcaccgacatggccaagttattcgataagatcgcttccacatcagaattcctcaaaaatggcaaagcacgcaccgacttggaaatcaccgattcaaaggtgtcaaacctccaggtttcacctaagagcgaggacattagtaagttcgactggctggatcttgatccactgtcaaagccaaaggtggataatgtagaggtgctggatcacgaggaagagaagaatgtctcgagcctcttagctaaagatccctgggacgctgtgctattagaggagcggtccacagctaactgtcacttggaaaggaaggtcaatggcaagtcgctgtcagtagctacggtgaccaggtcgcagtcactgaatataaggactacacaactggccaaggcccaaggccatatctcccagaaagaccccaatggtaccagtagccttccgactggttcatctctgctgcaagaggtcgaggtgcagaatgaggaaatggccgctttctgccgatcgattaccaagctgaagactaaatttccttatactaatcaccggacgaaccccgggtacctgctgagtccagtgacagcacagcggaacatttgtggcgaaaatgcaagcgtgaaggttagtatcgacatcgagggattccagttaccagtaaccttcacctgcgatgtgagctccaccgtggaaataataatcatgcaggctctgtgttgggtgcacgatgatcttaaccaggtcgacgtgggcagctacgttctcaaagtctgtggtcaggaggaggttcttcagaacaaccattgtctcgggtcccacgagcacatccagaactgcaggaagtgggacacagagatcaggctgcaattactgaccttctccgctatgtgccagaatctggcccggacagcagaagacgacgagacccctgtagaccttaataaacacctgtaccagatcgaaaaaccctgcaaagaggcgatgacaaggcatcccgtggaagagctcctggactcatatcacaatcaggtggagcttgccctccagattgagaaccaacatcgggccgtggatcaggtaattaaggccgtacggaaaatctgttccgccctcgacggcgtcgagaccctggccatcacagaaagcgtcaagaagctcaagagggcagtgaatctaccccgctctaagactgccgatgtgacaagtttgttcggaggcgaggacacatctcgaagctccactagaggatcactcaacccagaaaaccccgttcaggtgagtataaaccagctctag

SEQ ID NO: 130610 - DNA, 5061 bp, Artificial Sequence
  derived and/or modified sequence
atggctcagatctcttctaattctggcttcaaggagtgcccaagttctcacccagaacctacacgcgcaaaagacgttgataaggaggaggcattacagatggaggcagaagccttggccaagcttcaaaaagaccgccaggtgaccgacaatcaaagggggtttgagctctcctccagcacacggaagaaagctcaagtatacaacaagcaggattatgatctgatggtgtttccggagtcagatagtcagaagcgcgctcttgatatcgatgtggagaagctgacccaggccgaactggagaagctgttactcgatgacagtttcgaaactaagaaaacccctgtgttaccggttactccaatcctttctccatctttcagcgcacaactctattttaggcctacaatccaacgcggacagtggcccccaggacttcccggtccctcaacctacgcgctcccgtccatctacccgtccacctatagcaagcaggctgctttccagaacggcttcaatcctcggatgcctaccttcccttctaccgagcctatctatctaagcctgcctggtcagtcaccctatttcagctaccccttaactccggctaccccatttcatccacagggttcattgccaatctacagacccgtggtcagtacagatatggcgaaactatttgacaaaatcgcctctacaagcgaattcctaaaaaacggaaaggctcgtaccgacctggagataacagactccaaagtctccaaccttcaggtaagtccaaaaagcgaagatatttccaaatttgattggttggatctggatcctttgtccaaaccaaaggtggacaacgtggaagtcctcgatcatgaggaggagaaaaatgtatcgtcactgctcgctaaagacccatgggatgcggttctcctcgaggaaagatctaccgccaattgccatctggaaaggaaggtgaatgggaaatccttatcggtcgccactgtcactagaagtcagagcttgaacatccgcacaacccagctggcaaaggcacagggccatatatcgcagaaagaccctaacggaacttcatctctgcctaccggcagttcacttctgcaggaagtcgaggtccagaatgaagagatggctgccttctgccgcagcatcacaaaactgaaaacaaaatttccatatacaaaccatcggacaaaccctgggtacctcctgagtccagtgacagcccagcggaacatctgtggggaaaatgcttcggtcaaggtgagcattgatattgagggcttccagttgccagtcaccttcacttgcgacgttagcagcaccgtggagattattattatgcaggcattgtgttgggttcacgatgatttgaaccaggtggatgtaggatcttacgttctcaaggtctgtggtcaggaggaagtgttgcagaataaccactgcttaggctcccacgaacacatccagaactgtaggaagtgggacaccgaaatccgcctccagctgcttactttttcagctatgtgccagaatctggcccgaaccgctgaagacgacgagactccagtcgacttaaacaagcatctgtaccagattgaaaagccttgtaaagaagccatgaccaggcacccagtggaagaattattagattcctatcacaaccaggtggaactcgctctccagattgagaatcagcaccgcgctgtagatcaggtcattaaggcggtacgcaagatatgctctgccctggatggtgtggagaccctggcgattacggagagcgtgaagaagctcaagcgagcggtgaatctcccccgatccaagacagctgatgtgacaagcctttttggaggggaggacacttccagatcttcgactagaggctcgctgaacccggagaaccctgtccaggtgagcataaaccagctgaccgcagctatctacgatctgttgcggctgcatgccaatagtggtaggagtccaactgactgcgctcagagttcaaaatctgtgaaggaggcttggacaaccaccgaacagttgcagtttaccatctttgcggctcacggtattagctctaattgggtgagtaattacgagaaatactacctgatttgctccttgtcccacaacggaaaagaccttttcaagcccattcagtctaaaaaagtcggaacctataaaaatttcttctacttaatcaagtgggatgaacttattatttttcctattcagataagccagctgcccctcgagtcagtactccacctcacactgttcggaatcctcaaccagtcatcaggcagttcccctgactctaataagcagagaaagggaccggaagccttggggaaggtgagtctgccactcttcgatttcaagcgctttttgacatgcggcacaaaactgttgtacttatggacgtcctcacacacaaacagcgtgccaggtaccgtcaccaaaaagggatacgtgatggaacggattgttctgcaggtcgacttcccgagtcccgcttttgacattatttacacaacgccccaggtcgatcggtcaattatccagcagcacaatctggagactctcgaaaacgatattaagggcaaattgctggacatcctccacaaagattccagcctcgggctttctaaagaagataaagctttcctgtgggagaaacggtattactgcttcaagcacccaaactgcctgccaaagatcctggcaagtgcaccaaattggaagtgggtcaacctagctaagacttattcactgttacaccaatggccggcactgtaccccctcatcgcccttgagctgcttgattccaaattcgctgatcaggaagtgaggtctctcgcagtgacctggatcgaagccattagcgacgatgagcttacagatctcctgccacagttcgtacaggccctgaaatatgaaatctatctcaactccagtctagtccagttccttctgagccgagccttgggaaacatacagatcgcccataatctctattggctcctgaaggatgccctgcacgacgttcagttttcaacgaggtatgagcacgtgctcggtgctctgctgtctgtgggagggaagcggttgagagaagagctcctgaagcagacgaagctggtccagttattaggaggcgttgcagaaaaagtccgccaagcttctggatcagcaaggcaggtggttctccagcggagcatggagcgcgttcagtcatttttccagaaaaacaagtgtagactgccattgaagcccagtctggtcgccaaggaactcaatattaagagctgcagcttcttctcttcaaacgccgttcctctcaaagtgactatggtcaatgcggatccgatgggcgaggaaattaatgtgatgttcaaggttggtgaggatctgcgccaggacatgctggcccttcagatgataaagatcatggataaaatctggcttaaggagggtctggatctgcgcatggtgattttcaagtgcttaagcacaggtagggatcggggaatggtggaactggtgccagcctccgacaccctacggaagatccaggtcgagtacggggtgaccggttcctttaaggataagcctctggctgagtggctccgaaagtataatccctctgaagaagagtatgaaaaggcttccgagaatttcatctactcatgcgctggctgctgcgtggccacctacgtcctgggcatatgcgatcgccacaacgataacattatgctccgatcaaccgggcacatgttccacattgactttggcaagttcctgggtcacgcccagatgttcggttccttcaaaagagatcgtgcaccctttgtgctcacaagcgatatggcgtacgtcatcaatgggggagagaagcccactataaggtttcagttattcgtggacctttgttgtcaagcgtacaacttgataagaaaacagacgaatttattcctcaatctcctgtcccttatgattccatctggtctgcctgagctgacctccatccaagacctcaaatatgtgcgggatgccttgcaaccgcagactacggacgccgaggcaactatctttttcacccggctgattgagtcgtccctgggttccatcgctaccaagtttaatttctttattcataatttggcccagttgcggttcagtggccttccctccaatgacgaacccattctaagtttctcccctaaaacatactccttccgacaagacggcaggattaaggaggtgagcgtgtttacgtatcataaaaagtataacccagacaagcactacatttatgtagtgcgcatcctccgggagggacagatcgagccatcgtttgtgttccgaactttcgatgaattccaggagttgcataacaagctctccataatttttcctctctggaaactgccaggattcccgaatcgcatggtactgggccgtacgcacatcaaagacgtcgccgctaagcgcaagatcgaactaaacagctacttacaatctctgatgaacgcgtccactgatgttgctgagtgcgacctagtttgtactttcttccacccgctgttaagggatgagaaggccgaagggattgcaaggtcagctgacgccggatccttctctccaacccctggccagatagggggtgctgtgaaactgagtatatcctatcgcaacgggactctctttatcatggtaatgcatatcaaggatctggtgaccgaggacggggcagaccccaatccctacgtgaaaacttatctactgccagacaaccataagacctccaagcgtaagactaagataagtcgcaagacccgaaatcccacatttaatgaaatgctggtatactccggctattcaaaggaaactctcagacagagagaactgcagctgtcagtgttgtcagccgagagcctgagggaaaatttcttcctcggaggagtgacactcccgcttaaagattttaacttgtcaaaggagactgttaaatggtaccagctgaccgcggctacctacctctag

SEQ ID NO: 130611 - DNA, 393 bp, Artificial Sequence
  derived and/or modified sequence
atggcacagattagctctaactcaggatttaaagagtgccctagctcacacccggaacctactcgcgctaaggacgtggacaaagaagaggccctccagatggaggccgaggccctggctaaactccagaaggacaggcaagttaccgacaaccaacggggatttgaactgtcaagctctacccgcaaaaaggctcaagtgtacaataagcaggattacgatctaatggtcttcccggagagtgactcccaaaaacgagctctggacatagacgtcgaaaagttgacacaggcagagctagaaaagctgttactcgacgatagtttcgaaacgaaaaagactccagtattgccggttactccaatattgagccccagttttagtgcacagtag

SEQ ID NO: 130612 - DNA, 3921 bp, Artificial Sequence
  derived and/or modified sequence
atggcagctttctgtaggtcgataacaaagttgaaaacaaaattcccctacaccaatcacaggaccaacccgggttacctgttaagccctgtgaccgcccaacgcaacatctgcggtgagaatgcctcggtgaaggtgagtatcgatatagaaggcttccaactaccagtgacattcacatgtgacgtctcctccaccgtcgaaatcatcatcatgcaggccctgtgctgggttcacgatgacctgaaccaggtggatgtgggctcttacgtgctgaaggtgtgcggacaggaggaggtgctacaaaacaatcactgtctaggctcccatgaacatatccagaactgcaggaagtgggacaccgagatacgactgcagctgctcactttttcagctatgtgccagaacctagcacggacggctgaagacgacgagactcctgtggatctcaataaacatctctaccaaatcgagaagccttgcaaggaggcgatgacacgacacccagtggaggaattgctggattcttatcacaaccaggtggagctggctctccaaatcgagaaccagcatcgcgctgttgaccaagtgataaaagcagtgcggaaaatctgttcagcactcgacggcgttgagaccctcgcaataaccgaatccgtgaaaaagcttaagcgtgccgtcaatctcccccgatcaaaaaccgcagatgtgacttctctgttcggtggcgaggatacgtccaggtcatcaacacgcggatctttgaatcccgaaaaccccgtgcaggtttctataaaccagttgacagccgctatatacgacctgctcagactgcatgccaacagcggtcggtcacctacagattgtgctcagagtagcaagagtgtgaaggaagcctggacaactacagagcaactccaattcactatctttgccgctcatggcatcagttcaaattgggtgagtaactatgaaaaatactacttaatttgctccttgagtcataacggtaaggatctcttcaagcctatccaatccaagaaggtcggaacttacaagaattttttttacctcatcaagtgggatgaattgatcattttccctatccagattagtcagttgcccctcgagagcgtactgcacttgaccctattcgggatcctaaatcagagttccggcagtagccccgattctaataagcagcgcaagggcccagaagcgttagggaaagtcagcctgcctctgttcgactttaagcgctttctcacatgcggtacaaagctcctctacctgtggacttcaagccataccaactcagttcctgggaccgtgactaaaaagggctatgtgatggagcgcatcgttctacaggtggacttccccagcccggcatttgatatcatttacaccactccgcaagtggatcgcagcatcatacagcaacacaatctggaaactttggaaaacgatatcaagggcaagctgctggatattctccacaaggattccagccttgggctgtctaaggaagacaaagccttcctgtgggagaagcgctactactgttttaagcacccaaattgcctgccgaagatcctggcgagtgcccctaactggaaatgggtgaatctggccaaaacatactctctgctgcatcagtggccagctctgtatcctctcattgccttggagctcttggattctaagtttgctgatcaagaagtgagatctctcgctgtcacatggatcgaggctataagcgacgatgagcttaccgacctgttgcctcagtttgtgcaagccttgaaatatgagatatatctcaactccagtctcgtccagttcctgctgagccgcgctttaggcaacattcagatcgcgcacaacctgtattggctactcaaggacgcgctgcatgacgtgcagtttagcacgaggtacgaacacgtgttgggagccctcttgtccgttggaggaaagaggctgcgtgaggaactgcttaaacaaaccaagcttgtccagctgctcggaggagttgctgaaaaggttaggcaagccagtggttccgccagacaggtggtactccagcggagtatggaacgtgttcaatccttttttcagaaaaataaatgccgcctgcctctgaaaccgagtctcgtggcaaaggagcttaatatcaagtcctgcagtttctttagctctaacgctgtcccactgaaggtaaccatggttaacgcagatcctatgggcgaagagattaacgtcatgtttaaggtgggtgaagacttgcgacaggatatgttagctttacagatgataaagatcatggacaaaatttggcttaaggagggcctcgatctacgcatggtaatattcaaatgtctgtcaactggtcgagaccgcggaatggtggagctcgtgcccgcatccgataccctgaggaagattcaggtagagtatggagtcaccggaagctttaaggataagcctctggctgaatggcttaggaagtataatcccagtgaagaggagtacgagaaggcttccgaaaacttcatctactcctgtgcaggctgttgtgtggcgacatatgttctgggaatctgtgacagacacaacgacaacatcatgctgcgttcaaccggccatatgtttcacatagatttcggcaagttcctggggcatgcacagatgttcgggtcctttaaacgcgacagagcacctttcgtcctgacatctgatatggcctacgttatcaacggaggggagaagcccacgatccggtttcagcttttcgtggacctctgttgccaagcttacaatctcatcagaaagcagactaatctgtttctgaatctccttagcctcatgataccgagtggcttgccagaactgacttcaatacaggacctaaagtacgtgagagacgcacttcaacctcagacaactgacgccgaggctaccatcttttttactcgattgattgagagtagtctcggatccattgccactaagttcaacttctttatccataacctggcccagttacgcttcagcggcctcccttctaatgatgaaccgattctttctttttctcccaagacgtactctttccgacaggacggccgaattaaggaagtgtctgtctttacctaccacaaaaaatataatccagacaagcattatatctatgtggtcagaatcctgcgggaaggccagattgaaccaagctttgtctttaggacctttgatgagtttcaggagctccacaataagcttagcatcattttcccactctggaagctccctggcttcccaaacagaatggttctagggagaacccacattaaggacgtcgcagcaaagcgtaagattgagctgaacagttatctccagtccctgatgaacgcttcaaccgatgtggccgagtgtgacctggtgtgtactttttttcacccactgttgcgggatgaaaaagccgaaggaatcgccagaagtgctgatgctgggtctttttctcccaccccgggacaaatcggcggagctgtaaaactgtctatctcataccgaaacgggacactattcattatggtcatgcatattaaggatctggtcactgaggatggagcggatccaaacccctacgttaaaacctatttattgcccgataatcacaaaacatccaaacgcaagactaagataagcaggaagacccggaatcctaccttcaatgaaatgttagtttacagcgggtattctaaagagacccttcggcagcgagagctgcagctgtctgtgttgtctgccgagagcttaagagagaacttctttctcggaggagtgacccttcctctcaaagatttcaacctaagcaaagaaacagtgaagtggtatcagctcaccgccgctacctacctgtag

SEQ ID NO: 130613 - DNA, 1947 bp, Artificial Sequence
  derived and/or modified sequence
atggcacagatctcaagtaactctgggtttaaggagtgcccttccagtcatccagaaccaacaagagcaaaggatgtggacaaagaggaagcgctgcagatggaggcagaagcacttgctaagctgcagaaggaccggcaggtcaccgacaatcaacgcggattcgaactgtcgtcctctaccagaaagaaagcccaggtctataacaagcaggattacgacctgatggtctttccggaaagtgatagtcagaagcgtgccttggacattgacgtcgagaaactaactcaggccgagctggagaagttgctgctagatgacagtttcgagacgaagaaaacaccagtgttgcctgtgacgcccatactgtcaccttcctttagtgctcaactgtatttccggccaactatccagcgcggtcagtggcctcctggcctgcctggcccaagcacctacgcccttcctagcatatacccttcaacctattcaaagcaggcagccttccagaacggctttaaccccagaatgcccactttcccttctaccgagcccatttacctgagtctgcccggacagagcccctacttctcgtaccccctcacacccgctacccccttccacccacaggggtctcttcccatttacagacctgtggtaagcacagacatggcaaagctctttgacaaaatcgccagtactagcgaatttttgaagaacggcaaagctcgcaccgacctggagatcactgatagcaaagtgagcaacttacaagtgagtcctaagtccgaggatataagcaaattcgactggctcgatctggacccattaagtaaacccaaggtggacaacgtggaagtccttgaccacgaagaggagaagaatgtgagctcgctcctggctaaagacccgtgggacgcagttttactcgaagagcggtccacagccaattgccatctggagaggaaggtcaacggcaagtccctatccgttgccaccgtcacccgcagccagtccttaaatatccgcaccacgcaactcgcaaaggcccagggacacatttcccagaaggatccaaacggtacttcttcgcttcccacaggatcctcacttctgcaagaggtcgaagttcaaaacgaggagatggctgcattctgtcgctctatcactaagttaaaaacaaaatttccatatacaaaccacaggactaatcctggctatctgctgtctcccgtgaccgcacagaggaatatttgcggagagaacgccagcgtaaaggtctctattgacatcgaaggtttccagcttcccgttacctttacctgcgatgtgagttccacagtagagatcatcataatgcaggctctatgttgggtgcacgacgacttgaaccaggttgacgtcggcagttacgtgctaaaggtttgtggacaagaggaagtgctgcagaacaaccactgcctgggctctcacgaacacatccagaactgccgaaagtgggatactgagattcgtttgcagctcctgacttttagcgcgatgtgtcagaacctcgctagaacggccgaggacgacgagacaccagtagatctgaataaacatctttaccaaatcgagaaaccgtgtaaggaggcgatgactcggcaccccgtggaagaactgcttgattcatatcacaatcaggtggagctcgccttgcagattgaaaaccagcatagagcggtagatcaggtgatcaaggccgtccgaaaaatctgcagtgccctggacggagtggagactctcgctatcaccgaatctgtaaaaaagctgaagcgagcagttaacctgcctagaagcaagacagccgatgtcacctctctctttggcggagaggacaccagccgaagttctacccggggtagccttaaccctgagaacccagtgcaagtgtcaattaatcaactgtag

SEQ ID NO: 130614 - DNA, 8227 bp, Artificial Sequence
  derived and/or modified sequence
atggctcagatatctagcaacagcggatttaaagaatgtccatcttcacatccggaaccaacaagagcaaaagatgtggacaaagaagaagcattacagatggaagcagaggctttagcaaaactgcaaaaggatagacaagtgactgacaatcagagaggctttgagttgtcaagcagcaccagaaaaaaagcacaggtttataacaagcaggattatgatctcatggtgtttcctgaatcagattcccaaaaaagagcattagatattgatgtagaaaagctcacccaagctgaacttgagaaactattgctggatgacagtttcgagactaaaaaaacacctgtattaccagttactcctattctgagcccttccttttcagcacagctctattttagacctactattcagagaggacagtggccacctggattacctgggccttccacttatgctttaccttctatttatccttctacttacagtaaacaggctgcattccaaaatggcttcaatccaagaatgcccacttttccatctacagaacctatatatttaagtcttccgggacaatctccatatttctcatatcctttgacacctgccacaccctttcatccacaaggaagcttacctatctatcgtccagtagtcagtactgacatggcaaaactatttgacaaaatagctagtacatcagaatttttaaaaaatgggaaagcaaggactgatttggagataacagattcaaaagtcagcaatctacaggtatctccaaagtctgaggatatcagtaaatttgactggttagacttggatcctctaagtaagcctaaggtggataatgtggaggtattagaccatgaggaagagaaaaatgtttcaagtttgctagcaaaggatccttgggatgctgttcttcttgaagagagatcgacagcaaattgtcatcttgaaagaaaggtgaatggaaaatccctttctgtggcaactgttacaagaagccagtctttaaatattcgaacaactcagcttgcaaaagcccagggccatatatctcagaaagacccaaatgggaccagtagtttgccaactggaagttctcttcttcaagaagttgaagtacagaatgaggagatggcagctttttgtcgatccattacaaaattgaagaccaaatttccatataccaatcaccgcacaaacccaggctatttgttaagtccagtcacagcacaaagaaacatatgcggagaaaatgctagtgtgaaggtctccattgacattgaaggatttcagctaccagttacttttacgtgtgatgtgagttctactgtagaaatcattataatgcaagccctttgctgggtacatgatgacttgaatcaagtagatgttggcagctatgttctaaaagtttgtggtcaagaggaagtgctgcagaataatcattgccttggaagtcatgagcatattcaaaactgtcgaaaatgggacacagaaattagactacaactcttgaccttcagtgcaatgtgtcaaaatctggcccgaacagcagaagatgatgaaacacccgtggatttaaacaaacacctgtatcaaatagaaaaaccttgcaaagaagccatgacgagacaccctgttgaagaactcttagattcttatcacaaccaagtagaactggctcttcaaattgaaaaccaacaccgagcagtagatcaagtaattaaagctgtaagaaaaatctgtagtgctttagatggtgtcgagactcttgccattacagaatcagtaaagaagctaaagagagcagttaatcttccaaggagtaaaactgctgatgtgacttctttgtttggaggagaagacactagcaggagttcaactaggggctcacttaatcctgaaaatcctgttcaagtaagcataaaccaattaactgcagcaatttatgatcttctcagactccatgcaaattctggtaggagtcctacagactgtgcccaaagtagcaagagtgtcaaggaagcatggactacaacagagcagctccagtttactatttttgctgctcatggaatttcaagtaattgggtatcaaattatgaaaaatactacttgatatgttcactgtctcacaatggaaaggatctttttaaacctattcaatcaaagaaggttggcacttacaagaatttcttctatcttattaaatgggatgaactaatcatttttcctatccagatatcacaattgccattagaatcagttcttcaccttactctttttggaattttaaatcagagcagtggaagttcccctgattctaataagcagagaaagggaccagaagctttgggcaaagtttctttacctctttttgactttaaacggtttttaacatgtggaactaaacttctatatctttggacttcatcacatacaaattctgttcctggaacagttaccaaaaaaggatatgtcatggaaagaatagtgctacaggttgattttccttctcctgcatttgatattatttatacaactcctcaagttgacagaagcattatacagcaacataacttagaaacactagagaatgatataaaagggaaacttcttgatattcttcataaagactcatcacttggactttctaaagaagataaagcttttttatgggagaaacgttattattgcttcaaacacccaaattgtcttcctaaaatattagcaagcgccccaaactggaaatgggttaatcttgccaaaacttactcattgcttcaccagtggcctgcattgtacccactaattgcattggaacttcttgattcaaaatttgctgatcaggaagtaagatccctagctgtgacctggattgaggccattagtgatgatgagctaacagatcttcttccacagtttgtacaagctttgaaatatgaaatttacttgaatagttcattagtgcaattccttttgtccagggcattgggaaatatccagatagcacacaatttatattggcttctcaaagatgccctgcatgatgtacagtttagtacccgatacgaacatgttttgggtgctctcctgtcagtaggaggaaaacgacttagagaagaacttctaaaacagacgaaacttgtacagcttttaggaggagtagcagaaaaagtaaggcaggctagtggatcagccagacaggttgttctccaaagaagtatggaacgagtacagtccttttttcagaaaaataaatgccgtctccctctcaagccaagtctagtggcaaaagaattaaatattaagtcgtgttccttcttcagttctaatgctgtccccctaaaagtcacaatggtgaatgctgaccctatgggagaagaaattaatgtcatgtttaaggttggtgaagatcttcggcaagatatgttagctttacagatgataaagattatggataagatctggcttaaagaaggactagatctgaggatggtaattttcaaatgtctctcaactggcagagatcgaggcatggtggagctggttcctgcttccgataccctcaggaaaatccaagtggaatatggtgtgacaggatcctttaaagataaaccacttgcagagtggctaaggaaatacaatccctctgaagaagaatatgaaaaggcttcagagaactttatctattcctgtgctggatgctgtgtagccacctatgttttaggcatctgtgatcgacacaatgacaatataatgcttcgaagcacgggacacatgtttcacattgactttggaaagtttttgggacatgcacagatgtttggcagcttcaaaagggatcgggctccttttgtgctgacctctgatatggcatatgtcattaatgggggtgaaaagcccaccattcgttttcagttgtttgtggacctctgctgtcaggcctacaacttgataagaaagcagacaaacctttttcttaacctcctttcactgatgattccttcagggttaccagaacttacaagtattcaagatttgaaatacgttagagatgcacttcaaccccaaactacagacgcagaagctacaattttctttactaggcttattgaatcaagtttgggaagcattgccacaaagtttaacttcttcattcacaaccttgctcagcttcgtttttctggtcttccttctaatgatgagcccatcctttcattttcacctaaaacatactcctttagacaagatggtcgaatcaaggaagtctctgtttttacatatcataagaaatacaacccagataaacattatatttatgtagtccgaattttgagggaaggacagattgaaccatcatttgtcttccgaacatttgacgaatttcaggaacttcacaataagctcagtattatttttccactttggaagttaccaggctttcctaataggatggttctaggaagaacacacataaaagatgtagcagccaaaaggaaaattgagttaaacagttacttacagagtttgatgaatgcttcaacggatgtagcagagtgtgatcttgtttgtactttcttccaccctttacttcgtgatgagaaagctgaagggatagctaggtctgcagatgcaggttccttcagtcctactccaggccaaataggaggagctgtgaaattatccatctcttaccgaaatggtactcttttcatcatggtgatgcatatcaaagatcttgttactgaagatggagctgacccaaatccatatgtcaaaacatacctacttccagataaccacaaaacatccaaacgtaaaaccaaaatttcacgaaaaacgaggaatccgacattcaatgaaatgcttgtatacagtggatatagcaaagaaaccctaagacagcgagaacttcaactaagtgtactcagtgcagaatctctgcgggagaattttttcttgggtggagtaaccctgcctttgaaagatttcaacttgagcaaagagacggttaaatggtatcagctgactgcggcaacatacttgtaaactagtgaatgtttgagctttggaagcatgaacagttataaacgtgcatgcatacatgcacacacacacagacacacacacacacacttgttaattttgtatagtatttttatacttggacagaacttataaagttaaatatacttgctgcatttcaacacatctgttggaccaacagtcacataactaacctttttgaatttttggaagccattgctgttttaaagtcattatgtagaatgctacaaaccctaaacttaatatatactaattcctgaaaaagactttgagacagtactatgtcagttcagccacctattttgcattgttttctataaggaggcaaagcatatgtgttttcctgttatgcaccttttatagcctttaccactgtgtaatgttcacaaacaccaaagtaaaggaaaaatgcaggatgttaccgtaaaatccagctgctattcatggagctgaaaaacaaagcacaaataatagatagctaagttaagaactactaagtagtttatagaagtagggaaaaacgtaatactgctttttattcatgtctttaaagcctttttcagaataagtgccaatcactgatgttgtaaataatggtgccttaactttatatgcttccctggcacttcgtttctgatttttttcctgatttgataaataattagtacatagttttcactcacttgcagcttactaaagacaagaaattatgtacatgtactaatgtttttcccacaaaaaaatcctttacttctgatgtatgaattagttatctaaatagttaagcctaatacctgaataagactcaccaatgtgattgtacaataaattctatcattccattaaaatcctacatttattcccaggaatggtaatttcacctccctacatctatactccactccctcagtaaataagtgaaaattgttaacccatgtgcccattcctgagtagggcagactcttcacaagaggcccatgacaagaattctagggtccagattgaactttaatatagacctttgtctgtgtagaccagtttgtcttgtaaactgtcttacttatgtgtgtaaacattttacattcacatgaaaagttattttcctttatataattggattcagaatcataagggacaggactgaaattattctacagtaaccagtaagaataagattcggccgggcacggtggctcctgcctgtaatcccaacactttgggaggccaaggtgggcggatcacctgaggtcaggagtttgagaccagcctggccaacatggtgaaaccccgtctctacacaaaaattagccaggcgtggtagcgggcatctgtaatcccagctacttggggggctgaggcaggagaatcgcttgaacccaggaggcggaggttgcagtgagccgagatcacgccactgcactcccgcctgggtgacaagagcaaaactccatcttaaaaaaaaagaaaaaaagagtaagattcatttttattagttactcaacttcagacacaattttgttaatttggatatatacatatatataataagaactcatggttagaatagaaatacagatactttaaaaatggtaatagaaattgtaccaatcaggttgctgtgagaaaactgacaaaatatgcaataaagaataccaagagagaaaggacaatcgccaattcagtttcccagaacagaatttttatgaactgcacaaatgtttaatgtaaatggtgatacctacagggaagaaatagaagagttgataatatatcactgggacggggtgggggaaagacttgaaatttttggtgcctaacactaatggtccatatgtagttaaacccatgagtatggtatatgaatgtcttttttaaatgttaaaatgtgttgtctatttaatgttaattaaaatgcagatcaaagcaccaccatttgctttttccacagatcattaacatttccttaaagtatgtaagtacctttgcaaatgcaaatgtactagtaattttcacttaagcttttgagaccgaattccattccaccagttatcacttagccactgtaatttaaaaacaaacaaacaaacaaaaactgtcttggtagaggtcgttaattagactcaacatgtactgcctttttgcagtctattatgacagtgtcttttagcacaaataatagagctaaaaaatgtcctgtcacttccattataagaaatctggattcatatctaagtgtatattataatactgtacagttaagagttcagaacaagtggtaatgttttctcttaatttaactcattttgtgccttctttactcattcaaacacacatacattttacatatagtttatttctttatgaaatgctaatcttcagcccgtaccaaaaagtagagtggagcctctttgcactactactatcaataaattttaaatcagttggatttttaagcattttttaaaagctgacattaaagtaaatctaaaaaaagtttaacaaactggccaagacactaatttttatgtataatcacaatattttatactcacctttattgactaaaaataattatgctacatgttgtcctgcatcagaagaattatttcttcttgccagtgttttgggatttgaagataatggttcactcaaagaacctattattttctctactgaggaacccaatgtagaacttgcactgatatttttattactgcctttatatgaatctataggtatctaaatgttaaggcatgtatgatctttgatcatttcttttttcaaattaaagttgtataaaagtttcaatatcttgccttaaattagttgcctattctttctaggattcaaatattgtgacatttaaaaaagaaaacattcacttttgaaacttagacttcagatcaaaaaggactgaacccccactatcataatccatacattcatttccatgttgtttgactagcagtgcatatatgaatgaatatggtaattaatcttacctataagaaccaaatactttaattatattaagatagtgaataaagatgtataatatttttattaataccttgaatatattcagtggattgaatgtgacttcataactgtactacgattgtattaaaatatttctggaataaaagaa

SEQ ID NO: 130615 - DNA, 584 bp, Artificial Sequence
  derived and/or modified sequence
agctttcggcggcggctgagccagctgaggggaaaaatggctcggactgtggcggcttcggcggctcaggttgtggtagaggcggaggctcaggcagcttgaggtttatttgtacaaatagcacaggaggccttgctattttggaagctacaagaaaaaaatagaggaaggaaggtttggtctttttagtggacatggctcagatatctagcaacagcggatttaaagaatgtccatcttcacatccggaaccaacaagagcaaaagatgtggacaaagaagaagcattacagatggaagcagaggctttagcaaaactgcaaaaggatagacaagtgactgacaatcagagaggctttgagttgtcaagcagcaccagaaaaaaagcacaggtttataacaagcaggattatgatctcatggtgtttcctgaatcagattcccaaaaaagagcattagatattgatgtagaaaagctcacccaagctgaacttgagaaactattgctggatgacagtttcgagactaaaaaaacacctgtattaccagttactcctattctgagcccttccttttcagcacag

SEQ ID NO: 130616 - DNA, 4550 bp, Artificial Sequence
  derived and/or modified sequence
gtgctgcgcttggctggctgtggagtcggccgaagctttcggcggcggctgagccagctgaggggaaaaatggctcggactgtggcggcttcggcggctcaggttgtggtagaggcggaggctcaggcagcttgagaaagacccaaatgggaccagtagtttgccaactggaagttctcttcttcaagaagttgaagtacagaatgaggagatggcagctttttgtcgatccattacaaaattgaagaccaaatttccatataccaatcaccgcacaaacccaggctatttgttaagtccagtcacagcacaaagaaacatatgcggagaaaatgctagtgtgaaggtctccattgacattgaaggatttcagctaccagttacttttacgtgtgatgtgagttctactgtagaaatcattataatgcaagccctttgctgggtacatgatgacttgaatcaagtagatgttggcagctatgttctaaaagtttgtggtcaagaggaagtgctgcagaataatcattgccttggaagtcatgagcatattcaaaactgtcgaaaatgggacacagaaattagactacaactcttgaccttcagtgcaatgtgtcaaaatctggcccgaacagcagaagatgatgaaacacccgtggatttaaacaaacacctgtatcaaatagaaaaaccttgcaaagaagccatgacgagacaccctgttgaagaactcttagattcttatcacaaccaagtagaactggctcttcaaattgaaaaccaacaccgagcagtagatcaagtaattaaagctgtaagaaaaatctgtagtgctttagatggtgtcgagactcttgccattacagaatcagtaaagaagctaaagagagcagttaatcttccaaggagtaaaactgctgatgtgacttctttgtttggaggagaagacactagcaggagttcaactaggggctcacttaatcctgaaaatcctgttcaagtaagcataaaccaattaactgcagcaatttatgatcttctcagactccatgcaaattctggtaggagtcctacagactgtgcccaaagtagcaagagtgtcaaggaagcatggactacaacagagcagctccagtttactatttttgctgctcatggaatttcaagtaattgggtatcaaattatgaaaaatactacttgatatgttcactgtctcacaatggaaaggatctttttaaacctattcaatcaaagaaggttggcacttacaagaatttcttctatcttattaaatgggatgaactaatcatttttcctatccagatatcacaattgccattagaatcagttcttcaccttactctttttggaattttaaatcagagcagtggaagttcccctgattctaataagcagagaaagggaccagaagctttgggcaaagtttctttacctctttttgactttaaacggtttttaacatgtggaactaaacttctatatctttggacttcatcacatacaaattctgttcctggaacagttaccaaaaaaggatatgtcatggaaagaatagtgctacaggttgattttccttctcctgcatttgatattatttatacaactcctcaagttgacagaagcattatacagcaacataacttagaaacactagagaatgatataaaagggaaacttcttgatattcttcataaagactcatcacttggactttctaaagaagataaagcttttttatgggagaaacgttattattgcttcaaacacccaaattgtcttcctaaaatattagcaagcgccccaaactggaaatgggttaatcttgccaaaacttactcattgcttcaccagtggcctgcattgtacccactaattgcattggaacttcttgattcaaaatttgctgatcaggaagtaagatccctagctgtgacctggattgaggccattagtgatgatgagctaacagatcttcttccacagtttgtacaagctttgaaatatgaaatttacttgaatagttcattagtgcaattccttttgtccagggcattgggaaatatccagatagcacacaatttatattggcttctcaaagatgccctgcatgatgtacagtttagtacccgatacgaacatgttttgggtgctctcctgtcagtaggaggaaaacgacttagagaagaacttctaaaacagacgaaacttgtacagcttttaggaggagtagcagaaaaagtaaggcaggctagtggatcagccagacaggttgttctccaaagaagtatggaacgagtacagtccttttttcagaaaaataaatgccgtctccctctcaagccaagtctagtggcaaaagaattaaatattaagtcgtgttccttcttcagttctaatgctgtccccctaaaagtcacaatggtgaatgctgaccctatgggagaagaaattaatgtcatgtttaaggttggtgaagatcttcggcaagatatgttagctttacagatgataaagattatggataagatctggcttaaagaaggactagatctgaggatggtaattttcaaatgtctctcaactggcagagatcgaggcatggtggagctggttcctgcttccgataccctcaggaaaatccaagtggaatatggtgtgacaggatcctttaaagataaaccacttgcagagtggctaaggaaatacaatccctctgaagaagaatatgaaaaggcttcagagaactttatctattcctgtgctggatgctgtgtagccacctatgttttaggcatctgtgatcgacacaatgacaatataatgcttcgaagcacgggacacatgtttcacattgactttggaaagtttttgggacatgcacagatgtttggcagcttcaaaagggatcgggctccttttgtgctgacctctgatatggcatatgtcattaatgggggtgaaaagcccaccattcgttttcagttgtttgtggacctctgctgtcaggcctacaacttgataagaaagcagacaaacctttttcttaacctcctttcactgatgattccttcagggttaccagaacttacaagtattcaagatttgaaatacgttagagatgcacttcaaccccaaactacagacgcagaagctacaattttctttactaggcttattgaatcaagtttgggaagcattgccacaaagtttaacttcttcattcacaaccttgctcagcttcgtttttctggtcttccttctaatgatgagcccatcctttcattttcacctaaaacatactcctttagacaagatggtcgaatcaaggaagtctctgtttttacatatcataagaaatacaacccagataaacattatatttatgtagtccgaattttgagggaaggacagattgaaccatcatttgtcttccgaacatttgacgaatttcaggaacttcacaataagctcagtattatttttccactttggaagttaccaggctttcctaataggatggttctaggaagaacacacataaaagatgtagcagccaaaaggaaaattgagttaaacagttacttacagagtttgatgaatgcttcaacggatgtagcagagtgtgatcttgtttgtactttcttccaccctttacttcgtgatgagaaagctgaagggatagctaggtctgcagatgcaggttccttcagtcctactccaggccaaataggaggagctgtgaaattatccatctcttaccgaaatggtactcttttcatcatggtgatgcatatcaaagatcttgttactgaagatggagctgacccaaatccatatgtcaaaacatacctacttccagataaccacaaaacatccaaacgtaaaaccaaaatttcacgaaaaacgaggaatccgacattcaatgaaatgcttgtatacagtggatatagcaaagaaaccctaagacagcgagaacttcaactaagtgtactcagtgcagaatctctgcgggagaattttttcttgggtggagtaaccctgcctttgaaagatttcaacttgagcaaagagacggttaaatggtatcagctgactgcggcaacatacttgtaaactagtgaatgtttgagctttggaagcatgaacagttataaacgtgcatgcatacatgcacacacacacagacacacacacacacacttgttaattttgtatagtatttttatacttggacagaacttataaagttaaatatacttgctgcatttcaacacatctgttggaccaacagtcacataactaacctttttgaatttttggaagccattgctgttttaaagtcattatgtagaatgctacaaaccctaaacttaatatatactaattcctgaaaaagactttgagacagtactatgtcagttcagccacctattttgcattgttttctataaggaggcaaagcatatgtgttttcctgttatgcaccttttatagcctttaccactgtgtaatgttcacaaacaccaaagta

SEQ ID NO: 130617 - DNA, 2090 bp, Artificial Sequence
  derived and/or modified sequence
agctgaggggaaaaatggctcggactgtggcggcttcggcggctcaggttgtggtagaggcggaggctcaggcagcttgaggccttgctattttggaagctacaagaaaaaaatagaggaaggaaggtttggtctttttagtggacatggctcagatatctagcaacagcggatttaaagaatgtccatcttcacatccggaaccaacaagagcaaaagatgtggacaaagaagaagcattacagatggaagcagaggctttagcaaaactgcaaaaggatagacaagtgactgacaatcagagaggctttgagttgtcaagcagcaccagaaaaaaagcacaggtttataacaagcaggattatgatctcatggtgtttcctgaatcagattcccaaaaaagagcattagatattgatgtagaaaagctcacccaagctgaacttgagaaactattgctggatgacagtttcgagactaaaaaaacacctgtattaccagttactcctattctgagcccttccttttcagcacagctctattttagacctactattcagagaggacagtggccacctggattacctgggccttccacttatgctttaccttctatttatccttctacttacagtaaacaggctgcattccaaaatggcttcaatccaagaatgcccacttttccatctacagaacctatatatttaagtcttccgggacaatctccatatttctcatatcctttgacacctgccacaccctttcatccacaaggaagcttacctatctatcgtccagtagtcagtactgacatggcaaaactatttgacaaaatagctagtacatcagaatttttaaaaaatgggaaagcaaggactgatttggagataacagattcaaaagtcagcaatctacaggtatctccaaagtctgaggatatcagtaaatttgactggttagacttggatcctctaagtaagcctaaggtggataatgtggaggtattagaccatgaggaagagaaaaatgtttcaagtttgctagcaaaggatccttgggatgctgttcttcttgaagagagatcgacagcaaattgtcatcttgaaagaaaggtgaatggaaaatccctttctgtggcaactgttacaagaagccagtctttaaatattcgaacaactcagcttgcaaaagcccagggccatatatctcagaaagacccaaatgggaccagtagtttgccaactggaagttctcttcttcaagaagttgaagtacagaatgaggagatggcagctttttgtcgatccattacaaaattgaagaccaaatttccatataccaatcaccgcacaaacccaggctatttgttaagtccagtcacagcacaaagaaacatatgcggagaaaatgctagtgtgaaggtctccattgacattgaaggatttcagctaccagttacttttacgtgtgatgtgagttctactgtagaaatcattataatgcaagccctttgctgggtacatgatgacttgaatcaagtagatgttggcagctatgttctaaaagtttgtggtcaagaggaagtgctgcagaataatcattgccttggaagtcatgagcatattcaaaactgtcgaaaatgggacacagaaattagactacaactcttgaccttcagtgcaatgtgtcaaaatctggcccgaacagcagaagatgatgaaacacccgtggatttaaacaaacacctgtatcaaatagaaaaaccttgcaaagaagccatgacgagacaccctgttgaagaactcttagattcttatcacaaccaagtagaactggctcttcaaattgaaaaccaacaccgagcagtagatcaagtaattaaagctgtaagaaaaatctgtagtgctttagatggtgtcgagactcttgccattacagaatcagtaaagaagctaaagagagcagttaatcttccaaggagtaaaactgctgatgtgacttctttgtttggaggagaagacactagcaggagttcaactaggggctcacttaatcctgaaaatcctgttcaagtaagcataaaccaatta

SEQ ID NO: 130618 - protein, 1634 aa, Artificial Sequence
  derived and/or modified sequence
MSSTQGNGEHWKSLESVGISRKELAMAEALQMEYDALSRLRHDKEENRAKQNADPSLISWDEPGVDFYSKPAGRRTDLKLLRGLSGSDPTLNYNSLSPQEGPPNHSTSQGPQPGSDPWPKGSLSGDYLYIFDGSDGGVSSSPGPGDIEGSCKKLSPPPLPPRASIWDTPPLPPRKGSPSSSKISQPSDINTFSLVEQLPGKLLEHRILEEEEVLGGGGQGRLLGSVDYDGINDAITRLNLKSTYDAEMLRDATRGWKEGRGPLDFSKDTSGKPVARSKTMPPQVPPRTYASRYGNRKNATPGKNRRISAAPVGSRPHTVANGHELFEVSEERDEEVAAFCHMLDILRSGSDIQDYFLTGYVWSAVTPSPEHLGDEVNLKVTVLCDRLQEALTFTCNCSSTVDLLIYQTLCYTHDDLRNVDVGDFVLKPCGLEEFLQNKHALGSHEYIQYCRKFDIDIRLQLMEQKVVRSDLARTVNDDQSPSTLNYLVHLQERPVKQTISRQALSLLFDTYHNEVDAFLLADGDFPLKADRVVQSVKAICNALAAVETPEITSALNQLPPCPSRMQPKIQKDPSVLAVRENREKVVEALTAAILDLVELYCNTFNADFQTAVPGSRKHDLVQEACHFARSLAFTVYATHRIPIIWATSYEDFYLSCSLSHGGKELCSPLQTRRAHFSKYLFHLIVWDQQICFPVQVNRLPRETLLCATLYALPIPPPGSSSEANKQRRVPEALGWVTTPLFNFRQVLTCGRKLLGLWPATQENPSARWSAPNFHQPDSVILQIDFPTSAFDIKFTSPPGDKFSPRYEFGSLREEDQRKLKDIMQKESLYWLTDADKKRLWEKRYYCHSEVSSLPLVLASAPSWEWACLPDIYVLLKQWTHMNHQDALGLLHATFPDQEVRRMAVQWIGSLSDAELLDYLPQLVQALKYECYLDSPLVRFLLKRAVSDLRVTHYFFWLLKDGLKDSQFSIRYQYLLAALLCCCGKGLREEFNRQCWLVNALAKLAQQVREAAPSARQGILRTGLEEVKQFFALNGSCRLPLSPSLLVKGIVPRDCSYFNSNAVPLKLSFQNVDPLGENIRVIFKCGDDLRQDMLTLQMIRIMSKIWVQEGLDMRMVIFRCFSTGRGRGMVEMIPNAETLRKIQVEHGVTGSFKDRPLADWLQKHNPGEDEYEKAVENFIYSCAGCCVATYVLGICDRHNDNIMLKTTGHMFHIDFGRFLGHAQMFGNIKRDRAPFVFTSDMAYVINGGDKPSSRFHDFVDLCCQAYNLIRKHTHLFLNLLGLMLSCGIPELSDLEDLKYVYDALRPQDTEANATTYFTRLIESSLGSVATKLNFFIHNLAQMKFTGSDDRLTLSFASRTHTLKSSGRISDVFLCRHEKIFHPNKGYIYVVKVMRENTHEATYIQRTFEEFQELHNKLRLLFPSSHLPSFPSRFVIGRSRGEAVAERRREELNGYIWHLIHAPPEVAECDLVYTFFHPLPRDEKAMGTSPAPKSSDGTWARPVGKVGGEVKLSISYKNNKLFIMVMHIRGLQLLQDGNDPDPYVKIYLLPDPQKTTKRKTKVARKTCNPTYNEMLVYDGIPKGDLQQRELQLSVLSEQGFWENVLLGEVNIRLRELDLAQEKTGWFALGSRSHGTL

SEQ ID NO: 130619 - protein, 119 aa, Artificial Sequence
  derived and/or modified sequence
MFGNIKRDRAPFVFTSDMAYVINGGDKPSSRFHDFVDLCCQAYNLIRKHTHLFLNLLGLMLSCGIPELSDLEDLKYVYDALRPQDTEANATTYFTRVILASVVGGRESKTCSAVSSSGD

SEQ ID NO: 130620 - protein, 60 aa, Artificial Sequence
  derived and/or modified sequence
MSSTQGNGEHWKSLESVGISRKELAMAEALQMEYDALSRLRHDKEENRAKQNADPSLISW

SEQ ID NO: 130621 - DNA, 4905 bp, Artificial Sequence
  derived and/or modified sequence
atgagctctacccagggcaacggcgaacactggaagtcgctggaatcggtcggcatctctcgaaaagagcttgcgatggcagaagcattgcagatggagtatgatgcgctgagtcgactgcgccacgacaaggaggagaatagggccaagcagaacgctgacccttcccttatttcatgggacgaaccaggagtggacttctattcgaaaccggccggaagaaggaccgacctcaagcttttaagaggccttagcggcagtgacccaaccctcaactataactctctgtctccccaggagggtccacccaatcactccactagccagggcccccaaccaggaagtgacccctggcctaaaggatcgctgtcaggcgactacctgtacatcttcgacggctcggacggaggagtttcatcttccccaggtccgggcgatattgagggttcctgcaagaaactgtctcccccgcctctacccccccgcgccagtatctgggatacaccccctctgccccctcggaagggcagtccgtcgagttccaagattagtcaaccatcagacatcaataccttcagcctggtggagcaactgcctggcaaactcttagaacatcgcattcttgaggaagaggaggtcttggggggtggaggtcaggggcgcctgctgggcagtgtcgactacgacggcattaatgatgcaatcactaggttgaacttgaaatccacttacgacgccgagatgctcagagacgccaccaggggatggaaagaggggaggggacccttggacttttcaaaagacactagtggaaagcctgtggccaggtctaagacaatgcccccccaggtccctcctaggacatatgcctctaggtacgggaatcgtaagaacgctacacctggaaagaaccgaagaattagcgccgccccagtcggatcccgacctcacacagtagccaatggtcatgaattgttcgaggtaagcgaagagcgggacgaggaggtggccgctttctgccatatgctagatattctgcggtccggtagtgatattcaggactactttctgactggctacgtgtggtcagcggtcacccctagtccggagcatttgggggacgaagtgaacctaaaagtgaccgtgttgtgcgatcgcctgcaggaggcactcacattcacctgtaattgttccagcacagtcgacctcctcatttatcagaccctttgttacacccatgatgacctccgaaatgtggacgtgggcgactttgtactgaagccttgtggattggaagagtttcttcagaataaacacgccctcgggtcacacgagtatatccagtactgccggaaattcgatatcgatatccgcctccagttaatggagcagaaggtggtgcggtcagatctcgcccggaccgtcaacgacgaccaatcaccctctacattaaactacctggtccatcttcaggaacggccagtcaagcagacaatcagtcgccaggctctgtccctcctgtttgacacataccataatgaggtggatgctttcctgttggcagatggcgattttcctttgaaggctgaccgcgttgttcaaagcgtcaaagccatctgtaatgcgcttgccgctgtcgaaacccctgagatcacatccgccctaaaccaactgcccccatgcccaagccgaatgcagcctaagatccagaaggacccatccgttcttgctgtaagggagaaccgtgaaaaggtggtggaggctctgactgctgccatcctcgatctggtggaactgtactgcaacacctttaacgcggactttcagactgcggttcccgggtccagaaaacatgacctggtacaagaggcgtgtcatttcgcaaggagcttggctttcacggtttatgcaacacatagaatccctattatctgggccacatcttacgaggatttttacctgtcctgttccctgtcccatggagggaaggagctctgcagcccactccagactcggagagcccatttcagtaagtacctcttccatctgattgtctgggaccagcagatttgtttcccagtccaggtcaatcgcttaccgagggagactctcctgtgtgctacactttatgcattgcctatcccgccaccggggtccagctccgaggccaataaacagcgacgggtccctgaggctctcggctgggttaccaccccccttttcaactttcggcaagttctgacgtgtgggcgcaaactcctgggcctgtggcccgccacacaagaaaacccttctgctagatggtctgctccaaacttccaccagcccgactcggttattctgcagatcgacttccccacctctgcattcgacattaagtttaccagtccacccggcgacaaattctctcctcgctacgagtttggctcactgagggaagaagatcagagaaagctgaaagatataatgcagaaggaaagtctttactggctgacggatgccgacaagaagaggctctgggaaaaaaggtactactgtcactctgaggtatcatcattgcccttggtgctggcatccgcaccctcttgggagtgggcctgccttccggacatctatgtgctactaaagcagtggacccacatgaatcaccaagatgcccttggactcctccacgccacctttcctgaccaggaagttaggcgaatggctgtccagtggattggaagtctgtccgatgcggagctgctcgactacctgcctcagctggtccaggccctcaaatatgaatgttacttggactccccacttgttagatttctcctgaaacgtgctgtcagcgatttgcgggtgacacactatttcttctggcttttaaaggacggcctcaaagatagtcagttcagtattaggtatcagtatctgttagccgccctcctttgctgctgtggaaagggccttcgcgaggaatttaatcgccaatgttggctggtcaacgccctggcgaaattagcacagcaggtccgcgaggccgctccctctgccaggcagggtattctgcgcacagggctcgaagaagtgaagcagttttttgcactgaatggctcctgccgcttgccgctgtctcccagtcttctggtgaaggggatagtacccagggattgtagttactttaactccaacgcggtcccgctgaagctgagttttcaaaatgtggacccacttggggagaacattagagttatttttaaatgtggcgacgatttgcgtcaggacatgctgaccctgcagatgatcagaatcatgtcaaaaatctgggtgcaggaaggacttgatatgagaatggtgatattccggtgcttctccaccggccgaggccggggtatggttgagatgatcccaaacgcggagaccttaaggaaaatccaggtagaacacggagttaccggcagttttaaggatcggcctctggccgattggttgcagaaacacaatcccggagaggacgagtacgagaaggccgtggaaaatttcatttattcttgtgcagggtgctgcgtggccacctatgtcttaggaatttgtgacaggcataatgacaatatcatgctcaaaacgacaggacatatgttccatatcgacttcggtagattcctgggacacgctcaaatgtttggtaatattaagagggaccgggccccgttcgtgttcacatctgacatggcttacgtaatcaacggtggcgacaagccctcctcacgcttccacgactttgtcgacttgtgttgtcaggcatataacctgatccggaagcatactcacctctttcttaacctgctagggttaatgctgagctgcgggatcccagaactaagcgacctcgaggaccttaagtacgtatacgacgccctcagaccccaggataccgaagcaaacgccaccacttacttcactcggttaatcgaaagcagcctgggaagtgtcgcaacgaaactcaatttttttattcacaatctcgcccaaatgaaattcacaggttctgatgaccggcttacactctccttcgctagccgcacgcacacgttaaagtcaagcggcagaatctctgacgtgttcctctgcagacatgaaaaaatattccatccaaataagggttacatatacgtggtcaaggtcatgcgggagaatactcacgaggcaacctatatccagcggaccttcgaggaattccaagagctccacaacaagctcagactgctgttccccagcagccaccttccatccttccctagccgatttgtgattggaaggtccaggggagaggcggttgcagaacgcaggcgagaggagcttaacgggtacatttggcacctcatccatgcccctcctgaggttgccgaatgcgatctggtttacacttttttccatccccttcccagggatgaaaaagcaatggggacctctccggcccctaagagttctgatggaacatgggctcgacccgtcggaaaggtaggtggcgaagtgaaactgtctattagctacaaaaacaataaattatttatcatggtgatgcacatccgcggacttcaactactgcaggacggcaacgacccagacccttatgtgaaaatatacctgctgcccgacccccaaaaaaccacaaagcgcaaaacaaaagtagcccgcaagacctgtaaccccacttataacgaaatgctggtctacgatggaattcctaagggagacctgcagcagcgtgagctccaacttagtgtgttatctgagcaagggttttgggaaaatgtactcctaggcgaggtgaatataaggctcagggaacttgacctggcccaagagaaaacggggtggtttgccctgggaagtagaagccacggcacgctgtag

SEQ ID NO: 130622 - DNA, 360 bp, Artificial Sequence
  derived and/or modified sequence
atgttcggaaacattaagagggacagggccccgtttgtgttcacttcggacatggcatatgtcattaacggaggggataaaccatccagcaggttccatgactttgtcgacctttgttgtcaggcctataatctgatacgcaaacacacacacttgttcctgaacctgctaggattgatgttgagctgtggtattcctgagttgtctgatctagaagacttaaaatacgtgtacgacgccctcagaccacaggacacagaggccaacgcgaccacctactttacccgagtgatattggcctctgtagtcggcgggcgtgaatccaagacgtgttcagctgtgagtagctctggagactag

SEQ ID NO: 130623 - DNA, 4905 bp, Artificial Sequence
  derived and/or modified sequence
atgagcagcacccagggcaatggagagcactggaagagcctggagagcgtgggcatcagcaggaaggagctggccatggccgaggccctgcagatggagtatgatgccctgagccggctgcggcatgacaaggaggagaacagagccaagcagaatgctgaccccagcctcatctcctgggatgagcccggggtggacttctacagcaagccagctggccgcaggacagacctgaagctgctgcggggcctgagcggcagtgaccccaccctgaactacaacagcctgagcccccaggagggcccccccaaccacagcaccagccagggcccccagcccggcagtgacccctggcccaagggcagcctgagcggggactacctgtacatctttgatggcagtgatggaggagtgagcagcagccctggccctggggacatcgagggcagctgcaagaagctgagccccccacccctgcccccccgggccagcatctgggacaccccacccctgccccccaggaagggcagccccagcagcagcaagatcagccagcccagcgacatcaacaccttcagcctggtggagcagctgcccgggaagctgctggagcaccgcatcctggaggaggaggaggtgctgggcggcggcggccagggccgcctgctgggctctgtggactatgatggcatcaatgatgccatcacccggctgaacctgaagagcacctatgatgctgagatgctgagagatgccacccggggctggaaggagggccggggccccctggacttcagcaaggacaccagcggcaagcctgtggcccggagcaagaccatgccaccccaggtgccccccaggacctacgccagccgctatggcaacaggaagaatgccaccccaggcaagaacagacgcatctctgctgcccctgtgggcagccggccccacacagtggccaatggacatgagctgtttgaggtgtctgaggagagagatgaggaggtggccgccttctgccacatgctggacatcctgcggagcggcagtgacatccaggactacttcctgaccggctacgtgtggagcgctgtgacccccagccctgagcacctgggagatgaggtgaacctgaaggtgacagtgctgtgtgaccggctgcaggaggccctgaccttcacctgcaactgcagcagcacagtggacctgctgatctaccagaccctgtgctacacccatgatgacctgagaaatgtggatgtgggggactttgtgctgaagccctgtggcctggaggagttcctgcagaacaagcacgccctgggcagccatgagtacatccagtactgcaggaagtttgatattgacatccggctgcagctgatggagcagaaggtggtgcggagtgacctggccaggacagtgaatgatgaccagagccccagcaccctgaactacctggtgcacctgcaggagaggcctgtgaagcagaccatcagccggcaggccctgagcctgctgtttgacacctaccacaatgaggtggatgccttcctgctggctgatggagacttccccctgaaggctgacagagtggtgcagagcgtgaaggccatctgcaatgccctggccgctgtggagaccccagagatcaccagcgccctgaaccagctgcccccctgccccagcaggatgcagcccaagatccagaaggaccccagcgtgctggccgtgcgggagaaccgggagaaggtggtggaggccctgacagctgccatcctggacctggtggagctgtactgcaacaccttcaatgctgacttccagacagctgtgcccggcagcaggaagcatgacctggtgcaggaggcctgccactttgcccggagcctggccttcaccgtgtatgccacccaccgcatccccatcatctgggccaccagctatgaggacttctacctgagctgcagcctgagccacggcggcaaggagctgtgcagccccctgcagacccggcgggcccacttcagcaagtacctgttccacctgattgtgtgggaccagcagatctgcttccctgtgcaggtgaaccggctgccccgggagaccctgctgtgtgccaccctgtatgccctgcccatccccccacctggcagcagcagcgaggccaacaagcagaggagagtgcctgaggccctgggctgggtgaccacccccctcttcaacttccggcaggtgctgacctgtggcaggaagctgctgggcctgtggccagccacccaggagaaccccagcgcccgctggagcgcccccaacttccaccagcctgacagcgtcatcctgcagattgacttccccaccagcgcctttgacatcaagttcaccagccccccaggggacaagttcagccccaggtatgaatttggcagcctgcgggaggaggaccagaggaagctgaaggacatcatgcagaaggagagcctgtactggctgacagatgctgacaagaagaggctgtgggagaagcgctactactgccacagcgaggtgagcagcctgcccctggtgctggccagcgcccccagctgggagtgggcctgcctgcctgacatctacgtgctgctgaagcagtggacccacatgaaccaccaggatgccctgggcctgctgcacgccaccttcccagaccaggaggtgcggaggatggctgtgcagtggattggcagcctgagtgatgctgagctgctggactacctgccccagctggtgcaggccctgaagtatgagtgctacctggacagccccctggtgcgcttcctgctgaagagagctgtgtctgacctgcgggtgacccactacttcttctggctgctgaaggatggcctgaaggacagccagttcagcatccgctaccagtacctgctggccgccctgctgtgctgctgcggcaagggcctgcgggaggagttcaaccggcagtgctggctggtgaatgccctggccaagctggcccagcaggtgcgggaggccgcccccagcgcccggcagggcatcctgaggacaggcctggaggaggtgaagcagttctttgccctgaatggcagctgccgcctgcccctgagccccagcctgctggtgaagggcatcgtgccccgggactgcagctacttcaacagcaatgctgtgcccctgaagctgtccttccagaatgtggaccccctgggggagaacatccgggtcatcttcaagtgtggagatgacctgcggcaggacatgctgaccctgcagatgatccgcatcatgagcaagatctgggtgcaggagggcctggacatgaggatggtgatcttccgctgcttcagcacaggccggggccggggcatggtggagatgatccccaatgctgagaccctgaggaagatccaggtggagcacggcgtgacaggcagcttcaaggaccggcccctggccgactggctgcagaagcacaaccctggagaagatgaatatgagaaggctgtggagaacttcatctacagctgtgccggctgctgcgtggccacctacgtgctgggcatctgtgacagacacaatgacaacatcatgctgaagaccaccggccacatgttccacatcgactttggccgcttcctgggccacgcccagatgtttggaaacatcaagagggaccgggccccctttgtgttcaccagtgacatggcctacgtgatcaatggaggagacaagcccagcagccgcttccatgactttgtggacctgtgctgccaggcctacaacctgatcaggaagcacacccacctgttcctgaacctgctgggcctgatgctgagctgtggcatccctgagctgagtgacctggaggacctgaagtatgtgtatgatgccctgcggccccaggacacagaggccaatgccaccacctacttcaccaggctcatcgagagcagcctgggctctgtggccaccaagctgaacttcttcatccacaacctggcccagatgaagttcaccggcagtgatgaccggctgaccctgagctttgccagcaggacccacaccctgaagagcagcggccgcatcagtgatgtgttcctgtgcagacatgagaagatcttccaccccaacaagggctacatctacgtggtgaaggtgatgagggagaacacccatgaggccacctacatccagaggacctttgaggagttccaggagctgcacaacaagctgcggctgctcttccccagcagccacctgcccagcttccccagccgcttcgtcatcggccgcagcagaggagaggccgtggccgagcggcggcgggaggagctgaatggctacatctggcacctgattcatgcccctcctgaggtggccgagtgtgacctggtgtacaccttcttccaccccctgcccagagatgagaaggccatgggcaccagccctgcccccaagagcagtgatggcacctgggcccggcctgtgggcaaggtgggcggggaggtgaagctgagcatctcctacaagaacaacaagctgttcatcatggtgatgcacatccggggcctgcagctgctgcaggatggaaatgaccctgacccctacgtgaagatctacctgctgcctgacccccagaagaccaccaagaggaagaccaaggtggccaggaagacctgcaaccccacctacaatgagatgctggtgtatgatggcatccccaagggggacctgcagcagcgggagctgcagctgtctgtgctgtctgagcagggcttctgggagaatgtgctgctgggggaggtgaacatccggctgcgggagctggacctggcccaggagaagacaggctggtttgccctgggcagccgcagccacggcaccctgtag

SEQ ID NO: 130624 - DNA, 360 bp, Artificial Sequence
  derived and/or modified sequence
atgtttggaaacatcaagagggaccgggccccctttgtgttcaccagtgacatggcctacgtgatcaatggaggagacaagcccagcagccgcttccatgactttgtggacctgtgctgccaggcctacaacctgatcaggaagcacacccacctgttcctgaacctgctgggcctgatgctgagctgtggcatccctgagctgagtgacctggaggacctgaagtatgtgtatgatgccctgcggccccaggacacagaggccaatgccaccacctacttcaccagggtcatcctggcctctgtggtgggcggccgggagagcaagacctgcagcgctgtgagcagcagcggggactag

SEQ ID NO: 130625 - DNA, 4905 bp, Artificial Sequence
  derived and/or modified sequence
atgagcagcacccagggcaacggcgagcactggaagagcctggagtccgttggcatctcccggaaagagcttgcaatggccgaagccttacagatggagtatgatgcattgagccgcctacgtcacgacaaggaggaaaatcgggctaaacagaacgccgacccctctctgatcagctgggatgagccaggcgtggatttctactccaagccagccggcaggcgcaccgatctgaaactgctgcgggggctgagcggctccgaccccacgctcaattacaactccctctccccgcaggaggggccaccaaaccattctacctcacaggggcctcagcccggcagcgacccatggcccaagggctcgctctcaggggattacctgtatatattcgacggctccgacggaggcgtctcaagcagtcctggtcccggcgacatcgagggctcatgcaaaaagctgtcaccacctcccctcccaccaagagcgtctatttgggatacaccccctctgccgccacggaaaggctccccctccagttcaaagatctcacagccatccgatattaacacatttagcctcgtagagcagctgcccggaaaattgttagagcatcgcatccttgaagaggaagaggttctgggaggaggaggacagggacgattgctggggtccgtggattatgatggaatcaatgatgctatcaccaggttgaacctgaagtccacatatgatgctgaaatgctcagggacgccactcggggctggaaagagggaagaggtcctctggattttagtaaagacacatccggcaagcccgtggctaggagtaagacaatgcctccgcaggtgcccccccgcacctacgccagccgctacggcaaccgaaaaaacgcaactccaggaaagaacaggcggatcagtgcagctccggttggctcacggccacatacagtggcaaatggacatgagctgttcgaagttagcgaagaacgcgatgaggaagtggctgctttttgtcacatgctcgacatcctgcgcagtggcagcgacatacaggactattttctgacaggctacgtctggtcagccgtaaccccaagccccgagcacctcggggatgaagtgaatctgaaagttacagtgctctgtgaccgacttcaggaggccctcacttttacctgcaactgctccagcactgtggatctcctgatttaccagacactgtgctatacacacgacgacctgcggaacgtggatgtgggcgactttgtcttgaagccatgtggcctggaagagttcctgcagaacaaacatgcgctcggctctcatgaatatatccaatattgccggaagtttgacatcgacattaggcttcagttgatggaacagaaggtggtgagatctgacttggccagaaccgtgaatgacgaccagtctccaagcactctgaattatctcgtgcatctccaggagcggcccgtgaaacagacaatatcccgccaagcactgtccctgctgttcgatacgtaccataatgaggtcgatgcatttctgttagcagacggcgactttccactgaaggcagacagagtggtccagagcgtaaaagccatctgcaacgctctggctgcagtcgagacccccgaaataacttctgccctgaaccagcttcctccgtgccctagcaggatgcaacctaagatccagaaggaccctagcgtcttggctgtgagggaaaatcgggagaaagtagtcgaggccttaaccgccgctatcctggatcttgtggagctgtactgtaacacattcaacgctgatttccagacagcagtgcctggaagtcgtaagcacgacctggtgcaggaggcatgccattttgccaggagcctggcttttaccgtttacgcaacccaccgtatcccaatcatctgggctactagctacgaagacttctatctctcttgttctctttcccacggaggaaaagaactgtgctcccccctgcagacccgcagagcgcatttctcaaagtacctgttccatctgatcgtgtgggatcagcagatctgtttccccgtccaggtgaacaggctacctagagaaacgttactgtgcgccaccctgtatgctctaccaattcctcctccaggctcaagtagcgaagccaacaagcaaagacgcgtgccggaggcactcggatgggttacaacaccgttatttaactttcggcaggttttgacatgcggtcgcaaattacttgggttatggccagccacccaggaaaatcctagtgcccgatggtccgcacccaatttccatcagcctgacagcgtcatcctgcagattgacttcccaacgtccgcttttgatatcaaatttacgtctccacccggcgacaaattcagtccgcggtacgaattcggctctctgcgcgaagaagatcagcgtaagctcaaggacatcatgcaaaaggagtccctttattggcttaccgacgcagacaaaaagcggctgtgggaaaaaagatattattgccattccgaggtgagcagcctgccgctcgttctggcaagcgcgccatcttgggaatgggcctgtttaccagatatttatgttcttctgaaacagtggacccacatgaatcatcaggatgcccttggcctgctacatgccacattccccgatcaggaggtgcggcgtatggccgtccaatggataggaagcctgtcagatgctgagctcctcgactatctgccccagctcgtccaagccctgaagtatgaatgttacctggactcccccctggtacggtttttacttaagcgagctgtgtccgatctgcgtgtgacccactactttttctggctgctgaaggatggattaaaagactcccagttttctatccgataccagtaccttctggcagccctcctttgctgttgcggcaagggcctgcgtgaggagtttaacaggcagtgctggcttgtcaatgccttggccaagctcgcccagcaagtgagagaggccgcgccaagtgcccgccaaggaatcctccgcactggcctagaggaggtaaagcagttctttgcactgaacggatcctgtcggcttcctctgtcaccttcgctgctggtgaaggggatcgtcccgcgggattgcagctacttcaattcaaacgctgtccctctgaagctttcttttcagaacgtggacccactgggcgaaaacatacgcgtcatttttaagtgtggcgacgatctgagacaggatatgttgaccttgcaaatgataaggatcatgagtaaaatctgggtacaggagggattagatatgcgcatggtgatattccgctgcttttccaccgggcggggacgcggcatggtggagatgattccaaacgctgaaactttacgcaaaatacaggttgagcacggagtgactggcagtttcaaggataggccacttgcagactggcttcagaaacacaatccaggcgaagacgaatacgagaaggctgtcgagaacttcatttattcttgtgcaggatgttgcgtggccacctatgtcttaggtatctgtgacagacacaatgacaatattatgttgaagaccactggtcacatgttccacattgatttcggcaggttcctgggccacgcacagatgtttgggaatatcaagagagatcgggccccatttgtgtttacgtcagatatggcctacgtaattaacggcggcgataaacccagctccaggtttcatgattttgtggacttgtgctgtcaagcctacaatctcattaggaaacacactcatctgtttctcaacctcctcgggcttatgctgtcttgtggtataccagaactctcggatctggaggatttaaagtatgtctatgacgctctgagacctcaggatactgaagccaacgcaactacctactttacacggttgatcgagtccagcctgggctccgtggctacaaagttaaatttcttcatacacaacttagctcagatgaaatttacaggtagcgacgacaggctgactcttagtttcgcctccagaactcacacccttaagagcagtgggcgtatttcagacgtgttcctgtgccgacacgaaaaaattttccatccgaataagggctacatatacgtggtgaaggtgatgcgtgaaaacacccacgaagccacgtatatccagcgcaccttcgaggaattccaggaactccacaacaagttgaggctgctctttccttcttcccacctgccctcattcccctccaggtttgtgatcggcaggagtcgcggggaagccgtcgccgagagacggcgtgaggagctgaatggatacatctggcatttgatccacgcccctcccgaggtcgccgaatgcgacctcgtgtacaccttcttccatcctctgcccagagacgaaaaggccatggggacgagtcccgctcctaagagcagcgatggaacctgggctaggcccgtggggaaagtcggcggagaggtgaagttgagcattagctataagaacaacaagcttttcatcatggtgatgcacatccggggtctccagttactacaggatggcaatgaccctgatccatatgtgaagatttacctgctgcccgacccccaaaaaacaaccaagcggaagaccaaggtcgccagaaagacatgcaacccgacgtataatgaaatgctcgtgtatgacggtatcccaaaaggggacttacagcagcgagaactgcagctgagtgtgctgtccgaacaaggcttttgggagaacgttctcttaggtgaggtcaacattcggctgcgtgagctagatttggctcaggaaaaaacaggctggtttgccttagggtcgagatcccacggcaccctgtag

SEQ ID NO: 130626 - DNA, 360 bp, Artificial Sequence
  derived and/or modified sequence
atgttcggcaacatcaagcgggaccgggcccccttcgtgttcacctctgacatggcctatgtgatcaatggaggtgataaaccgtcatccaggtttcatgactttgtggacttgtgctgtcaggcttacaatctcattcgcaaacacacgcatctgtttttgaacctgttgggactgatgttgtcttgtggaattcctgagcttagtgatttggaagatctgaaatacgtctacgacgccttgcgcccgcaggatacagaggctaatgcaaccacctattttaccagggtgattctggcgtctgtggtgggcggacgggagagcaaaacctgctccgccgtgtcgtcttcaggagactag

SEQ ID NO: 130627 - DNA, 7686 bp, Artificial Sequence
  derived and/or modified sequence
aaatttacttccccaaaacactgggacattgggatggaattcactcaccccaaatcatcaccctggttaaggagactaaagaatcagaagacatttgtgctttggggagcagaggccctcagggtatagagaaggaagaagagagaggttcactgtagtcctgaagcagaaataagacctgtggctgaaggaagccttagcaattcactccttcctcttcctgagaactctctgtaggaagtctcacctagcagaggcttcacagtatttcagagaagccaaagattgtttgcctctttggaaactgttatccttccatcatgactgtgtcactcctgccactgttccaccatagagatggcgtcctttgcagcaaaccgtaagttataaggatgagggaagaagagtagagggccaaaaggattccattttgaggaaaaactacagtttgccttgccaggtagaagaatcaggcgcccagacaccatgtcacaaccctccagaactgacgttggcaggaagtagagactttgttgcctgtgtcccccatcctcaccatgtcttcgactcagggcaatggggaacactggaagtccctggagtcagtgggcatcagccgcaaagagctagcgatggccgaagccctgcagatggagtatgatgccctgtcccggctccggcatgacaaggaggagaacagagccaagcagaacgcagacccctctctcatcagctgggatgagcctggggtagacttttacagcaagccagcaggaaggcggaccgacctcaagctgttacgcggtctctctggctctgatcctacccttaactacaactcactctccccacaggaagggccgcccaaccactctacctcccaagggccacagcctggctcagatccctggcccaaaggctccctgtctggagactatctctacatttttgatggttcagatgggggagtctcttcgtccccaggaccaggggacatagagggctcttgcaagaaactatccccacctcctctgcctccccgagcttctatctgggatacccctcccctgcctcccagaaaggggtccccctcatcctccaagatctcccagcccagtgacatcaacactttctctttggtcgaacaattgccgggcaaactgctagagcatcggatcctagaagaggaagaggtgctgggaggtgggggtcaggggcgcctactggggtctgtggactatgatggtatcaatgatgcaattactaggctcaacttgaaatcgacctatgatgcggagatgttgcgggatgccaccaggggctggaaggagggccgagggccgctggacttcagcaaagacacctctggaaaacccgtggccaggagcaagactatgccccctcaggtgcccccccgcacctatgcctcccgctatggcaaccgaaagaatgcgacgcctggcaagaaccgccggatttctgcagccccggtgggctcccggccccacactgttgccaatggccatgagttgtttgaggtctcagaagagagagatgaggaggttgctgcattttgccacatgctggatatccttcgatctggctctgacatccaagactacttcctcactggctatgtctggagtgctgtcacccctagcccagagcacctcggggatgaggtcaacctgaaggtgactgtgttgtgtgacaggcttcaagaggcactcactttcacctgcaactgttcctccactgtagacttgcttatctaccagaccctgtgctacacccatgatgacctgaggaatgtggacgtgggtgactttgtgctaaagccctgcgggctggaggagttcctgcagaacaagcatgccttgggcagtcatgagtacatccaatactgccgcaagtttgacattgacattcggctacagctgatggagcagaaggttgtgcgcagtgacctggcccggacggtgaatgatgaccagagcccctccaccttgaactacctcgtccatctccaagagaggcctgtcaagcagaccatcagcaggcaggccctgagtcttctgttcgacacttaccacaatgaggtggatgccttcctgctggctgatggagacttcccactgaaggctgacagggtggtccagtccgtcaaggccatctgcaacgccctggccgccgtggaaacccctgagatcaccagtgctctcaaccagctgcccccctgcccctcccgcatgcagcctaaaattcagaaggatcccagtgtcttggctgtgagggaaaaccgagagaaggtcgtggaagccctgaccgctgccatcttggacctggtggagctgtactgcaacacattcaacgcagacttccagacggcagtgcccgggagccgcaagcatgacctggtccaggaggcctgccatttcgccaggtccctggccttcactgtctatgccacccaccgcatccccatcatctgggctaccagctatgaagatttctacctctcctgctccctcagccatggcggcaaggagctgtgcagccccctgcagacccgaagagctcacttctccaagtacctcttccacctcatcgtctgggaccagcagatctgcttcccagtgcaggtgaaccggctgcctcgggagacactgctgtgtgccactctctatgctctgcccatccccccaccggggagctcctcagaggccaataagcagcggcgggtgcctgaagccctgggctgggtcactaccccactcttcaacttcaggcaggtcctgacctgtggccggaagcttctgggtttgtggccagcaacacaggaaaatcccagcgcccgttggagtgcacctaatttccaccagccagacagtgtcatcctgcagattgacttccccacctcggcctttgacatcaagttcaccagcccccctggagacaagttcagcccccgctatgagtttggcagcctccgggaagaagaccagcgcaagcttaaagacatcatgcagaaagagtccttgtactggctcactgatgctgacaagaagcgcctgtgggagaagcgatattactgccactcggaggtgagctcgctccccctggtgctcgccagcgcccccagctgggagtgggcttgcctgcctgacatctatgttctcctgaagcagtggacccacatgaaccaccaggatgccctggggctcctgcatgccaccttcccggaccaggaggtgcgtcgtatggctgtgcagtggattggctcactctcagatgctgagctgctagactacctgccccagctggtacaggccctgaagtatgaatgctacctggacagcccgttggtgcgcttcctcctgaaacgagctgtgtctgacttgagagtgactcactacttcttctggttactgaaggacggcctcaaggactctcagttcagcatccgctaccagtatctgctggcagccttactgtgctgctgtggcaaggggctgagagaagagtttaaccgccagtgctggcttgtcaatgccctggccaaactggcccagcaggtccgggaggcagccccatctgcaaggcagggaatcctccgcacgggcctggaggaggtgaagcagttctttgccctcaatggctcgtgccgcttgccactcagccccagtctgctggttaagggaattgtgcccagggactgttcctacttcaactccaatgctgtccccctcaaactctccttccaaaatgtggatcccctgggtgagaacatccgtgtcatcttcaagtgtggggacgaccttcgccaggacatgctaacgctgcagatgattcgcatcatgagcaagatctgggtccaggaggggctggacatgcgcatggtcatcttccgctgcttctccaccggccggggcagagggatggtggagatgatccctaatgctgagaccctgcgtaagatccaggtggagcatggggtgaccggctcgttcaaggaccggcccctggcagactggctgcagaaacacaaccctggggaggacgagtatgagaaggctgtggagaactttatctactcctgcgctggctgctgcgtggccacgtacgtcttgggcatctgtgaccgacataatgacaacatcatgctgaagaccactggtcacatgttccacattgattttggccgcttcctgggccatgcccagatgtttggcaacatcaagcgggaccgtgccccctttgtcttcacctcggacatggcgtatgtcatcaacgggggtgacaagccttccagccgcttccatgattttgttgacctttgctgccaagcctacaacctcattcgcaagcacacccacctcttcctcaaccttctgggcctgatgttgtcctgtgggatccctgaactctcagacctggaggacctcaagtatgtgtacgatgccctgaggcctcaggatacagaggccaatgccactacctacttcactaggttgattgagtccagcctgggcagtgtagccacaaagctcaattttttcatccataatctggctcagatgaagttcacgggctcagatgaccggctgaccctctcctttgcctcccgaacacacactctcaagagctctggccgaatcagtgatgttttcctctgccgccatgagaagatcttccaccccaacaaaggctatatatatgtggtaaaggtgatgcgagagaacactcacgaggccacctacatccagcggacctttgaggagttccaggaattacacaataagttgcggctgctcttcccttcttcccacttgcccagcttccctagtcgcttcgtgatcggccgctcccggggagaggcggtggccgagcggcggagggaggagctaaacggttacatctggcacttgatccacgcaccccctgaggtggccgagtgtgatttggtgtacaccttcttccacccactgccccgggatgagaaggctatgggcaccagcccagctcctaagtcctcagatggcacatgggcccggcccgtcggaaaggtgggaggggaggtgaagctgtccatctcctacaaaaacaataaactcttcatcatggtgatgcatattcggggcttgcaactgctccaggatggaaatgaccctgacccctatgtgaaaatttacctccttcctgaccctcagaaaaccactaagaggaaaaccaaagtggcccggaaaacctgcaatcctacctacaatgagatgttggtatatgatgggatccccaagggtgacctgcagcagcgggagctccagctgagcgtgctgagtgagcagggattctgggagaacgtcctcctcggtgaggtgaacatccgcctgcgagagctggacctggctcaggagaagaccggctggttcgccctgggatctcgaagtcatggcaccttgtgagcccagcagagccaccacccagcatcccaggctggtggcaggagctgggggagaggactctcccctgtgagactcctccttgtgaagggccagggccctgggcaggcctccagctcggtccaggtgattctggcctctgtggtaggaggcagggagagtaagacatgctctgctgtctcttcctctggagactgaacttgggttggttgtgatgagcagccccttggaggctgtgaggttgcagcaaagttttaagtttaccttgtgtcaagggagcaatgcttggtttggggagtgtgtggggtgggctgtatgaagtagcattttgggggtgggtgggtggatatcttaatttttatttttaaaaaatgaaatagtgatgttgtcctaactgggacaggaagccttgcgagaagggacgtacctatgccccagaaggcaagagaggaagactatttggactttttgtatgattaaggttcttattggacttttccctaggttttttttttttgttattgttgttgttgtttcgttttctagctataggaactatctggggaggggcccagtgggtcctcggccagagccctctctaaggacaggttggggagggttggggagggctgcctgtgctggactgaggcttgtgccactgggcctttctgattttgcctccaaaggagagcgctgtgatacctacatgtgtaaggaagggccttccgtattggggttctgccaaggacccgtattcagggacccatgctcttttggggggacttttcctcttgtcttccctactttattaggacttgccctgaataccattttctaccccttgcccctccattctcctggcccttctgggggtcagctggtctctatgaatatgctgggggtgcttccccataggtctctcccttcatttgtctctggtgggacaaaatactgactcagtccttagatgtagtttcacccaagagcatcttggccctgggaagaggtccctaggctgcagatgctactgactgcttgctaggtagcctctggaaagcattccccatccatcactccccacttctttctgctgtgctgcttccctcccaaactccatttctgtcaccctttttataagacttttcctcattctgtggggccataaacctatttagtctggagccaaagggatgccctatctgaaggaaaggggcatggggtgggggattccatcaaaactgttgttttttgccccatgatttttctttggtcagtaggaggctggattggagtggtgattattcccctggagctaagctcaggagcccgaagggagagactgagactgactcccttatctcttcatattctttattccctaccagatggatttttttttttttttttggagacggagtctcgccctgtcgccaggctggagtgtagtggcatgatctcgactcactgcaaaatctgcctcccgggttcaagcgattctcctacctcagcctcccgagtagctgggattacaggcatgtgccaccacgccaagctaatttttgtatttttagtagagacggggtttcaccatgttggccaggatggtctcgatctcttgacctcgtgatctgcctgccttggcctcccaaagtgctgggattacaggcgtgagccaccatgccccgccccagatggattttacatttgctcttttgtgtttcgctccaaagggttgtcttcctcgccaaaaggagggagggactttgaatttgatatgaatctttaaaaccagaattggctggatatttcccatgattgggaaaagagtgaaatgaggacattctgtaaactgtccctccctaattccaaggatcagaaactccccgttttgctgactcattccataactggagaaagaagctccattgaccgaagccacagggcagcatggaagtttaaattttctctaaaattaaaatgccaaggataaagctggctgcttccaggagggggaagaggagtggggagtgggcggtgaaacttttccagatgaacggaccataaatgtgttactggctttgtgcctgtagctcattttattatgacctatatgctcctgatttaaagagatctgtgtactgtttacttcccacttcccagaatcccttgtatctcctttctcgggaattgtattttctaataaatgacatttgagaaaaaaatgaaa

SEQ ID NO: 130628 - DNA, 4904 bp, Artificial Sequence
  derived and/or modified sequence
atgagcagcactcagggaaacggagagcattggaagtcactcgaaagcgtaggcatctcccgtaaagagctggctatggccgaagccctccagatggagtacgatgccctgagtaggctcaggcacgacaaagaggaaaatcgcgctaagcagaatgcagatccttctctgattagttgggatgagccgggagtggatttctattctaaaccagctggaagaagaaccgatttgaagctgcttcgaggactgtccggcagcgacccaactctcaattacaatagcctctctccccaagagggccctcctaatcattccacatctcagggaccacagccagggtccgatccttggccaaagggcagcctttccggagactatctttacatatttgacgggtccgatggtggtgtgtcaagtagtcccggacctggagacatcgagggttcatgcaagaagctgagccctccgcctttaccaccacgcgcatcgatctgggatacgcccccattgccacctcgtaaaggttctccctcatcctcaaaaattagtcagccatccgacattaacactttctccctcgttgagcaattgccaggtaagctgctggagcataggatcctcgaggaggaggaagtgttgggcggaggaggtcagggcaggctgctcggctccgtggactatgatggcataaatgacgccataactcgcttaaatttgaaatccacatatgatgcagaaatgctcagagacgcaactcggggatggaaggagggacggggtcctcttgacttcagcaaggacacgtctgggaagcccgtggccagaagtaaaacaatgccaccgcaagtgcccccaagaacgtatgcttccagatacggcaaccgcaaaaatgccacccccggaaagaaccggaggatatccgcagcccctgtgggatcacgaccacatacagtagctaacggccacgaactctttgaagtcagtgaagagcgggacgaggaggtggccgctttttgtcatatgctggatatcctgaggtccggcagcgacattcaggattacttcctgaccggatacgtttggtccgccgtgacccccagcccggagcacctgggtgacgaggtgaatcttaaagtcacagtattgtgtgaccgcctgcaggaggctcttacattcacatgtaattgttcctccaccgtggacttgctgatctatcagacactatgctatactcacgatgacctccgtaacgtcgatgtgggagacttcgtgttgaaaccatgcggcctggaggagtttctccagaacaagcatgccttagggagccatgaatatattcagtactgtcggaagttcgatatcgatattcggctgcagctgatggagcagaaagtcgttcggtctgaccttgctcgtacagtaaacgacgatcagtctccctcgacactgaactatcttgtacacctgcaggagcgaccagtaaaacagacaataagcaggcaggcgctgtctctgctgtttgacacatatcacaatgaggtggatgcttttctgctcgctgacggagacttccctctgaaggctgacagggtagtgcagagtgtcaaggccatatgtaacgcattggccgcagtggagacaccagagattacgagcgccctgaatcaactccctccctgccccagcagaatgcagcccaagatccaaaaagacccatccgtgctagcagtccgcgagaacagggaaaaagttgtcgaagcactaacagccgctatccttgacctggtggaactttactgtaatacctttaatgccgattttcaaaccgccgtgccaggttcgcgtaagcacgatctggtgcaggaggcctgtcattttgccagatcactagccttcacagtctacgccacacatagaattcccataatttgggctacttcttatgaggatttttatctctcatgctcactcagccacggcggaaaggagctgtgttcccccttgcagactcggcgagctcatttcagcaagtacctctttcatttaatcgtgtgggatcagcaaatctgttttcctgtgcaggtcaatcgactccctagagaaaccttgctctgcgcgacactttacgcactacctatcccgcctcccggtagcagctctgaggcgaacaaacagcggagagtcccagaagctctgggctgggtgacaactcctctgttcaattttcgccaggtgttgacttgtggaagaaaactgctcggactttggccggctactcaagagaacccatccgctaggtggtcagcccctaattttcaccagcccgattctgtaatcctgcaaatagacttccccacctccgccttcgacataaaattcacatccccccctggcgataagttcagtccacgttatgagtttgggagtctgagagaggaagaccagagaaaactcaaggatatcatgcagaaagaaagcctctactggctgacggatgctgataaaaagaggctgtgggaaaagcgatattattgtcacagcgaggtatcttcacttcccctcgtgctcgcctccgcaccaagctgggagtgggcgtgtctgccggatatctatgttctcttgaaacaatggacacatatgaatcatcaggacgcattgggccttttacacgccacattccccgatcaggaggttcgacggatggcggttcagtggatcgggagcctatcagacgcggagctgctggattacctgcctcagctggtgcaggcattaaagtatgagtgctatctagacagcccactggtgcgattcctgctaaaacgcgcagtgtccgacctgcgagtgactcactactttttttggctacttaaagacgggctgaaggattcacagttttccataaggtaccagtacctgttggccgcactgctgtgctgttgcggcaaagggctgcgcgaggaatttaaccgacagtgttggcttgttaatgctctggcaaagttggcccagcaagttagagaagcagcacccagtgccaggcagggcatactacgaaccggcctggaggaggtgaaacagttctttgccctcaatggctcatgcagattgccacttagcccctcacttttggtgaaaggtattgtccccagggactgcagttatttcaatagcaatgccgttccactgaagttgtcgttccagaacgtggaccctctgggagaaaacattcgcgttatctttaagtgcggggacgacctgcgccaggatatgctgaccctccaaatgataagaatcatgagcaaaatctgggtgcaagagggcctggatatgaggatggtgatttttcggtgcttctccactggtaggggccgtggcatggtcgagatgataccaaatgctgaaactctgcgcaagatccaggtggagcacggagttaccggatcattcaaagacagaccacttgccgactggttgcagaaacataatcctggggaggatgagtatgaaaaagcggtcgagaatttcatttatagttgtgctgggtgctgcgtcgcaacgtatgtattgggcatttgcgacagacacaatgataatatcatgcttaagaccaccggtcatatgtttcacatcgacttcggtagattcttgggccacgctcagatgtttgggaatataaaacgtgatagagctccttttgtcttcaccagtgatatggcctacgtcatcaacgggggagataagccatctagccgcttccatgacttcgtcgatttgtgttgccaggcttacaacctcattcgtaagcacacacatcttttcctaaatcttctcggactcatgctcagctgcggcatcccagaactgtctgacttggaagacctaaagtacgtgtacgatgcacttcggccacaggacactgaggccaacgcaactacttacttcacaagattgattgagtcaagtttgggttctgtggcaacaaagctcaacttctttatacacaatctggcccaaatgaagtttactggatcagacgatagactcacacttagtttcgctagcagaacacataccctgaaaagctccgggaggatcagtgacgttttcctttgcaggcatgaaaagattttccaccccaacaaagggtacatttacgtggtcaaggtcatgagggagaacacccatgaggctacctacatccagcgaacattcgaggagttccaagaactacacaataagctccggctgctgttcccctcctctcatctgccctcatttcctagccgattcgtgattggcaggtctcgtggagaagccgtggctgagcgccgtagagaagagcttaacggctacatctggcacctgatccatgccccacctgaggtcgctgagtgtgacctggtctacacgttttttcaccccctgcctagagacgaaaaggctatgggtacttctcccgcacccaagtcctccgatggtacctgggctaggcccgtgggaaaagtgggcggagaagtcaaactaagtatctcctacaagaacaacaaactgtttattatggtgatgcatattcggggtctacagttactgcaggacggcaatgatcctgatccctacgtgaagatctacctcctccccgacccacaaaagacaaccaagcgtaaaaccaaggtcgcccgaaaaacgtgcaacccaacttacaatgaaatgctggtgtatgacggaatccccaaaggcgatctgcagcagagagagctacaactgagcgtgctgtctgagcagggattctgggagaacgtactactgggcgaggttaatatccggttacgggagctcgatctagctcaggaaaaaaccggatggttcgcactggggtcaaggagccatggaacgctcta

SEQ ID NO: 130629 - DNA, 360 bp, Artificial Sequence
  derived and/or modified sequence
atgtttggcaacatcaaacgcgacagagcgcctttcgtgtttacaagcgatatggcgtatgtaattaacggtggtgacaagccttcctctagattccacgatttcgtggacctttgttgccaggcctacaacttaattcgcaaacacactcacttgttcttaaacttgttaggtttgatgctgtcctgtggtatacccgagctgagtgacctagaagacctgaaatatgtttacgatgctcttcggccacaggatacagaggccaatgccacaacttactttacacgcgtgatccttgcaagtgtagtgggaggacgagaatccaagacatgcagcgcagtgagctcctccggagattag

SEQ ID NO: 130630 - DNA, 4905 bp, Artificial Sequence
  derived and/or modified sequence
atgagcagcacccagggcaacggcgagcactggaagagcctggagagcgtgggcatcagcagaaaggagctggccatggccgaggccctgcagatggagtacgacgccctgagcagactgagacacgacaaggaggagaacagagccaagcagaacgccgaccccagcctgatcagctgggacgagcccggcgtggacttctacagcaagcccgccggcagaagaaccgacctgaagctgctgagaggcctgagcggcagcgaccccaccctgaactacaacagcctgagcccccaggagggcccccccaaccacagcaccagccagggcccccagcccggcagcgacccctggcccaagggcagcctgagcggcgactacctgtacatcttcgacggcagcgacggcggcgtgagcagcagccccggccccggcgacatcgagggcagctgcaagaagctgagccccccccccctgccccccagagccagcatctgggacaccccccccctgccccccagaaagggcagccccagcagcagcaagatcagccagcccagcgacatcaacaccttcagcctggtggagcagctgcccggcaagctgctggagcacagaatcctggaggaggaggaggtgctgggcggcggcggccagggcagactgctgggcagcgtggactacgacggcatcaacgacgccatcaccagactgaacctgaagagcacctacgacgccgagatgctgagagacgccaccagaggctggaaggagggcagaggccccctggacttcagcaaggacaccagcggcaagcccgtggccagaagcaagaccatgcccccccaggtgccccccagaacctacgccagcagatacggcaacagaaagaacgccacccccggcaagaacagaagaatcagcgccgcccccgtgggcagcagaccccacaccgtggccaacggccacgagctgttcgaggtgagcgaggagagagacgaggaggtggccgccttctgccacatgctggacatcctgagaagcggcagcgacatccaggactacttcctgaccggctacgtgtggagcgccgtgacccccagccccgagcacctgggcgacgaggtgaacctgaaggtgaccgtgctgtgcgacagactgcaggaggccctgaccttcacctgcaactgcagcagcaccgtggacctgctgatctaccagaccctgtgctacacccacgacgacctgagaaacgtggacgtgggcgacttcgtgctgaagccctgcggcctggaggagttcctgcagaacaagcacgccctgggcagccacgagtacatccagtactgcagaaagttcgacatcgacatcagactgcagctgatggagcagaaggtggtgagaagcgacctggccagaaccgtgaacgacgaccagagccccagcaccctgaactacctggtgcacctgcaggagagacccgtgaagcagaccatcagcagacaggccctgagcctgctgttcgacacctaccacaacgaggtggacgccttcctgctggccgacggcgacttccccctgaaggccgacagagtggtgcagagcgtgaaggccatctgcaacgccctggccgccgtggagacccccgagatcaccagcgccctgaaccagctgcccccctgccccagcagaatgcagcccaagatccagaaggaccccagcgtgctggccgtgagagagaacagagagaaggtggtggaggccctgaccgccgccatcctggacctggtggagctgtactgcaacaccttcaacgccgacttccagaccgccgtgcccggcagcagaaagcacgacctggtgcaggaggcctgccacttcgccagaagcctggccttcaccgtgtacgccacccacagaatccccatcatctgggccaccagctacgaggacttctacctgagctgcagcctgagccacggcggcaaggagctgtgcagccccctgcagaccagaagagcccacttcagcaagtacctgttccacctgatcgtgtgggaccagcagatctgcttccccgtgcaggtgaacagactgcccagagagaccctgctgtgcgccaccctgtacgccctgcccatccccccccccggcagcagcagcgaggccaacaagcagagaagagtgcccgaggccctgggctgggtgaccacccccctgttcaacttcagacaggtgctgacctgcggcagaaagctgctgggcctgtggcccgccacccaggagaaccccagcgccagatggagcgcccccaacttccaccagcccgacagcgtgatcctgcagatcgacttccccaccagcgccttcgacatcaagttcaccagcccccccggcgacaagttcagccccagatacgagttcggcagcctgagagaggaggaccagagaaagctgaaggacatcatgcagaaggagagcctgtactggctgaccgacgccgacaagaagagactgtgggagaagagatactactgccacagcgaggtgagcagcctgcccctggtgctggccagcgcccccagctgggagtgggcctgcctgcccgacatctacgtgctgctgaagcagtggacccacatgaaccaccaggacgccctgggcctgctgcacgccaccttccccgaccaggaggtgagaagaatggccgtgcagtggatcggcagcctgagcgacgccgagctgctggactacctgccccagctggtgcaggccctgaagtacgagtgctacctggacagccccctggtgagattcctgctgaagagagccgtgagcgacctgagagtgacccactacttcttctggctgctgaaggacggcctgaaggacagccagttcagcatcagataccagtacctgctggccgccctgctgtgctgctgcggcaagggcctgagagaggagttcaacagacagtgctggctggtgaacgccctggccaagctggcccagcaggtgagagaggccgcccccagcgccagacagggcatcctgagaaccggcctggaggaggtgaagcagttcttcgccctgaacggcagctgcagactgcccctgagccccagcctgctggtgaagggcatcgtgcccagagactgcagctacttcaacagcaacgccgtgcccctgaagctgagcttccagaacgtggaccccctgggcgagaacatcagagtgatcttcaagtgcggcgacgacctgagacaggacatgctgaccctgcagatgatcagaatcatgagcaagatctgggtgcaggagggcctggacatgagaatggtgatcttcagatgcttcagcaccggcagaggcagaggcatggtggagatgatccccaacgccgagaccctgagaaagatccaggtggagcacggcgtgaccggcagcttcaaggacagacccctggccgactggctgcagaagcacaaccccggcgaggacgagtacgagaaggccgtggagaacttcatctacagctgcgccggctgctgcgtggccacctacgtgctgggcatctgcgacagacacaacgacaacatcatgctgaagaccaccggccacatgttccacatcgacttcggcagattcctgggccacgcccagatgttcggcaacatcaagagagacagagcccccttcgtgttcaccagcgacatggcctacgtgatcaacggcggcgacaagcccagcagcagattccacgacttcgtggacctgtgctgccaggcctacaacctgatcagaaagcacacccacctgttcctgaacctgctgggcctgatgctgagctgcggcatccccgagctgagcgacctggaggacctgaagtacgtgtacgacgccctgagaccccaggacaccgaggccaacgccaccacctacttcaccagactgatcgagagcagcctgggcagcgtggccaccaagctgaacttcttcatccacaacctggcccagatgaagttcaccggcagcgacgacagactgaccctgagcttcgccagcagaacccacaccctgaagagcagcggcagaatcagcgacgtgttcctgtgcagacacgagaagatcttccaccccaacaagggctacatctacgtggtgaaggtgatgagagagaacacccacgaggccacctacatccagagaaccttcgaggagttccaggagctgcacaacaagctgagactgctgttccccagcagccacctgcccagcttccccagcagattcgtgatcggcagaagcagaggcgaggccgtggccgagagaagaagagaggagctgaacggctacatctggcacctgatccacgccccccccgaggtggccgagtgcgacctggtgtacaccttcttccaccccctgcccagagacgagaaggccatgggcaccagccccgcccccaagagcagcgacggcacctgggccagacccgtgggcaaggtgggcggcgaggtgaagctgagcatcagctacaagaacaacaagctgttcatcatggtgatgcacatcagaggcctgcagctgctgcaggacggcaacgaccccgacccctacgtgaagatctacctgctgcccgacccccagaagaccaccaagagaaagaccaaggtggccagaaagacctgcaaccccacctacaacgagatgctggtgtacgacggcatccccaagggcgacctgcagcagagagagctgcagctgagcgtgctgagcgagcagggcttctgggagaacgtgctgctgggcgaggtgaacatcagactgagagagctggacctggcccaggagaagaccggctggttcgccctgggcagcagaagccacggcaccctgtag

SEQ ID NO: 130631 - DNA, 360 bp, Artificial Sequence
  derived and/or modified sequence
atgttcggcaacatcaagagagacagagcccccttcgtgttcaccagcgacatggcctacgtgatcaacggcggcgacaagcccagcagcagattccacgacttcgtggacctgtgctgccaggcctacaacctgatcagaaagcacacccacctgttcctgaacctgctgggcctgatgctgagctgcggcatccccgagctgagcgacctggaggacctgaagtacgtgtacgacgccctgagaccccaggacaccgaggccaacgccaccacctacttcaccagagtgatcctggccagcgtggtgggcggcagagagagcaagacctgcagcgccgtgagcagcagcggcgactag

SEQ ID NO: 130632 - protein, 887 aa, Artificial Sequence
  derived and/or modified sequence
MGEAEKFHYIYSCDLDINVQLKIGSLEGKREQKSYKAVLEDPMLKFSGLYQETCSDLYVTCQVFAEGKPLALPVRTSYKAFSTRWNWNEWLKLPVKYPDLPRNAQVALTIWDVYGPGKAVPVGGTTVSLFGKYGMFRQGMHDLKVWPNVEADGSEPTKTPGRTSSTLSEDQMSRLAKLTKAHRQGHMVKVDWLDRLTFREIEMINESEKRSSNFMYLMVEFRCVKCDDKEYGIVYYEKDGDESSPILTSFELVKVPDPQMSMENLVESKHHKLARSLRSGPSDHDLKPNAATRDQLNIIVSYPPTKQLTYEEQDLVWKFRYYLTNQEKALTKFLKCVNWDLPQEAKQALELLGKWKPMDVEDSLELLSSHYTNPTVRRYAVARLRQADDEDLLMYLLQLVQALKYENFDDIKNGLEPTKKDSQSSVSENVSNSGINSAEIDSSQIITSPLPSVSSPPPASKTKEVPDGENLEQDLCTFLISRACKNSTLANYLYWYVIVECEDQDTQQRDPKTHEMYLNVMRRFSQALLKGDKSVRVMRSLLAAQQTFVDRLVHLMKAVQRESGNRKKKNERLQALLGDNEKMNLSDVELIPLPLEPQVKIRGIIPETATLFKSALMPAQLFFKTEDGGKYPVIFKHGDDLRQDQLILQIISLMDKLLRKENLDLKLTPYKVLATSTKHGFMQFIQSVPVAEVLDTEGSIQNFFRKYAPSENGPNGISAEVMDTYVKSCAGYCVITYILGVGDRHLDNLLLTKTGKLFHIDFGYILGRDPKPLPPPMKLNKEMVEGMGGTQSEQYQEFRKQCYTAFLHLRRYSNLILNLFSLMVDANIPDIALEPDKTVKKVQDKFRLDLSDEEAVHYMQSLIDESVHALFAAVVEQIHKFAQYWRK

SEQ ID NO: 130633 - DNA, 2664 bp, Artificial Sequence
  derived and/or modified sequence
atgggcgaggccgagaagttccactacatctacagctgcgacctggacatcaacgtgcagctgaagatcggcagcctggagggcaagagagagcagaagagctacaaggccgtgctggaggaccccatgctgaagttcagcggcctgtaccaggagacctgcagcgacctgtacgtgacctgccaggtgttcgccgagggcaagcccctggccctgcccgtgagaaccagctacaaggccttcagcaccagatggaactggaacgagtggctgaagctgcccgtgaagtaccccgacctgcccagaaacgcccaggtggccctgaccatctgggacgtgtacggccccggcaaggccgtgcccgtgggcggcaccaccgtgagcctgttcggcaagtacggcatgttcagacagggcatgcacgacctgaaggtgtggcccaacgtggaggccgacggcagcgagcccaccaagacccccggcagaaccagcagcaccctgagcgaggaccagatgagcagactggccaagctgaccaaggcccacagacagggccacatggtgaaggtggactggctggacagactgaccttcagagagatcgagatgatcaacgagagcgagaagagaagcagcaacttcatgtacctgatggtggagttcagatgcgtgaagtgcgacgacaaggagtacggcatcgtgtactacgagaaggacggcgacgagagcagccccatcctgaccagcttcgagctggtgaaggtgcccgacccccagatgagcatggagaacctggtggagagcaagcaccacaagctggccagaagcctgagaagcggccccagcgaccacgacctgaagcccaacgccgccaccagagaccagctgaacatcatcgtgagctacccccccaccaagcagctgacctacgaggagcaggacctggtgtggaagttcagatactacctgaccaaccaggagaaggccctgaccaagttcctgaagtgcgtgaactgggacctgccccaggaggccaagcaggccctggagctgctgggcaagtggaagcccatggacgtggaggacagcctggagctgctgagcagccactacaccaaccccaccgtgagaagatacgccgtggccagactgagacaggccgacgacgaggacctgctgatgtacctgctgcagctggtgcaggccctgaagtacgagaacttcgacgacatcaagaacggcctggagcccaccaagaaggacagccagagcagcgtgagcgagaacgtgagcaacagcggcatcaacagcgccgagatcgacagcagccagatcatcaccagccccctgcccagcgtgagcagccccccccccgccagcaagaccaaggaggtgcccgacggcgagaacctggagcaggacctgtgcaccttcctgatcagcagagcctgcaagaacagcaccctggccaactacctgtactggtacgtgatcgtggagtgcgaggaccaggacacccagcagagagaccccaagacccacgagatgtacctgaacgtgatgagaagattcagccaggccctgctgaagggcgacaagagcgtgagagtgatgagaagcctgctggccgcccagcagaccttcgtggacagactggtgcacctgatgaaggccgtgcagagagagagcggcaacagaaagaagaagaacgagagactgcaggccctgctgggcgacaacgagaagatgaacctgagcgacgtggagctgatccccctgcccctggagccccaggtgaagatcagaggcatcatccccgagaccgccaccctgttcaagagcgccctgatgcccgcccagctgttcttcaagaccgaggacggcggcaagtaccccgtgatcttcaagcacggcgacgacctgagacaggaccagctgatcctgcagatcatcagcctgatggacaagctgctgagaaaggagaacctggacctgaagctgaccccctacaaggtgctggccaccagcaccaagcacggcttcatgcagttcatccagagcgtgcccgtggccgaggtgctggacaccgagggcagcatccagaacttcttcagaaagtacgcccccagcgagaacggccccaacggcatcagcgccgaggtgatggacacctacgtgaagagctgcgccggctactgcgtgatcacctacatcctgggcgtgggcgacagacacctggacaacctgctgctgaccaagaccggcaagctgttccacatcgacttcggctacatcctgggcagagaccccaagcccctgcccccccccatgaagctgaacaaggagatggtggagggcatgggcggcacccagagcgagcagtaccaggagttcagaaagcagtgctacaccgccttcctgcacctgagaagatacagcaacctgatcctgaacctgttcagcctgatggtggacgccaacatccccgacatcgccctggagcccgacaagaccgtgaagaaggtgcaggacaagttcagactggacctgagcgacgaggaggccgtgcactacatgcagagcctgatcgacgagagcgtgcacgccctgttcgccgccgtggtggagcagatccacaagttcgcccagtactggagaaagtag

SEQ ID NO: 130634 - DNA, 2664 bp, Artificial Sequence
  derived and/or modified sequence
atgggagaggccgagaaattccactacatttattcgtgcgatcttgatataaatgtacagctgaaaatcggttccctggaggggaaacgagagcagaagagctataaggcagttttggaagaccctatgttgaaattctctgggctctaccaggaaacatgcagcgacctctatgtcacctgccaggtcttcgctgaagggaaacctctggcccttcctgtgcgaacctcctataaagcgttcagcactcgctggaactggaacgagtggttaaaattacccgtcaaataccccgatctgccccggaatgcacaagtcgcactgacaatttgggacgtttacgggcctggaaaggccgttcccgtgggcggcaccactgtctcgctctttggcaaatatgggatgttcagacagggcatgcacgatctgaaagtgtggccgaacgtggaagccgatgggagcgagccgaccaagacccccggcagaacatcctctacactgtccgaggaccagatgagtagactggctaaactcactaaagcacaccggcaggggcacatggttaaagtagactggcttgacagattgacattccgcgagatcgaaatgattaatgaatccgaaaagaggtctagcaacttcatgtatttaatggtcgagttcaggtgtgtgaagtgcgacgacaaggagtacgggattgtgtactacgagaaggacggcgacgaatcctctccaatccttacatcctttgagctcgtaaaggttccagacccccagatgtcaatggaaaaccttgtggagtctaagcaccataagctcgctcggtcgctccgttccggtccatcagaccatgatctgaaaccaaacgccgcaaccagagaccagctcaacataattgtgtcctatcccccaacgaagcagctgacatatgaggaacaggatctggtgtggaaatttagatactacctcactaaccaggaaaaggccctgaccaagtttctcaaatgcgttaattgggatctcccacaggaggcaaagcaagctctcgagctgcttggtaaatggaagcctatggacgtcgaggacagcctggaactactcagttcccactacaccaatcctaccgtgcgaaggtacgccgtggccaggctgagacaggcggacgatgaagacctgttgatgtacctgctgcagttggtacaggcccttaagtatgagaatttcgatgacatcaaaaacggactagaacccacgaagaaagattcccagagcagcgtatctgagaacgtgagcaattcgggaatcaatagcgcagaaatcgattcatcccagatcattacctcacccctcccaagcgttagctctcccccaccagctagtaaaactaaagaggtgccagacggagaaaatctggaacaagacctatgtacctttctgatatctcgtgcctgtaagaatagcactttagctaattatctctattggtacgtaattgttgagtgtgaagatcaggacacacagcagagggatcccaaaacccacgagatgtacctgaacgttatgaggaggttcagtcaagctttgctgaagggcgataaaagtgtcagggtgatgagaagtcttctggctgcccagcaaaccttcgtggataggctcgttcacctgatgaaggctgtgcagagggagtcaggcaatagaaaaaaaaagaatgagaggctgcaggccctgctgggggacaatgaaaaaatgaatctcagtgacgttgagttaattcctcttcctctggaaccgcaggtaaagattaggggcattatccctgagactgcgacattgttcaaaagcgctctcatgccagcccagctgttcttcaaaacagaagacggcggcaagtacccagtaatcttcaaacacggggacgacctcaggcaagatcagttgatcttgcaaataatttcgctgatggataagctcctgcgaaaagaaaaccttgacctcaagcttaccccgtacaaggttctggcaacctctacgaagcacggtttcatgcagtttattcagagtgtccctgtggccgaagtgttagataccgaaggctccattcaaaacttctttcgtaagtacgctcccagcgaaaacggacctaatggcatctcagcagaggtgatggatacatacgtgaaatcgtgcgctggatattgtgtaatcacttacattctgggagtcggggaccgacatcttgacaatcttctgttgaccaagaccggcaaactgttccacatcgacttcgggtatattcttgggcgcgaccctaagcccttgcccccgccaatgaaactaaacaaagaaatggtcgaaggcatgggggggacccagtcagaacagtatcaagaatttcggaagcagtgctataccgcctttttacaccttagacggtattctaatctgatcctcaacctattcagtcttatggtggatgctaatattcctgacatcgcattagagcctgataagaccgtcaaaaaggttcaagataaatttcgcctggatttgagcgacgaagaagccgtacattacatgcagagccttatcgacgaaagcgttcatgctctgtttgccgctgtggtggaacagatccacaagttcgcacaatattggaggaaatag

SEQ ID NO: 130635 - DNA, 2664 bp, Artificial Sequence
  derived and/or modified sequence
atgggagaggccgagaagttccactacatctacagctgtgacctggacatcaacgtgcagctgaagattggcagcctggagggcaagcgggagcagaagagctacaaggctgtgctggaggaccccatgctgaagttcagcggcctgtaccaggagacctgcagcgacctgtatgtgacctgccaggtgtttgctgagggcaagcccctggccctgcctgtgaggaccagctacaaggccttcagcacccgctggaactggaatgagtggctgaagctgcctgtgaagtacccagacctgcccagaaatgcccaggtggccctgaccatctgggatgtgtatggccctgggaaggctgtgcctgtgggcggcaccaccgtgtccctgtttgggaagtatggcatgttccggcagggcatgcatgacctgaaggtgtggcccaacgtggaggctgatggcagcgagcccaccaagaccccaggccgcaccagcagcaccctgtctgaggaccagatgagccggctggccaagctgaccaaggcccaccggcagggccacatggtgaaggtggactggctggaccggctgaccttccgggagattgagatgatcaatgaaagtgagaagaggagcagcaacttcatgtacctgatggtggagttccgctgtgtgaagtgtgatgacaaggagtatggaattgtgtactatgagaaggatggagatgagagcagccccatcctgaccagctttgagctggtgaaggtgcctgacccccagatgtccatggagaacctggtggagagcaagcaccacaagctggcccggagcctgcggagcggccccagcgaccatgacctgaagcccaatgctgccacccgggaccagctgaacatcatcgtgtcctacccacccaccaagcagctgacctatgaggagcaggacctggtgtggaagttccgctactacctgaccaaccaggagaaggccctgaccaagttcctgaagtgtgtgaactgggacctgccccaggaggccaagcaggccctggagctgctgggcaagtggaagcccatggatgtggaggacagcctggagctgctgagcagccactacaccaaccccaccgtgagaagatatgctgtggcccggctgcggcaggctgatgatgaggacctgctgatgtacctgctgcagctggtgcaggccctgaagtatgagaactttgatgacatcaagaatggcctggagcccaccaagaaggacagccagagctctgtgtctgaaaatgtgagcaacagcggcatcaacagcgctgagattgacagcagccagatcatcaccagccccctgcccagcgtgagcagccccccaccagccagcaagaccaaggaggtgcctgatggagagaacctggagcaggacctgtgcaccttcctgatcagccgggcctgcaagaacagcaccctggccaactacctgtactggtacgtgattgtggagtgtgaggaccaggacacccagcagagggaccccaagacccatgagatgtacctgaatgtgatgaggcgcttcagccaggccctgctgaagggggacaagtctgtgcgggtgatgaggagcctgctggccgcccagcagacctttgtggaccggctggtgcacctgatgaaggctgtgcagcgggagagcggcaacaggaagaagaagaatgaaaggctgcaggccctgctgggggacaatgagaagatgaacctgagtgatgtggagctgatccccctgcccctggagccccaggtgaagatccggggcatcatccctgagacagccaccctcttcaagagcgccctgatgcctgcccagctgttcttcaagacagaagatggcggcaagtaccctgtgatcttcaagcatggagatgacctgcggcaggaccagctgatcctgcagatcatcagcctgatggacaagctgctgaggaaagaaaacctggacctgaagctgaccccctacaaggtgctggccaccagcaccaagcacggcttcatgcagttcatccagagcgtgcctgtggccgaggtgctggacacagagggcagcatccagaacttcttcagaaaatatgcccccagtgaaaatggccccaacggcatctctgctgaggtgatggacacctacgtgaagagctgtgccggctactgtgtgatcacctacatcctgggcgtgggggacagacacctggacaacctgctgctgaccaagacaggcaagctgttccacatcgactttggctacatcctgggccgggaccccaagcccctgcccccacccatgaagctgaacaaggagatggtggagggcatgggcggcacccagagcgagcagtaccaggagttcaggaagcagtgctacacagccttcctgcacctgcggcgctacagcaacctgatcctgaacctcttcagcctgatggtggatgccaacatcccagacatcgccctggagccagacaagacagtgaagaaggtgcaggacaagttccggctggacctgagtgatgaggaggccgtgcactacatgcagagcctgattgatgagagcgtgcacgccctgtttgctgctgtggtggagcagatccacaagtttgcccagtactggaggaagtag

SEQ ID NO: 130636 - DNA, 2664 bp, Artificial Sequence
  derived and/or modified sequence
atgggcgaggccgagaagttccactacatctacagctgcgacctggatataaacgtccagctcaaaataggatctctggaaggcaaacgagagcagaagtcctacaaggccgtcttggaagatcccatgttaaagttctcgggcctgtaccaagagacatgctctgacttatacgtaacatgccaagtgtttgccgaaggtaaacctttggcccttcccgtgcgaacaagttacaaggccttcagcacgaggtggaactggaatgaatggttgaagctccctgttaagtaccctgatctccctcgaaacgcacaggttgcactgacgatctgggatgtgtacggaccaggcaaagccgtaccagttggagggaccacggtgagcctcttcgggaaatatggcatgttcaggcaaggcatgcacgaccttaaggtatggcctaacgttgaggccgacggctctgagcctaccaaaacacctggccggacgtcttcgactctatccgaggaccagatgtcaaggcttgccaaactcaccaaggcacacaggcaaggacacatggtgaaagtagactggctggataggttaaccttccgcgagatcgaaatgatcaatgagagtgaaaagaggtcctcgaattttatgtacctgatggtggagttcagatgcgtcaagtgcgacgacaaggagtacgggatagtgtattatgaaaaggatggtgacgagtcatccccaatcctcacctcctttgagcttgtcaaggtgccggacccccagatgagcatggaaaatctagtggagtctaagcaccataaacttgccaggtccctgaggagcgggcccagcgatcacgacctcaagcccaatgctgccacgagagaccagctgaacatcatcgtgtcttatccccccaccaagcaattaacatacgaagagcaggacctggtgtggaagttcaggtattacctgaccaaccaagagaaagccctgacaaagttcttgaagtgcgtgaactgggatctaccccaggaagctaaacaagctctggaactgctgggcaagtggaaaccaatggacgtggaggacagcctggaactgcttagctctcactacaccaatccgaccgtgcggaggtatgctgtcgctcgactgagacaagcggatgacgaagacttactcatgtacctgctgcagctggtacaagccctgaaatacgagaacttcgatgacataaagaacggactcgaacccacgaagaaagacagtcagtcctcggtgtcagagaacgtatccaattccgggatcaatagtgcagaaatcgacagttcccagatcattacttcacctctgccatccgtctcttcaccaccgcccgccagcaaaactaaggaggttcccgacggcgagaatcttgaacaggatctctgtactttcttgatcagccgggcatgtaagaattccacactggccaactacctgtactggtacgtgatagtcgagtgcgaggatcaggatactcaacagagggacccgaagacacacgagatgtacctgaacgttatgcgaagattttctcaggccctgctaaagggggacaagtctgtcagggtgatgcggtccctgttggccgcccaacaaactttcgtagataggttggtgcaccttatgaaagccgttcagcgcgagtccggaaatagaaagaagaaaaatgagagattgcaggcactcctgggggacaacgagaagatgaacctgtccgatgtagagcttatccctctgcccctcgagccccaggtgaaaattcgtggtataatccctgaaaccgccactctctttaagtccgctcttatgcccgcccagctgttcttcaagacggaggatggggggaaatatcctgtgatcttcaagcacggcgatgaccttaggcaggaccagctcattctgcaaatcatctctctgatggataagctgcttcgaaaagaaaacctggacctgaaactgacgccctacaaagttctggccacatctaccaagcacggatttatgcagttcattcaatccgtaccagtggctgaggtgctcgacacagagggttctatacagaacttttttagaaagtatgctccatctgaaaatggccctaatgggatttcagctgaggtcatggacacttacgtcaaatcctgtgcagggtattgcgtgatcacatacattttgggggtgggcgatagacacttagacaatttactgctgacaaagaccggcaaattatttcacattgatttcgggtatatcctggggagggaccctaaaccccttccccccccgatgaaactgaataaagagatggtagagggcatggggggcacccagagtgagcaataccaagagttccgaaaacagtgttatactgcctttctgcaccttcggaggtactcaaatcttattctgaacctattctctctcatggtggacgcaaacatccctgacatcgctctggagcctgataagactgttaaaaaggttcaggacaaattccgactggatttgtctgacgaggaagcggtgcactacatgcagtccctgatcgacgaaagcgttcatgcgctgtttgctgcggtggtagaacaaatccacaagttcgctcagtactggaggaaatag
